(19) United States
(12) Patent Application Publication
(10) Pub. No.: US 2023/0265152 A1
(43) Pub. Date: Aug. 24, 2023

(54) GLP-1R AGONIST / FGF21 FUSION PROTEINS

(71) Applicant: SANOFI, Paris (FR)

(72) Inventors: Oliver BOSCHEINEN, Frankfurt am Main (DE); Werner DITTRICH, Frankfurt am Main (DE); Andreas EVERS, Frankfurt am Main (DE); Thomas LANGER, Frankfurt am Main (DE); Christine RUDOLPH, Frankfurt am Main (DE); Uwe SCHWAHN, Frankfurt am Main (DE); Mark SOMMERFELD, Frankfurt am Main (DE)

(21) Appl. No.: 18/013,462

(22) PCT Filed: Jul. 2, 2020
(86) PCT No.: PCT/EP2020/068746

§ 371 Date: Dec. 28, 2022

(51) Int. Cl. C07K 14/605; C07K 14/50; A61K 38/18; A61K 38/26; A61P 3/04

(52) U.S. Cl. CPC C07K 14/605; A61K 38/1825; A61K 38/26; A61P 3/04; C07K 14/50

(57) ABSTRACT

The present invention relates to fusion proteins comprising a Glucagon-Like Peptide-1 Receptor 5 (GLP-1R) agonistic peptide and a variant of human Fibroblast Growth Factor 21 (FGF21). The present invention further relates to the use of fusion proteins comprising a GLP-1R agonistic peptide and a variant of FGF21 as medicaments, in particular for the treatment of obesity, being overweight, metabolic syndrome, diabetes mellitus, diabetic retinopathy, hyperglycemia, dyslipidemia, non-alcoholic steatohepatitis (NASH) and/or atherosclerosis in a subject. The present invention also relates to pharmaceutical compositions comprising fusion proteins including a GLP-1R agonistic peptide and a variant of FGF21.

### TECHNICAL FIELD OF THE INVENTION

[0001] The present invention relates to fusion proteins comprising a GLP-1R (Glucagon-Like Peptide-1 Receptor) agonistic peptide and a variant of human Fibroblast Growth Factor 21 (FGF21). It further relates to the use of these fusion proteins as medicaments, in particular for the treatment of obesity, being overweight, metabolic syndrome, diabetes mellitus, diabetic retinopathy, hyperglycemia, dyslipidemia, Non-Alcoholic SteatoHepatitis (NASH) and/or atherosclerosis.

### BACKGROUND OF THE INVENTION

[0002] The use of FGF21 and GLP-1R agonists as fusion proteins has drawbacks. The pharmacological effects of FGF21 are observed at higher plasma levels than the plasma levels of GLP-1 (the primary GLP-1R agonist) that exert pharmacological effects. In addition, at higher plasma levels, GLP-1 is known to have adverse effects, e.g., it induces nausea and vomiting. Taken together, this indicates a risk of GLP-1-mediated adverse effects when administering a combination of an FGF21 compound and a GLP-1R agonist in the form of a fusion protein. Accordingly, new fusion proteins that combine FGF21 and GLP-1R agonists and formulations thereof are needed.

### SUMMARY OF THE INVENTION

[0003] It was an object of the present invention to provide fusion proteins with optimized GLP-1R agonist / FGF21 compound activity ratios in order to achieve the beneficial effects of both active agents (e.g., in terms of body weight, lipids, glycemic control and the like) while avoiding potential adverse effects (e.g., nausea and vomiting and the like).

[0004] In one aspect, the present invention relates to a fusion protein comprising a GLP-1R agonistic peptide and a functionally active variant of human FGF21.

[0005] In one embodiment, the GLP-1R agonistic peptide is a variant of native GLP-1(7-36) comprising up to about 15 substitutions of amino acid residues in the amino acid sequence of native GLP-1(7-36) (SEQ ID NO: 260).

[0006] In one embodiment, the functionally active variant of human FGF21 comprises an amino acid sequence being at least about 96% identical to the amino acid sequence of SEQ ID NO: 250 or SEQ ID NO: 251 and comprises
[0007] (i) substitutions Q55C and P147C or substitutions Q55C and N149C, and
[0008] (ii) a substitution or deletion of G198 and/or P199,
wherein numbering of the amino acid residues is in accordance with SEQ ID NO: 250.

[0009] In one embodiment, the GLP-1R agonistic peptide and the functionally active variant of human FGF21 are linked via a linker molecule comprising a structure selected from the group consisting of L - Fc, Fc - L, L₁ - Fc - L₂ and Fc, wherein L, L₁ and L₂ are independently selected from the group consisting of single amino acids and peptides, and Fc is an Fc domain of an immunoglobulin or a variant thereof.

[0010] In one embodiment, the GLP-1R agonistic peptide as part of the fusion protein has a GLP-1R agonistic activity which is about 9- to about 531-fold reduced as compared to the GLP-1R agonistic activity of native GLP-1(7-36).

[0011] In one embodiment, the GLP-1R agonistic peptide as part of the fusion protein has a GLP-1R agonistic activity which is about 9- to about 482-fold (or about 9.449- to about 482.396-fold) or about 9- to about 319-fold (or about 9.449- to about 319.311-fold) or about 9- to about 121-fold (or about 9.449- to about 121.189-fold) reduced as compared to the GLP-1R agonistic activity of native GLP-1(7-36).

[0012] In one embodiment, the GLP-1R agonistic peptide as part of the fusion protein has a GLP-1R agonistic activity which is about 9- to about 319-fold reduced as compared to the GLP-1R agonistic activity of native GLP-1(7-36).

[0013] In one embodiment, the GLP-1R agonistic peptide as part of the fusion protein has a GLP-1R agonistic activity which is at least about 9.4-fold or at least about 9.45-fold or at least about 9.5-fold reduced as compared to the GLP-1R agonistic activity of native GLP-1(7-36).

[0014] In one embodiment, the GLP-1R agonistic peptide as part of the fusion protein has a GLP-1R agonistic activity which is at least about 10-fold reduced as compared to the GLP-1R agonistic activity of native GLP-1(7-36).

[0015] In one embodiment, the GLP-1R agonistic peptide as part of the fusion protein has a GLP-1R agonistic activity which is at most about 482.4-fold or at most about 482.35-fold reduced as compared to the GLP-1R agonistic activity of native GLP-1(7-36).

[0016] In one embodiment, the GLP-1R agonistic peptide as part of the fusion protein has a GLP-1R agonistic activity which is at most about 482-fold reduced as compared to the GLP-1R agonistic activity of native GLP-1(7-36).

[0017] In one embodiment, the GLP-1R agonistic peptide as part of the fusion protein has a GLP-1R agonistic activity which is about 10- to about 482-fold reduced as compared to the GLP-1R agonistic activity of native GLP-1(7-36).

[0018] In one embodiment, the GLP-1R agonistic peptide as part of the fusion protein has a GLP-1R agonistic activity which is about 10- to about 319-fold reduced as compared to the GLP-1R agonistic activity of native GLP-1(7-36).

[0019] In one embodiment, the GLP-1R agonistic peptide as part of the fusion protein has a GLP-1R agonistic activity which is about 90- to about 100-fold reduced as compared to the GLP-1R agonistic activity of native GLP-1(7-36).

[0020] In one embodiment, the GLP-1R agonistic peptide as part of the fusion protein has a GLP-1R agonistic activity which is at least about 18-fold (or at least about 18.268-fold) reduced as compared to the GLP-1R agonistic activity of native GLP-1(7-36).

[0021] In one embodiment, the GLP-1R agonistic peptide as part of the fusion protein has a GLP-1R agonistic activity which is about 18- to about 501-fold (or about 18.268- to about 500.686-fold) or about 18- to about 469-fold (or about 18.268- to about 468.679-fold) or about 18- to about 313-fold (or about 18.268- to about 313.214-fold) or about 18- to about 123-fold (or about 18.268- to about 123.466-fold) reduced as compared to the GLP-1 R agonistic activity of native GLP-1(7-36).

[0022] In one embodiment, the GLP-1R agonistic peptide as part of the fusion protein has a GLP-1R agonistic activity which is about 18- to about 313-fold reduced as compared to the GLP-1R agonistic activity of native GLP-1(7-36).

[0023] In one of the above embodiments, the GLP-1R agonistic peptide as part of the fusion protein has a GLP-1R agonistic activity which is at least about 18.2-fold or at least about 18.3-fold reduced as compared to the GLP-1R agonistic activity of native GLP-1(7-36).

[0024] In one of the above embodiments, the GLP-1R agonistic peptide as part of the fusion protein has a GLP-1R agonistic activity which is at least about 20-fold or at least about 50-fold or at least about 100-fold reduced as compared to the GLP-1R agonistic activity of native GLP-1(7-36).

[0025] In one embodiment, the GLP-1R agonistic peptide as part of the fusion protein has a GLP-1R agonistic activity which is about 10-fold to about 500-fold reduced as compared to the GLP-1R agonistic activity of native GLP-1(7-36). In one embodiment, the GLP-1R agonistic peptide as part of the fusion protein has a GLP-1R agonistic activity which is about 15-fold to about 500-fold reduced as compared to the GLP-1R agonistic activity of native GLP-1(7-36). In one embodiment, the GLP-1R agonistic peptide as part of the fusion protein has a GLP-1R agonistic activity which is about 20-fold to about 500-fold reduced as compared to the GLP-1R agonistic activity of native GLP-1(7-36). In one embodiment, the GLP-1R agonistic peptide as part of the fusion protein has a GLP-1R agonistic activity which is about 50-fold to about 500-fold reduced as compared to the GLP-1R agonistic activity of native GLP-1(7-36). In one embodiment, the GLP-1R agonistic peptide as part of the fusion protein has a GLP-1R agonistic activity which is about 100-fold to about 500-fold reduced as compared to the GLP-1R agonistic activity of native GLP-1(7-36). In one embodiment, the GLP-1R agonistic peptide as part of the fusion protein has a GLP-1R agonistic activity which is about 100-fold to about 300-fold reduced as compared to the GLP-1R agonistic activity of native GLP-1(7-36).

[0026] In one embodiment, the fusion protein has a GLP-1R agonistic activity as defined above.

[0027] In one embodiment, the GLP-1R agonistic peptide comprises or consists of the amino acid sequence

X₁ -X₂-X₃-G-T-F-T-S-D-X₁₀-S-X₁₂-X₁₃-X₁₄-X₁₃-X₁₆-X₁ ₇-X₁₈-X₁₉-X₂₀-X₂₁-X₂₂-X₂₃-X₂₄-X₂₅-L-X₂₇-X₂₈-X₂₉-X_{3 0} (SEQ ID NO: 4077),

wherein
[0028] X₁ is H, Y or F,
[0029] X₂ is G, S, T or A,
[0030] X₃ is E or Q,
[0031] X₁₀ is K or L,
[0032] X₁₂ is K, I or Q,
[0033] X₁₃ is Q or L,
[0034] X₁₄ is L, M or C,
[0035] X₁₅ is E, A or D,
[0036] X₁₆ is E, K or S,
[0037] X₁₇ is E, R or Q,
[0038] X₁₈ is L, A or R,
[0039] X₁₉ is V, A or F,
[0040] X₂₀ is R, H, Q, K or I,
[0041] X₂₁ is L, E, H or R,
[0042] X₂₂ is F or L,
[0043] X₂₃ is I, Y or F,
[0044] X₂₄ is E, L or Y,
[0045] X₂₅ is W or L,
[0046] X₂₇ is I, L, K or E,
[0047] X₂₈ is A, K, N or E,
[0048] X₂₉ is G, T, K or V and
[0049] X₃₀ is G or deleted;
[0050] wherein, optionally, the amino acid sequence further comprises at least one additional amino acid residue at its N-terminus; and
[0051] wherein, optionally, the amino acid sequence further comprises a peptide extension consisting of up to about 12, about 11 or about 10 amino acid residues at its C-terminus.

[0052] In one embodiment, the at least one additional amino acid residue is G or A. In one embodiment, the at least one additional amino acid residue is a single amino acid residue. In one embodiment, the at least one additional amino acid residue is G.

[0053] In one embodiment, the peptide extension consists of an amino acid sequence selected from the group consisting of SEQ ID NOs: 4008 to 4063. In one embodiment, the peptide extension is a single amino acid residue, e.g., P.

[0054] In one embodiment, the GLP-1R agonistic peptide comprises or consists of an amino acid sequence selected from the group consisting of SEQ ID NOs: 261 to 565.

[0055] In one embodiment, the GLP-1R agonistic peptide comprises or consists of the amino acid sequence

X₁-G-E-G-T-F-T-S-D-X₁₀-S-X₁₂-X₁₃-L-X₁₅-X₁₆-X₁₇-X₁₈
-X₁₉-X₂₀-X₂₁-F-X₂₃-E-W-L-X₂₇-X₂₈-X₂₉-G(SEQ ID NO:
4078),

wherein
[0056] X₁ is H, Y or F,
[0057] X₁₀ is K or L,
[0058] X₁₂ is K, I or Q,
[0059] X₁₃ is Q or L,
[0060] X₁₅ is E, A or D,
[0061] X₁₆ is E, K or S,
[0062] X₁₇ is E, R or Q,
[0063] X₁₈ is L, A or R,
[0064] X₁₉ is V, A or F,
[0065] X₂₀ is R, H, Q, K or I,
[0066] X₂₁ is L, E, H or R,
[0067] X₂₃ is I, Y or F,
[0068] X₂₇ is I, L, K or E,
[0069] X₂₈ is A, K, N or E, and
[0070] X₂₉ is G, T, K or V;
[0071] wherein, optionally, the amino acid sequence further comprises at least one additional amino acid residue at its N-terminus; and
[0072] wherein, optionally, the amino acid sequence further comprises a peptide extension consisting of up to about 12, about 11 or about 10 amino acid residues at its C-terminus.

[0073] In one embodiment, the at least one additional amino acid residue is G or A. In one embodiment, the at least one additional amino acid residue is a single amino acid residue. In one embodiment, the at least one additional amino acid residue is G.

[0074] In one embodiment, the peptide extension consists of an amino acid sequence selected from the group consisting of SEQ ID NOs: 4008 to 4063.

[0075] In one embodiment, the GLP-1R agonistic peptide comprises or consists of the amino acid sequence

H-G-E-G-T-F-T-S-D-X₁₀-S-K-Q-L-E-E-E-X₁₈-V-X₂₀-L-F-
I-E-W-L-K-A-X₂₉-G (SEQ ID NO: 4079),

wherein
[0076] X₁₀ is K or L,
[0077] X₁₈ is A or R,
[0078] X₂₀ is R or Q, and
[0079] X₂₉ is G or T;
[0080] wherein, optionally, the amino acid sequence further comprises at least one additional amino acid residue at its N-terminus; and
[0081] wherein, optionally, the amino acid sequence further comprises a peptide extension consisting of up to 12, 11 or 10 amino acid residues at its C-terminus.

[0082] In one embodiment, the at least one additional amino acid residue is G or A. In one embodiment, the at least one additional amino acid residue is a single amino acid residue. In one embodiment, the at least one additional amino acid residue is G.

[0083] In one embodiment, the peptide extension is as defined above. In one embodiment, the peptide extension comprises or consists of the amino acid sequence of PSSGAPPPS (SEQ ID NO: 4047) or PKKIRYS (SEQ ID NO: 4040).

[0084] In one embodiment, the GLP-1R agonistic peptide comprises or consists of the amino acid sequence of SEQ ID NO: 261 or 262.

[0085] In one embodiment, the GLP-1R agonistic peptide does not comprise or consist of an amino acid sequence of any one of SEQ ID NOs: 4064 to 4076 and 553.

[0086] In one embodiment, the functionally active variant of human FGF21 comprises a substitution or deletion selected from the group consisting of G198R, G198K, G198Y and P199 deleted.

[0087] In one embodiment, the functionally active variant of human FGF21 comprises or consists of an amino acid sequence selected from the group consisting of SEQ ID NOs: 253, 254, 255 and 256. In one embodiment, the functionally active variant of human FGF21 comprises or consists of the amino acid sequence of SEQ ID NO: 253 or 254.

[0088] In one embodiment, the GLP-1R agonistic peptide comprises or consists of the amino acid sequence of SEQ ID NO: 261, and the functionally active variant of human FGF21 comprises or consists of the amino acid sequence of SEQ ID NO: 253.

[0089] In one embodiment, the GLP-1R agonistic peptide comprises or consists of the amino acid sequence of SEQ ID NO: 261, and the functionally active variant of human FGF21 comprises or consists of the amino acid sequence of SEQ ID NO: 254.

[0090] In one embodiment, the GLP-1R agonistic peptide comprises or consists of the amino acid sequence of SEQ ID NO: 262, and the functionally active variant of human FGF21 comprises or consists of the amino acid sequence of SEQ ID NO: 253.

[0091] In one embodiment, the GLP-1R agonistic peptide comprises or consists of the amino acid sequence of SEQ ID NO: 262, and the functionally active variant of human FGF21 comprises or consists of the amino acid sequence of SEQ ID NO: 254.

[0092] In one embodiment, the Fc domain of an immunoglobulin or a variant thereof comprises or consists of an amino acid sequence selected from the group consisting of SEQ ID NOs: 257, 258 and 259. In one embodiment, the Fc domain of an immunoglobulin or a variant thereof comprises or consists of the amino acid sequence of SEQ ID NO: 257. In one embodiment, the Fc domain of an immunoglobulin or a variant thereof comprises or consists of the amino acid sequence of SEQ ID NO: 258. In one embodiment, the Fc domain of an immunoglobulin or a variant thereof comprises or consists of the amino acid sequence of SEQ ID NO: 259.

[0093] In one embodiment, the GLP-1R agonistic peptide comprises or consists of the amino acid sequence of SEQ ID NO: 261, the functionally active variant of human FGF21 comprises or consists of the amino acid sequence of SEQ ID NO: 253, and the Fc domain of an immunoglobulin or a variant thereof comprises or consists of the amino acid sequence of SEQ ID NO: 257.

[0094] In one embodiment, the GLP-1R agonistic peptide comprises or consists of the amino acid sequence of SEQ ID NO: 261, the functionally active variant of human FGF21 comprises or consists of the amino acid sequence of SEQ ID NO: 254, and the Fc domain of an immunoglobulin or a variant thereof comprises or consists of the amino acid sequence of SEQ ID NO: 257.

[0095] In one embodiment, the GLP-1R agonistic peptide comprises or consists of the amino acid sequence of SEQ ID NO: 262, the functionally active variant of human FGF21 comprises or consists of the amino acid sequence of SEQ ID NO: 253, and the Fc domain of an immunoglobulin or a variant thereof comprises or consists of the amino acid sequence of SEQ ID NO: 257.

[0096] In one embodiment, the GLP-1R agonistic peptide comprises or consists of the amino acid sequence of SEQ ID NO: 262, the functionally active variant of human FGF21 comprises or consists of the amino acid sequence of SEQ ID NO: 254, and the Fc domain of an immunoglobulin or a variant thereof comprises or consists of the amino acid sequence of SEQ ID NO: 257.

[0097] In one embodiment, the GLP-1R agonistic peptide comprises or consists of the amino acid sequence of SEQ ID NO: 261, the functionally active variant of human FGF21 comprises or consists of the amino acid sequence of SEQ ID NO: 253, and the Fc domain of an immunoglobulin or a variant thereof comprises or consists of the amino acid sequence of SEQ ID NO: 258.

[0098] In one embodiment, the GLP-1R agonistic peptide comprises or consists of the amino acid sequence of SEQ ID NO: 261, the functionally active variant of human FGF21 comprises or consists of the amino acid sequence of SEQ ID NO: 254, and the Fc domain of an immunoglobulin or a variant thereof comprises or consists of the amino acid sequence of SEQ ID NO: 258.

[0099] In one embodiment, the GLP-1R agonistic peptide comprises or consists of the amino acid sequence of SEQ ID NO: 262, the functionally active variant of human FGF21 comprises or consists of the amino acid sequence of SEQ ID NO: 253, and the Fc domain of an immunoglobulin or a variant thereof comprises or consists of the amino acid sequence of SEQ ID NO: 258.

[0100] In one embodiment, the GLP-1R agonistic peptide comprises or consists of the amino acid sequence of SEQ ID NO: 262, the functionally active variant of human FGF21 comprises or consists of the amino acid sequence of SEQ ID NO: 254, and the Fc domain of an immunoglobulin or a variant thereof comprises or consists of the amino acid sequence of SEQ ID NO: 258.

[0101] In one embodiment, the GLP-1R agonistic peptide comprises or consists of the amino acid sequence of SEQ ID NO: 261, the functionally active variant of human FGF21 comprises or consists of the amino acid sequence of SEQ ID NO: 253, and the Fc domain of an immunoglobulin or a variant thereof comprises or consists of the amino acid sequence of SEQ ID NO: 259.

[0102] In one embodiment, the GLP-1R agonistic peptide comprises or consists of the amino acid sequence of SEQ ID NO: 261, the functionally active variant of human FGF21 comprises or consists of the amino acid sequence of SEQ ID NO: 254, and the Fc domain of an immunoglobulin or a variant thereof comprises or consists of the amino acid sequence of SEQ ID NO: 259.

[0103] In one embodiment, the GLP-1R agonistic peptide comprises or consists of the amino acid sequence of SEQ ID NO: 262, the functionally active variant of human FGF21 comprises or consists of the amino acid sequence of SEQ ID NO: 253, and the Fc domain of an immunoglobulin or a variant thereof comprises or consists of the amino acid sequence of SEQ ID NO: 259.

[0104] In one embodiment, the GLP-1R agonistic peptide comprises or consists of the amino acid sequence of SEQ ID NO: 262, the functionally active variant of human FGF21 comprises or consists of the amino acid sequence of SEQ ID NO: 254, and the Fc domain of an immunoglobulin or a variant thereof comprises or consists of the amino acid sequence of SEQ ID NO: 259.

[0105] In another aspect, the present invention relates to a fusion protein comprising a GLP-1R (glucagon-like peptide-1 receptor) agonistic peptide and a functionally active variant of human FGF21 (fibroblast growth factor 21),
[0106] wherein the GLP-1R agonistic peptide comprises or consists of an amino acid sequence selected from the group consisting of SEQ ID NOs: 261 to 565;
[0107] wherein the functionally active variant of human FGF21 comprises or consists of an amino acid sequence selected from the group consisting of SEQ ID NOs: 253, 254, 255 and 256; and
[0108] wherein the GLP-1R agonistic peptide and the functionally active variant of human FGF21 are linked via a linker molecule comprising a structure selected from the group consisting of L - Fc, Fc - L, L₁ - Fc - L₂ and Fc, wherein L, L₁ and L₂ are independently selected from the group consisting of single amino acids and peptides, and Fc is an Fc domain of an immunoglobulin or a variant thereof comprising or consisting of an amino acid sequence selected from the group consisting of SEQ ID NOs: 257, 258 and 259.

[0109] In yet another aspect, the present invention relates to a fusion protein comprising or consisting of an amino acid sequence selected from the group consisting of SEQ ID NOs: 1-8, 16-31, 33-229 and 566-4007 or a functionally active variant thereof which comprises or consists of an amino acid sequence being at least about 96% identical to the amino acid sequence selected from the group consisting of SEQ ID NOs: 1-8, 16-31, 33-229 and 566-4007.

[0110] In another aspect, the present invention relates to a fusion protein comprising or consisting of an amino acid sequence selected from the group consisting of SEQ ID NOs: 1-8, 18-31, 39, 40, 42-72, 74, 76, 78-84, 88-90, 92-97, 100-102, 105-109, 112, 113, 115, 116, 118, 120-124, 126-130, 132-136, 139, 142-148, 150-153, 155-158, 161-172, 174-177, 180-188, 190, 192-209, 211, 212, 216, 217 and 219-229, or a functionally active variant thereof which comprises or consists of an amino acid sequence being at least about 96% identical to the amino acid sequence selected from the group consisting of SEQ ID NOs: 1-8, 18-31, 39, 40, 42-72, 74, 76, 78-84, 88-90, 92-97, 100-102, 105-109, 112, 113, 115, 116, 118, 120-124, 126-130, 132-136, 139, 142-148, 150-153, 155-158, 161-172, 174-177, 180-188, 190, 192-209, 211, 212, 216, 217 and 219-229.

[0111] In another aspect, the present invention relates to a fusion protein comprising or consisting of an amino acid sequence selected from the group consisting of SEQ ID NOs: 2, 7 and 8, or a functionally active variant thereof which comprises or consists of an amino acid sequence being at least about 96% identical to the amino acid sequence selected from the group consisting of SEQ ID NOs: 2, 7 and 8.

[0112] In one embodiment, the fusion protein (or functionally active variant thereof) as defined above activates human GLP-1R with an EC50 of about 15 pmol/L to about 400 pmol/L, or about 20 pmol/L to about 400 pmol/L, or about 50 pmol/L to about 400 pmol/L, or about 100 pmol/L to about 400 pmol/L, as determined, e.g., by measuring the cAMP response of cells stably expressing human GLP-1R. In one embodiment, activation of human GLP-1R is determined essentially as described in Example 4.

[0113] In one embodiment, the fusion protein (or functionally active variant thereof) as defined above induces (i) autophosphorylation of human FGF receptor 1c (FGFR1c) with an EC50 of about 250 nmol/L or lower, or about 200 nmol/L or lower, or about 150 nmol/L or lower, or about 100 nmol/L or lower, or about 75 nmol/L or lower, or about 50 nmol/L or lower (e.g., with an EC50 of about 10 nmol/L to about 50 nmol/L, or about 15 nmol/L to about 50 nmol/L, or about 15 nmol/L to about 45 nmol/L); and/or (ii) phosphorylation of Mitogen-Activated Protein Kinase (MAPK) ERK½ with an EC50 of about 100 nmol/L or lower, or about 75 nmol/L or lower, or about 50 nmol/L or lower, or about 25 nmol/L or lower, or about 20 nmol/L or lower, or about 15 nmol/L or lower (e.g., with an EC50 of about 2.5 nmol/L to about 15 nmol/L, or about 4 nmol/L to about 12 nmol/L). In one embodiment, auto-phosphorylation of human FGFR1c and/or phosphorylation of MAPK ERK½ is/are determined by using an In-Cell Western (ICW), e.g., essentially as described in Example 3.

[0114] In one embodiment, the fusion protein (or functionally active variant thereof) as defined above has a melting temperature and/or an aggregation temperature of at least about 45° C. or at least about 50° C. or at least about 55° C. or at least about 60° C. In one embodiment, a melting temperature and/or an aggregation temperature is/are determined essentially as described in Example 5.

[0115] In one embodiment, the fusion protein (or functionally active variant thereof) as defined above has a terminal plasma half-life in non-human primates of at least about 15 hours or at least about 20 hours. In one embodiment, the fusion protein (or functionally active variant thereof) as defined above has a terminal plasma half-life in mice of at least about 8 hours or at least about 10 hours or at least about 12 hours. In one embodiment, the terminal half-life is determined after a single subcutaneous administration of about 0.3 mg/kg of fusion protein in solution to a non-human primate, e.g., cynomolgus monkey, or to a mouse, e.g., a C57BI/6 mouse. In one embodiment, the terminal half-life is determined by a method essentially as described in Example 6.

[0116] In another aspect, the present invention relates to a nucleic acid molecule encoding a fusion protein as defined above.

[0117] In another aspect, the present invention relates to a host cell containing a nucleic acid molecule as defined above.

[0118] In another aspect, the present invention relates to a method of producing a fusion protein as defined above comprising cultivating a host cell as defined above and isolating the fusion protein.

[0119] In another aspect, the present invention relates to a pharmaceutical composition comprising a fusion protein as defined above, a nucleic acid molecule as defined above or a host cell as defined above.

[0120] In another aspect, the present invention relates to a kit comprising a fusion protein as defined above, a nucleic acid molecule as defined above, a host cell as defined above or a pharmaceutical composition as defined above.

[0121] In another aspect, the present invention relates to a fusion protein as defined above, a nucleic acid molecule as defined above, a host cell as defined above or a pharmaceutical composition as defined above for use as a medicament.

[0122] In another aspect, the present invention relates to a fusion protein as defined above, a nucleic acid molecule as defined above, a host cell as defined above or a pharmaceutical composition as defined above for use in the treatment of a disease or disorder selected from the group consisting of obesity, being overweight, metabolic syndrome, diabetes mellitus, diabetic retinopathy, hyperglycemia, dyslipidemiaNASH and atherosclerosis.

[0123] In one embodiment, the disease or disorder is diabetes mellitus. In one embodiment, the diabetes mellitus is type 1 diabetes mellitus or type 2 diabetes mellitus.

[0124] In another aspect, the present invention relates to the use of a fusion protein as defined above, a nucleic acid molecule as defined above, a host cell as defined above or a pharmaceutical composition as defined above in the manufacture of a medicament for the treatment of a disease or disorder selected from the group consisting of obesity, being overweight, metabolic syndrome, diabetes mellitus, diabetic retinopathy, hyperglycemia, dyslipidemia, NASH and atherosclerosis.

[0125] In one embodiment, the disease or disorder is diabetes mellitus. In one embodiment, the diabetes mellitus is type 1 diabetes mellitus or type 2 diabetes mellitus.

[0126] In another aspect, the present invention relates to a method of treating a disease or disorder selected from the group consisting of obesity, being overweight, metabolic syndrome, diabetes mellitus, diabetic retinopathy, hyperglycemia, dyslipidemia, NASH and atherosclerosis, the method comprising administering a fusion protein as defined above, a nucleic acid molecule as defined above, a host cell as defined above or a pharmaceutical composition as defined above to a subject in need thereof.

[0127] In one embodiment, the disease or disorder is diabetes mellitus. In one embodiment, the diabetes mellitus is type 1 diabetes mellitus or type 2 diabetes mellitus.

[0128] In another aspect, the present invention relates to a fusion protein as defined above, a nucleic acid molecule as defined above, a host cell as defined above or a pharmaceutical composition as defined above for improving glycemic control in overweight to obese dyslipidemic patients with type 2 diabetes mellitus.

### DESCRIPTION OF THE FIGURES

[0129] FIG. 1 is a graph showing EC50 of the adverse effect (gastric emptying (GE) rate) and pharmacodynamics (i.e., HbA1c, Triglycerides, Fatty Acids, Non-HDL, Adipose Mass) depending on the GLP-1 attenuation factor (12-months simulation):
[0130] For GLP-1 attenuation factors greater than 9.449 (can be rounded to 9), EC50 of GLP-1-mediated gastrointestinal adverse effect (gastric emptying; GE-Rate) was greater than EC50 of pharmacodynamic effects (i.e., HbA1c, Adipose Mass, Non-HDL, Fatty Acids, Triglycerides);
[0131] Maximal distance between maximum of pharmacodynamics (HbA1c) and adverse effect (GE-Rate) normalized by spreading of FGF21- (lipids) and GLP-1-mediated effects (HbA1c) was 121.189; i.e. at 121.189 (can be rounded to 121), there is a maximal distance between maximum of pharmacodynamics effects (HbA1c) and adverse effect (GE-Rate) at a minimum distance between GLP-1-mediated effects (HbA1c) and mean FGF21-mediated effects (i.e., Adipose Mass, Non-HDL, Fatty Acids, Triglycerides) (see FIG. 2);
[0132] Maximal distance between maximum of pharmacodynamics (HbA1c) and adverse effect (GE-Rate) was 319.311 (can be rounded to 319);
[0133] Maximal distance between mean pharmacodynamics (i.e., HbA1c, Adipose Mass, Non-HDL, Fatty Acids, Triglycerides) and adverse effect (GE-Rate) was 482.396 (see FIG. 2; can be rounded to 482);
[0134] Maximum of gastric emptying rate at 531.0;
(all: vertical lines).

[0135] FIG. 2 is a graph showing EC50 of gastric emptying (GE) rate and mean pharmacodynamic effects (i.e., HbA1c, Triglycerides, Fatty Acids, Non-HDL, Adipose Mass) depending on GLP-1 attenuation factor (12-months simulation):
[0136] Maximal distance between mean pharmacodynamics (i.e., HbA1c, Adipose Mass, Non-HDL, Fatty Acids, Triglycerides) and adverse effect (GE-Rate) was 482.396 (right vertical line; can be rounded to 482);
[0137] Maximal distance between maximum of pharmacodynamics (HbA1c) and adverse effect (GE-Rate) normalized by spreading of FGF21- (lipids) and GLP-1-mediated effects (HbA1c) was 121.189 (left vertical line; can be rounded to 121). The curve “(Max-GE Rate)/Range” represents the ratio between the maximum distance between HbA1c and GE-Rate and the minimum distance between HbA1c and mean FGF21-mediated effects (i.e., Adipose Mass, Non-HDL, Fatty Acids, Triglycerides). At the minimum of the “(Max-GE Rate)/Range” curve (i.e. at 121.189), there is a maximal distance between maximum of pharmacodynamics effects (HbA1c) and adverse effect (GE-Rate) at a minimum distance between GLP-1-mediated effects (HbA1c) and FGF21-mediated effects (i.e., Adipose Mass, Non-HDL, Fatty Acids, Triglycerides).

[0138] FIG. 3 is a graph showing EC50 of the adverse effect (gastric emptying (GE) rate) and pharmacodynamics (HbA1c, Triglycerides, Fatty Acids, Non-HDL, Adipose Mass) depending on GLP-1 attenuation factor (3-months simulation):
[0139] For GLP-1 attenuation factors greater than 18.268 (can be rounded to 18), EC50 of GLP-1-mediated gastrointestinal adverse effect (gastric emptying; GE-Rate) was greater than EC50 of pharmacodynamic effects (i.e., HbA1c, Adipose Mass, Non-HDL, Fatty Acids, Triglycerides);
[0140] Maximal distance between maximum of pharmacodynamics (HbA1c) and adverse effect (GE-Rate) normalized by spreading of FGF21- (lipids) and GLP-1-mediated effects (HbA1c) was 123.466; i.e. at 123.466 (can be rounded to 123), there is a maximal distance between maximum of pharmacodynamics effects (HbA1c) and adverse effect (GE-Rate) at a minimum distance between GLP-1-mediated effects (HbA1c) and mean FGF21-mediated effects (i.e., Adipose Mass, Non-HDL, Fatty Acids, Triglycerides) (see FIG. 4);
[0141] Maximal distance between maximum of pharmacodynamics (HbA1c) and adverse effect (GE-Rate) was 313.214 (can be rounded to 313);
[0142] Maximal distance between mean pharmacodynamics (i.e., HbA1c, Adipose Mass, Non-HDL, Fatty Acids, Triglycerides) and adverse effect (GE-Rate) was 468.679 (see FIG. 4; can be rounded to 469);
[0143] Maximum of gastric emptying rate at 500.686 (can be rounded to 501)
(all: vertical lines).

[0144] FIG. 4 is a graph showing EC50 of gastric emptying (GE) rate and mean pharmacodynamic effects (i.e., HbA1c, Triglycerides, Fatty Acids, Non-HDL, Adipose Mass) depending on GLP-1 attenuation factor (3-months simulation):
[0145] Maximal distance between mean pharmacodynamics (i.e. HbA1c, Adipose Mass, Non-HDL, Fatty Acids, Triglycerides) and adverse effect (GE-Rate) was 468.679 (right vertical line; can be rounded to 469);
[0146] Maximal distance between maximum of pharmacodynamics (HbA1c) and adverse effect (GE-Rate) normalized by spreading of FGF21- (lipids) and GLP-1-mediated effects (HbA1c) was 123.466 (left vertical line; can be rounded to 123). The curve “(Max-GE Rate)/Range” represents the ratio between the maximum distance between HbA1c and GE-Rate and the minimum distance between HbA1c and mean FGF21-mediated effects (i.e., Adipose Mass, Non-HDL, Fatty Acids, Triglycerides). At the minimum of the “(Max-GE Rate)/Range” curve (i.e. at 123.466), there is a maximal distance between maximum of pharmacodynamics effects (HbA1c) and adverse effect (GE-Rate) at a minimum distance between GLP-1-mediated effects (HbA1c) and FGF21-mediated effects (i.e., Adipose Mass, Non-HDL, Fatty Acids, Triglycerides).

[0147] FIG. 5 (A and B) are graphs showing the results of an in vitro cellular assay (In-Cell Western, ICW) for human FGF21 receptor efficacy in CHO cells. pFGFR is depicted in (A), and pERK is depicted in (B).

[0148] FIG. 6 (A to D) are graphs showing the results of an in vitro cellular assay for human Glucagon-Like-Peptide 1 (GLP-1) receptor efficacy in HEK-293 cells for different GLP-1R agonists. SEQ ID NO: 2 is depicted in (A), SEQ ID NO: 7 is depicted in (B), SEQ ID NO: 8 is depicted in (C), and SEQ ID NOs: 2, 7, and 8 are depicted in (D).

[0149] FIG. 7 (A to F) are graphs showing plasma concentrations of GLP-1R agonist / FGF21 Fc fusion proteins after single subcutaneous administration of a 0.3 mg/kg solution to female C57BI/6 mice or male cynomolgus monkeys using three different bioanalytical methods. (A) depicts SEQ ID NO: 2 in mouse, (B) depicts SEQ ID NO: 2 in monkey, (C) depicts SEQ ID NO: 7 in mouse, (D) depicts SEQ ID NO: 7 in monkey, (E) depicts SEQ ID NO: 8 in mouse, and (F) depicts SEQ ID NO: 8 in monkey.

[0150] FIG. 8 is a graph showing plasma concentrations of GLP-1R agonist/ FGF21 Fc fusion proteins and G-FGF21 (SEQ ID NO: 252) after single subcutaneous administration of a 0.3 mg/kg solution to female C57BI/6 mice using a bioanalytical method for quantification of the intact full-length fusions proteins.

[0151] FIG. 9 is a graph showing the development of body weight in female Diet-Induced Obesity (DIO) mice with once weekly dosing of GLP-1RA/FGF21 Fc fusion proteins and controls for 28 days.

[0152] FIG. 10 is a graph showing the development of cumulative food intake in female DIO mice with once weekly dosing of GLP-1RA/FGF21 Fc fusion proteins and controls for 28 days.

[0153] FIG. 11 (A and B) are graphs showing the 24 hour blood glucose profile of db/db mice following the first treatment with GLP-1RA/FGF21 Fc fusion proteins and controls starting on day 1 (A) or following the fourth treatment starting on day 22 (B). Data are means ± SEM; n=8/group.

[0154] FIG. 12 is a graph showing the plasma HbA1c content in female db/db mice with a once weekly dosing of GLP-1RA/FGF21 Fc fusion proteins and controls for 36 days.

[0155] FIG. 13 (A and B) are graphs showing the development of liver weight and lipid contents in DIO NASH mice after once weekly dosing of a GLP-1RA/FGF21 Fc fusion protein and controls for 8 weeks. (A) depicts liver weight and lipid levels, (B) depicts liver cholesterol and liver triglyceride levels.

[0156] FIG. 14 depicts graphs showing the development of the development of fibrosis and Non-Alcoholic Fatty Liver Disease (NAFLD) activity score in DIO NASH mice after once weekly dosing of a GLP-1RA/FGF21 Fc fusion protein and controls for 8 weeks.

[0157] FIG. 15 depicts graphs showing the number of animals with higher, the same or lower fibrosis and NAFLD activity score in DIO NASH mice after once weekly dosing of a GLP-1RA/FGF21 Fc fusion protein and controls for 8 weeks.

### DETAILED DESCRIPTION OF THE INVENTION

[0158] Although the present invention is described in detail below, it is to be understood that this invention is not limited to the particular methodologies, protocols and reagents described herein as these may vary. It is also to be understood that the terminology used herein is for the purpose of describing particular embodiments only, and is not intended to limit the scope of the present invention which will be limited only by the appended claims. Unless defined otherwise, all technical and scientific terms used herein have the same meanings as commonly understood by one of ordinary skill in the art.

[0159] In the following, certain elements of the present invention will be described. These elements may be listed with specific embodiments, however, it should be understood that they may be combined in any manner and in any number to create additional embodiments. The variously described examples and exemplary embodiments should not be construed to limit the present invention to only the explicitly described embodiments. This description should be understood to support and encompass embodiments which combine the explicitly described embodiments with any number of the disclosed and/or exemplary elements. Furthermore, any permutations and combinations of all described elements in this application should be considered disclosed by the description of the present application unless the context indicates otherwise.

[0160] The terms used herein are defined as described in “A multilingual glossary of biotechnological terms: (IUPAC Recommendations)”, H.G.W. Leuenberger, B. Nagel, and H. Kölbl, Eds., Helvetica Chimica Acta, CH-4010 Basel, Switzerland, (1995).

[0161] The practice of the present invention will employ, unless otherwise indicated, conventional methods of chemistry, biochemistry, cell biology, immunology, and recombinant DNA techniques which are explained in the literature in the field (Sambrook, J. et al. (2001) Molecular Cloning: A Laboratory Manual, 3rd Ed., Cold Spring Harbor Laboratory Press, Cold Spring Harbor, NY). Throughout this specification and the claims which follow, unless the context requires otherwise, the word “comprise”, and variations such as “comprises” and “comprising”, will be understood to imply the inclusion of a stated member, integer or step or group of members, integers or steps but not the exclusion of any other member, integer or step or group of members, integers or steps although in some embodiments such other member, integer or step or group of members, integers or steps may be excluded, i.e. the subject-matter consists in the inclusion of a stated member, integer or step or group of members, integers or steps. The terms “a” and “an” and “the” and similar reference used in the context of describing the invention (especially in the context of the claims) are to be construed to cover both the singular and the plural, unless otherwise indicated herein or clearly contradicted by context. Recitation of ranges of values herein is merely intended to serve as a shorthand method of referring individually to each separate value falling within the range. Unless otherwise indicated herein, each individual value is incorporated into the specification as if it were individually recited herein. All methods described herein can be performed in any suitable order unless otherwise indicated herein or otherwise clearly contradicted by context. The use of any and all examples, or exemplary language (e.g., “such as”), provided herein is intended merely to better illustrate the invention and does not pose a limitation on the scope of the invention otherwise claimed. No language in the specification should be construed as indicating any non-claimed element essential to the practice of the invention.

[0162] Several documents are cited throughout the text of this specification. Each of the documents cited herein (including all patents, patent applications, scientific publications, manufacturer’s specifications, instructions, etc.), whether supra or infra, are hereby incorporated by reference in their entirety. Nothing herein is to be construed as an admission that the invention is not entitled to antedate such disclosure by virtue of prior invention.

[0163] The term “fusion protein” generally refers to a protein created by joining, in particular covalently linking, two or more distinct proteins (e.g., proteins and/or peptides) resulting in a single molecule with functional properties derived from each of the original proteins. Generally, the fusion proteins of the present invention exhibit GLP-1R agonistic activity and FGF21 activity. Fusion proteins may be generated by genetic fusion (e.g., by recombinant DNA technology) or by chemical and/or enzymatic conjugation. In a fusion protein according to the present invention, the components of the fusion protein may be arranged in the order (from N-terminus to C-terminus) A - B - C or C -B - A, wherein A is a GLP-1R agonistic peptide, B is a linker molecule, and C is a functionally active variant of human FGF21.

[0164] The term “GLP-1R agonistic peptide”, as used herein, refers to a peptide, which binds to and activates the GLP-1 receptor, such as GLP-1 (as the primary GLP-1R agonist). The GLP-1R agonistic peptides may also be simply referred to as “GLP-1R agonists” herein.

[0165] The term “peptide” generally refers to a polymeric form of amino acids of any length, for example, comprising about two or more, or about 3 or more, or about 4 or more, or about 6 or more, or about 8 or more, or about 9 or more, or about 10 or more, or about 13 or more, or about 16 or more, or about 21 or more amino acids joined covalently by peptide bonds. A peptide may, for example, consist of up to about 100 amino acids. The term “polypeptide” refers to large peptides. In one embodiment, the term “polypeptide” refers to peptides with more than about 100 amino acid residues. The terms “polypeptide” and “protein” are used interchangeably herein.

[0166] In one embodiment, a GLP-1R agonistic peptide is a variant of native GLP-1(7-36). The term “native GLP-1(7-36)”, as used herein, refers to a peptide having the amino acid sequence of SEQ ID NO: 260, which, optionally, comprises an amide group at its C-terminus.

[0167] Generally, a variant of native GLP-1(7-36) may be based on the deletion, addition and/or substitution of at least one amino acid residue in/to the amino acid sequence of native GLP-1(7-36).

[0168] In one embodiment, a variant comprises up to about 15, about 14, about 13, about 12, about 11, about 10, about 9, about 8, about 7, about 6 or about 5 substitutions of amino acid residues in the amino acid sequence of native GLP-1(7-36) (SEQ ID NO: 260).

[0169] The term “amino acid” or “amino acid residue”, as used herein, refers to a naturally occurring amino acid, an unnatural amino acid, an amino acid analogue and an amino acid mimetic that functions in a manner similar to a naturally occurring amino acid in its D and/or L stereoisomer if its structure allows such stereoisomeric forms. Amino acids are referred to herein by either their name, their art-known three letter symbols or by the one-letter symbols recommended by the IUPAC-IUB Biochemical Nomenclature Commission.

[0170] When used in connection with amino acids, the term “naturally occurring” refers to the 20 conventional amino acids (i.e., alanine (Ala or A), cysteine (Cys or C), aspartic acid (Asp or D), glutamic acid (Glu or E), phenylalanine (Phe or F), glycine (Gly or G), histidine (His or H), isoleucine (lle or l), lysine (Lys or K), leucine (Leu or L), methionine (Met or M), asparagine (Asn or N), proline (Pro or P), glutamine (Gln or Q), arginine (Arg or R), serine (Ser or S), threonine (Thr or T), valine (Val or V), tryptophan (Trp or W), and tyrosine (Tyr or Y)), as well as selenocysteine, pyrrolysine (PYL), and pyrroline-carboxylysine (PCL).

[0171] The term “unnatural amino acid”, as used herein, is meant to refer to an amino acid that is not naturally encoded or found in the genetic code of any organism. It may, for example, be a purely synthetic compound. Examples of unnatural amino acids include, but are not limited to, hydroxyproline, gamma-carboxyglutamate, O-phosphoserine, azetidinecarboxylic acid, 2-aminoadipic acid, 3-aminoadipic acid, beta-alanine, aminopropionic acid, 2-aminobutyric acid, 4-aminobutyric acid, 6-aminocaproic acid, 2-aminoheptanoic acid, 2-aminoisobutyric acid, 3-aminoisobutyric acid, 2-aminopimelic acid, tertiary-butylglycine, 2,4-diaminoisobutyric acid, desmosine, 2,2′-diaminopimelic acid, 2,3-diaminoproprionic acid, N-ethylglycine, N-methylglycine, N-ethylasparagine, homoproline, hydroxylysine, allo-hydroxylysine, 3-hydroxyproline, 4-hydroxyproline, isodesmosine, allo-isoleucine, N-methylalanine, N-methylglycine, N-methylisoleucine, N-methylpentylglycine, N-methylvaline, naphthalanine, norvaline, norleucine, ornithine, D-ornithine, D-arginine, p-aminophenylalanine, pentylglycine, pipecolic acid and thioproline.

[0172] The term “amino acid analogue”, as used herein, refers to a compound that has the same basic chemical structure as a naturally occurring amino acid. Amino acid analogues include the natural and unnatural amino acids which are chemically blocked, reversibly or irreversibly, or chemically modified, e.g., at one or any combination of their C-terminal carboxy group, their N-terminal amino group and/or their side-chain functional groups. Such analogues include, but are not limited to, methionine sulfoxide, methionine sulfone, S-(carboxymethyl)-cysteine, S-(carboxymethyl)-cysteine sulfoxide, S-(carboxymethyl)-cysteine sulfone, aspartic acid-(betamethylester), N-ethylglycine, alanine carboxamide, homoserine, norleucine and methionine methyl sulfonium.

[0173] The term “amino acid mimetic”, as used herein, refers to a chemical compound that has a structure that is different from the general chemical structure of an amino acid, but functions in a manner similar to a naturally occurring amino acid.

[0174] In some embodiments, the variant comprises at least one additional amino acid residue at its N-terminus. In one embodiment, the at least one additional amino acid residue is a single amino acid residue. In one embodiment, the at least one additional amino acid residue is selected from: naturally occurring amino acids except proline; unnatural amino acids; amino acid analogues; and amino acid mimetics. In one embodiment, the at least one additional amino acid residue is selected from the group consisting of G, A, N and C. In one embodiment, the at least one additional amino acid residue is G or A. In one embodiment, the at least one additional amino acid residue is G.

[0175] In some embodiments, the variant comprises a peptide extension at its C-terminus. The peptide extension may, for example, consist of up to about 12, about 11, about 10 or about 9 amino acid residues (e.g., about 7, about 8 or about 9 amino acid residues). In one embodiment, the peptide extension consists of an amino acid sequence selected from the group consisting of SEQ ID NOs: 4008 to 4063. In one embodiment, the peptide extension is a single amino acid residue, e.g., P.

[0176] In one embodiment, the GLP-1R agonistic peptide component of the fusion proteins of the invention exhibits a GLP-1R agonistic activity which is reduced as compared to that of native GLP-1(7-36) as defined herein. The expression “GLP-1R agonistic peptide as part of the fusion protein” means that said reduced GLP-1R agonistic activity is exhibited when the GLP-1R agonistic peptide is a component of the fusion protein and not necessarily in its isolated form (i.e., when not being a component of the fusion protein).

[0177] In one embodiment, the term “GLP-1R agonistic activity” (or “GLP-1R agonistic potency”), as used herein, refers to the activation of the GLP-1 receptor. In one embodiment, the term refers to the agonistic activity/potency in vitro. In another embodiment, the term refers to the agonistic activity/potency in vivo. In one embodiment, activation of the GLP-1 receptor is determined by measuring the cAMP response of cells stably expressing GLP-1 receptor upon contact with the agonist in vitro. In one embodiment, the cells are from a HEK-293 cell line. In one embodiment, the GLP-1 receptor is human GLP-1 receptor. In one embodiment, activation of the GLP-1 receptor is determined essentially as described in Example 4. In one embodiment, the activity/potency is quantified by determining the EC50 value.

[0178] The term “fibroblast growth factor 21” or “FGF21”, as used herein, refers to any FGF21 protein known in the art and particularly refers to human FGF21. In one embodiment, human FGF21 has the amino acid sequence of SEQ ID NO: 250 (full-length human wild-type FGF21). Mature human wild-type FGF21, i.e., a human wild-type FGF21 lacking amino acids 1 to 28 (M1 to A28) of SEQ ID NO: 250 (i.e., the signal sequence/peptide), is represented by SEQ ID NO: 251. Mature human wild-type FGF21 with an additional N-terminal Gly is represented by SEQ ID NO: 252 and is referred to herein as G-FGF21.

[0179] In one embodiment, a functionally active variant of human FGF21 comprises an amino acid sequence being at least about 96% or at least about 97% or at least about 98% identical to the amino acid sequence of SEQ ID NO: 250 or SEQ ID NO: 251 and comprises
[0180] (i) substitutions Q55C and P147C or substitutions Q55C and N149C, and
[0181] (ii) a substitution or deletion of G198 and/or P199,
wherein numbering of the amino acid residues is in accordance with SEQ ID NO: 250.

[0182] Q55C in SEQ ID NO: 250 corresponds to Q27C in SEQ IN NO: 251; P147C in SEQ ID NO: 250 corresponds to P119C in SEQ ID NO: 251; N149C in SEQ ID NO: 250 corresponds to N121C in SEQ ID NO: 251; G198 in SEQ ID NO: 250 corresponds to G170 in SEQ ID NO: 251; and P199 in SEQ ID NO: 250 corresponds to P171 in SEQ ID NO: 251.

[0183] “Sequence identity” between two amino acid sequences indicates the percentage of amino acids that are identical between the sequences. The optimal alignment of the sequences for comparison may be produced, besides manually, by means of the local homology algorithm of Smith and Waterman, 1981, Ads App. Math. 2, 482, by means of the local homology algorithm of Neddleman and Wunsch, 1970, J. Mol. Biol. 48, 443, by means of the similarity search method of Pearson and Lipman, 1988, Proc. Natl Acad. Sci. USA 85, 2444, or by means of computer programs which use these algorithms (GAP, BESTFIT, FASTA, BLAST P, BLAST N and TFASTA in Wisconsin Genetics Software Package, Genetics Computer Group, 575 Science Drive, Madison, Wis.).

[0184] The term “functionally active variant” when used in connection with FGF21 (e.g., human FGF21) refers to a protein having FGF21 activity.

[0185] In one embodiment, the term “FGF21 activity” (or “FGF21 potency”), as used herein, refers to activation of the FGF21 receptor (FGFR, e.g., FGFR1c). In one embodiment, the FGF21 receptor is a human FGF21 receptor. In one embodiment, the term refers to the activity/potency in vitro. In another embodiment, the term refers to the activity/potency in vivo. In one embodiment, activation of the FGF21 receptor is determined by measuring FGF21 receptor autophosphorylation and/or phosphorylation of MAPK ERK1/2 upon contact with the FGF21 compound in vitro. In one embodiment, autophosphorylation of human FGFR1c and/or phosphorylation of MAPK ERK 1/2 is/are determined by using an In-Cell Western (ICW), e.g., essentially as described in Example 3. In one embodiment, the activity and/or potency is quantified by determining the EC50 value.

[0186] The term “In-Cell Western (ICW) assay”, as used herein, refers to an immunocytochemical assay, more particularly a quantitative immunofluorescence assay, usually performed in microplates (e.g., in a 96- or 384-well format). It combines the specificity of Western blotting with the reproducibility and throughput of ELISA (see, for example, Aguilar H.N. et al. (2010) PLoS ONE 5(4): e9965). Appropriate ICW assay systems are commercially available (e.g., from LI-COR Biosciences, USA). In one embodiment, an anti-pFGFR and/or and anti-pERK is/are used in the ICW assay.

[0187] In one embodiment, the functionally active variant of human FGF21 exhibits FGF21 activity which is the same or substantially the same as the FGF21 activity of wild-type human FGF21 (e.g., of SEQ ID NO: 250 or 251 or 252), wherein the FGF21 activity refers to the FGF21 activity of the isolated functionally active variant of human FGF21, i.e., when it is not comprised in the fusion protein of the invention or modified in any other way.

[0188] The term “substantially the same”, when used in connection with FGF21 (e.g., human FGF21), refers to an FGF21 activity which is in the range of 50 to 150% or 60 to 140% or 65 to 135% of the FGF21 activity of FGF21 (e.g., wild-type human FGF21 (e.g., of SEQ ID NO: 250 or 251 or 252)).

[0189] Optionally, the functionally active variant of human FGF21 further comprises the substitution(s) G141S and/or P174L, which are naturally occurring mutations in human FGF21, wherein numbering of the amino acid residues is in accordance with SEQ ID NO: 250. G141S in SEQ ID NO: 250 corresponds to G113S in SEQ IN NO: 251; P174L in SEQ ID NO: 250 corresponds to P146L in SEQ ID NO: 251.

[0190] Further suitable FGF21 variants for use in the present invention are described, e.g., in PCT/EP2016/079551, which is incorporated herein by reference.

[0191] In one embodiment, a GLP-1R agonistic peptide and a functionally active variant of human FGF21 are linked via a linker molecule comprising a structure selected from the group consisting of L -Fc, Fc - L, L₁ - Fc - L₂ and Fc, wherein L, L₁ and L₂ are independently selected from the group consisting of single amino acids and peptides, and Fc is an Fc domain of an immunoglobulin or a variant thereof.

[0192] In one embodiment, the Fc domain (also referred to as Fc region) is the Fc domain of immunoglobulin IgG1 or IgG4. In one embodiment, the variant of the Fc domain comprises up to about 6, about 5 or about 4 mutations as compared to the wild-type sequence of the Fc domain. In one embodiment, said mutations are selected from the group consisting of amino acid substitutions, amino acid additions and amino acid deletions, e.g., N- or C-terminal deletions. In one embodiment, the Fc domain or variant thereof can have greater than about 50%, about 60%, about 70%, about 80%, about 90%, about 93%, about 95%, about 96%, about 97%, about 98% or about 99% sequence identity or can have about 100% sequence identity to the wild-type sequence of the IgG1 Fc region, e.g., the human IgG1 Fc region. In one embodiment, the Fc domain or variant thereof can have greater than about 50%, about 60%, about 70%, about 80%, about 90%, about 93%, about 95%, about 96%, about 97%, about 98% or about 99% sequence identity or can have about 100% sequence identity to the wild-type sequence of the IgG4 Fc region, e.g., the human IgG4 Fc region. In one embodiment, the Fc domain of an immunoglobulin or a variant thereof comprises or consists of an amino acid sequence selected from the group consisting of SEQ ID NOs: 257, 258 and 259.

[0193] In one embodiment, the peptides in the linker molecule (also referred to herein as “peptide linkers”) have a length of about 2 to about 100 amino acid residues, or about 2 to about 90 amino acid residues, or about 2 to about 80 amino acid residues, or about 2 to about 70 amino acid residues, or about 2 to about 60 amino acid residues, or about 2 to about 50 amino acid residues, or about 2 to about 40 amino acid residues, or about 2 to about 30 amino acid residues, or about 2 to about 25 amino acid residues, or about 2 to about 20 amino acid residues. In one embodiment, the peptide linker comprises at least about 5 amino acid residues. In general, peptide linkers are designed to provide flexibility and protease resistance. In one embodiment, the peptide linker is a glycine-serine-rich linker, wherein, e.g., at least about 50%, at least about 60%, at least about 70%, at least about 80%, or at least about 85% of the amino acids are a glycine or serine residue, respectively. In another embodiment, the amino acids are selected from glycine and serine, i.e., the peptide linker is exclusively composed of glycine and serine (referred to as a glycine-serine linker). In one embodiment, the peptide linker further comprises an alanine residue at its C-terminus. Peptide linkers may further comprise one or more specific protease cleavage sites. In one embodiment, the peptide linker comprises or consists of an amino acid sequence selected from the group consisting of SEQ ID NOs: 231 to 245. L1 and L2 may be the same or different. In one embodiment, L1 and L2 are different. In one embodiment, L1 comprises or consists of the amino acid sequence of SEQ ID NO: 232, and L2 comprises or consists of the amino acid sequence of SEQ ID NO: 231, or vice versa.

[0194] The term “functionally active variant” when used in connection with a fusion protein of the invention refers to a fusion protein having GLP-1R agonistic activity and FGF21 activity in the ranges as defined herein.

[0195] In one embodiment, a functionally active variant comprises or consists of an amino acid sequence being at least about 96% or at least about 97% or at least about 98% or at least about 99% identical to the amino acid sequence of the fusion protein it is derived from.

[0196] In one embodiment, the deviation in amino acid sequence from the amino acid sequence of the fusion protein the functionally active variant is derived from is exclusively based on mutations (e.g., substitutions, deletions and/or additions of one or more amino acids) which occur in regions of the fusion protein that are not involved in its GLP-1R agonistic activity and/or FGF21 activity. In one embodiment, the mutations exclusively occur outside the amino acid sequence(s) of the GLP-1R agonistic peptide and/or the functionally active variant of human FGF21 comprised in the fusion protein. In one embodiment, the deviation of the functionally active variant in amino acid sequence from the amino acid sequence of the fusion protein it is derived from is exclusively based on conservative amino acid substitutions.

[0197] A conservative amino acid substitution involves substitution of an amino acid with another one of the same family of amino acids, i.e., amino acids which are related in their side chains (e.g., in terms of the electrical charge and/or size). Naturally occurring amino acids are generally divided into four families: acidic (aspartate, glutamate); basic (lysine, arginine, histidine); non-polar (alanine, valine, leucine, isoleucine, proline, phenylalanine, methionine, tryptophan); and uncharged polar (glycine, asparagine, glutamine, cysteine, serine, threonine, tyrosine) amino acids. Phenylalanine, tryptophan, and tyrosine are sometimes classified jointly as aromatic amino acids.

[0198] A “nucleic acid molecule” is according to the invention deoxyribonucleic acid (DNA) or ribonucleic acid (RNA). A nucleic acid molecule according to the invention may be in the form of a molecule which is single-stranded or double-stranded. A nucleic acid molecule according to the invention may be linear or covalently closed to form a circle.

[0199] The term “DNA” refers to a molecule which comprises deoxyribonucleotide residues and optionally is entirely or substantially composed of deoxyribonucleotide residues. “Deoxyribonucleotide” relates to a nucleotide which lacks a hydroxyl group at the 2′-position of a beta-D-ribofuranosyl group. The term “DNA” includes isolated DNA, such as partially or completely purified DNA, essentially pure DNA, synthetic DNA, and recombinantly generated DNA. The term “DNA” also includes modified DNA, which differs from naturally occurring DNA by the addition, deletion, substitution and/or alteration of one or more nucleotides. Such alterations can include the addition of non-nucleotide material, such as to the end(s) of a DNA or internally, for example at one or more nucleotides of the DNA. Nucleotides in DNA molecules can also comprise non-standard nucleotides, such as non-naturally occurring nucleotides or chemically synthesized nucleotides. Altered DNA molecules can be referred to as analogues or analogues of naturally-occurring DNA.

[0200] The term “RNA” refers to a molecule which comprises ribonucleotide residues and is optionally entirely or substantially composed of ribonucleotide residues. “Ribonucleotide” relates to a nucleotide with a hydroxyl group at the 2′-position of a beta-D-ribofuranosyl group. The term “RNA” includes isolated RNA, such as partially or completely purified RNA, essentially pure RNA, synthetic RNA, and recombinantly generated RNA. The term “RNA” also includes modified RNA, which differs from naturally occurring RNA by the addition, deletion, substitution and/or alteration of one or more nucleotides. Such alterations can include the addition of non-nucleotide material, such as to the end(s) of a RNA or internally, for example at one or more nucleotides of the RNA. Nucleotides in RNA molecules can also comprise non-standard nucleotides, such as non-naturally occurring nucleotides or chemically synthesized nucleotides or deoxynucleotides. Altered RNA molecules can be referred to as analogues or analogues of naturally-occurring RNA. According to the invention, “RNA” refers to single-stranded RNA or double stranded RNA. In one embodiment, the RNA is mRNA, e.g., In Vitro Transcribed RNA (IVT RNA) or synthetic RNA. The RNA may also be modified, e.g., with one or more modifications increasing the stability (e.g., the half-life) of the RNA. Such modifications are known to a person skilled in the art and include, for example, 5′-caps or 5′cap analogues.

[0201] When used in connection with nucleotides, the term “naturally occurring” refers to the bases adenine (A), cytosine (C), guanine (G), thymine (T), and uracil (U).

[0202] A nucleic acid molecule according to the present invention may be contained/comprised in a vector. The term “vector”, as used herein, includes all vectors known to the skilled person, including plasmid vectors, cosmid vectors, phage vectors (e.g., lambda phage vectors), viral vectors (e.g., adenoviral or baculoviral vectors), or artificial chromosome vectors (e.g., bacterial artificial chromosomes (BACs), yeast artificial chromosomes (YACs), or P1 artificial chromosomes (PACs)). Said vectors include expression as well as cloning vectors. Expression vectors include plasmids as well as viral vectors and generally contain a desired coding sequence and appropriate DNA sequences necessary for the expression of an operably-linked coding sequence in a particular host organism (e.g., a bacterium, yeast, plant, insect, or mammal) or in an in vitro expression system. Cloning vectors are generally used to engineer and amplify a certain desired DNA fragment and may lack functional sequences needed for expression of the desired DNA fragments.

[0203] Alternatively, a nucleic acid molecule according to the present invention may be integrated into a genome, e.g., the genome of a host cell. Means and methods to integrate a particular nucleic acid molecule into a genome are well-known to a person skilled in the art.

[0204] In certain exemplary embodiments, the term “cell” or “host cell” relates to an intact cell, i.e., a cell with an intact membrane that has not released its normal intracellular components such as enzymes, organelles, or genetic material. In certain exemplary embodiments, an intact cell is a viable cell, i.e., a living cell capable of carrying out its normal metabolic functions. In certain exemplary embodiments, a cell or a host cell is any cell which can be transfected or transformed with an exogenous nucleic acid. In certain exemplary embodiments, the cell, when transfected or transformed with an exogenous nucleic acid and transferred to a recipient, can express the nucleic acid in the recipient.

[0205] The term “cell” includes prokaryotic cells, such as bacterial cells, and eukaryotic cells, such as yeast cells, fungal cells or mammalian cells. Suitable bacterial cells include, but are not limited to, cells from gram-negative bacterial strains, such as strains of Escherichia coli, Proteus, and Pseudomonas, and gram-positive bacterial strains, such as strains of Bacillus, Streptomyces, Staphylococcus, and Lactococcus. Suitable fungal cells include, but are not limited to, cells from the species of Trichoderma, Neurospora, and Aspergillus. Suitable yeast cells include cells from the species of Saccharomyces (for example, Saccharomyces cerevisiae), Schizosaccharomyces (for example, Schizosaccharomyces pombe), Pichia (for example, Pichia pastoris and Pichia methanolica), and Hansenula. Suitable mammalian cells include, but are not limited to, for example CHO cells, BHK cells, HeLa cells, COS cells, HEK-293 and the like. In one embodiment, HEK-293 cells are used. However, amphibian cells, insect cells, plant cells, and any other cells used in the art for the expression of heterologous proteins can be used as well. In certain exemplary embodiments, mammalian cells (e.g., cells from humans, mice, hamsters, pigs, goats, or primates) are used for adoptive transfer. The cells may be derived from a large number of tissue types and include primary cells and cell lines, such as cells of the immune system (e.g., antigen-presenting cells such as dendritic cells and T cells, stem cells such as hematopoietic stem cells and mesenchymal stem cells) and other cell types.

[0206] An “antigen-presenting cell”, as used herein, is a cell that displays antigen in the context of major histocompatibility complex on its surface. T cells may recognize this complex using their T cell receptor (TCR). The “cell” or “host cell” may be isolated or part of a tissue or organism, in particular a “non-human organism”.

[0207] The term “non-human organism”, as used herein, is meant to include non-human primates or other animals, e.g. mammals, such as cows, horses, pigs, sheep, goats, dogs, cats, rabbits, and rodents (e.g., mice, rats, guinea pigs or hamsters).

[0208] A pharmaceutical composition in accordance with the present invention comprises one or more carriers and/or excipients, all of which are pharmaceutically acceptable. The term “pharmaceutically acceptable”, as used herein, refers to the non-toxicity of a material which, in certain exemplary embodiments, does not interact with the action of the active agent of the pharmaceutical composition.

[0209] The term “carrier”, as used herein, refers to an organic or inorganic component, of a natural or synthetic nature, in which the active component is combined in order to facilitate, enhance or enable application. According to the invention, the term “carrier” also includes one or more compatible solid or liquid fillers, diluents or encapsulating substances, which are suitable for administration to a subject.

[0210] Suitable carrier substances for parenteral administration include, but are not limited to, sterile water, Ringer’s solution, Lactated Ringer’s solution, physiological saline, bacteriostatic saline (e.g., saline containing 0.9% benzyl alcohol), phosphate-buffered saline (PBS), Hank’s solution, polyalkylene glycols, hydrogenated naphthalenes and, in particular, biocompatible lactide polymers, lactide/glycolide copolymers or polyoxyethylene/polyoxy-propylene copolymers.

[0211] The term “excipient”, as used herein, is intended to include all substances which may be present in a pharmaceutical composition and which are not active ingredients, such as salts, binders (e.g., lactose, dextrose, sucrose, trehalose, sorbitol, mannitol), fillers, lubricants, thickeners, surface active agents, preservatives, emulsifiers, buffer substances, flavoring agents, or colorants.

[0212] Salts that are not pharmaceutically acceptable may be used for preparing pharmaceutically acceptable salts, and are included in the invention. Pharmaceutically acceptable salts of this kind comprise in a non-limiting way those prepared from the following acids: hydrochloric, hydrobromic, sulfuric, nitric, phosphoric, maleic, acetic, salicylic, citric, formic, malonic, succinic, and the like. Pharmaceutically acceptable salts may also be prepared as alkali metal salts or alkaline earth metal salts, such as sodium salts, potassium salts or calcium salts. Salts may be added to adjust the ionic strength or tonicity of a pharmaceutical composition.

[0213] Suitable preservatives for use in a pharmaceutical composition include, but are not limited to, antioxidants, citric acid, sodium citrate, benzalkonium chloride, chlorobutanol, cysteine, methionine, parabens, thimerosal, phenol, cresol, and mixtures thereof.

[0214] Suitable buffer substances for use in a pharmaceutical composition include, but are not limited to, acetic acid in a salt, citric acid in a salt, boric acid in a salt, phosphoric acid in a salt, and tris(hydroxymethyl)aminomethane (Tris, THAM, trometamol).

[0215] In certain exemplary embodiments, a pharmaceutical composition in accordance with the present invention is sterile. Pharmaceutical compositions may be provided in a uniform dosage form and may be prepared in a manner known by those of skill in the art. A pharmaceutical composition may, e.g., be in the form of a solution or suspension.

[0216] A pharmaceutical composition may also be formulated as a stable lyophilized product that is reconstituted with an appropriate diluent which, optionally, comprises one or more excipients as defined above.

[0217] A pharmaceutical composition in accordance with the present invention may further comprise at least one other active pharmaceutical ingredient.

[0218] The term “active pharmaceutical ingredient” (API), us used herein, includes any pharmaceutically active chemical or biological compound and any pharmaceutically acceptable salt thereof and any mixture thereof, that provides some pharmacologic effect and is used for treating or preventing a condition, e.g., a disease or disorder as defined herein.

[0219] Exemplary pharmaceutically acceptable salts include, but are not limited to, salts made from one or more of the following acids: hydrochloric acid (e.g., chloride salts), sulfuric acid (e.g., sulfate salts), nitric acid (e.g., nitrate salts), phosphoric acid (e.g., phosphate salts), hydrobromic acid (e.g., hydrobromide salts), maleic acid (e.g., maleate salts), malic acid (e.g., malate salts), ascorbic acid, citric acid (e.g., citrate salts), tartaric acid (e.g., tartrate salts), pamoic acid (e.g., pamoate or embonate salts), lauric acid (e.g., laurate salts), stearic acid (e.g., stearate salts), palmitic acid (e.g., palmitate slats), oleic acid, myristic acid (e.g., myristate salts), lauryl acid, naphthalinesulfonic acid, linolenic acid (e.g., linoleate salts), and the like.

[0220] As used herein, the terms “active pharmaceutical ingredient”, “active agent”, “active ingredient”, “active substance”, “therapeutically active compound” and “drug” are meant to be synonyms, i.e., have identical meaning.

[0221] In accordance with the present invention, an active pharmaceutical ingredient is optionally selected from:
[0222] all drugs mentioned in the Rote Liste 2014, e.g., all antidiabetics mentioned in the Rote Liste 2014, chapter 12, all weight-reducing agents or appetite suppressants mentioned in the Rote Liste 2014, chapter 06, all lipid-lowering agents mentioned in the Rote Liste 2014, chapter 58, all antihypertensives mentioned in the Rote Liste 2014 chapter 17, all nephroprotectives mentioned in the Rote Liste, or all diuretics mentioned in the Rote Liste 2014, chapter 36;
[0223] insulin and insulin derivatives, for example: insulin glargine (e.g., Lantus®), higher than 100 U/mL concentrated insulin glargine, e.g., 270 - 330 U/mL of insulin glargine or 300 U/mL of insulin glargine (as disclosed in EP 2387989), insulin glulisine (e.g., Apidra®), insulin detemir (e.g., Levemir®), insulin lispro (e.g., Humalog®, Liprolog®), insulin degludec (e.g., DegludecPlus®, IdegLira (NN9068)), insulin aspart and aspart formulations (e.g., NovoLog®), basal insulin and analogues (e.g., LY2605541, LY2963016, NN1436), PEGylated insulin lispro (e.g., LY-275585), long-acting insulins (e.g., NN1436, Insumera (PE0139), AB-101, AB-102, Sensulin LLC), intermediate-acting insulins (e.g., Humulin®N, Novolin®N), fast-acting and short-acting insulins (e.g., Humulin®R, Novolin®R, Linjeta® (VIAject®), PH20 insulin, NN1218, HinsBet®), premixed insulins, SuliXen®, NN1045, insulin plus Symlin®, PE-0139, ACP-002 hydrogel insulin, and oral, inhalable, transdermal and buccal or sublingual insulins (e.g., Exubera®, Nasulin®, Afrezza®, insulin tregopil, TPM-02 insulin, Capsulin®, Oral-lyn®, Cobalamin® oral insulin, ORMD-0801, Oshadi oral insulin, NN1953, NN1954, NN1956, VlAtab®). Also suitable are those insulin derivatives which are bonded to albumin or another protein by a bifunctional linker;
[0224] glucagon-like-peptide 1 (GLP-1), GLP-1 analogues, and GLP-1 receptor agonists, for example: GLP-1(7-37), GLP-1(7-36)amide, lixisenatide (e.g., Lyxumia®), exenatide (e.g., exendin-4, rExendin-4, Byetta®, Bydureon®, exenatide NexP), exenatide-LAR, liraglutide (e.g., Victoza®), semaglutide, taspoglutide, albiglutide, dulaglutide, albugon, oxyntomodulin, geniproside, ACP-003, CJC-1131, CJC-1134-PC, GSK-2374697, PB-1023, TTP-054, langlenatide (HM-11260C), CM-3, GLP-1 Eligen, AB-201, ORMD-0901, NN9924, NN9926, NN9927, Nodexen, Viador-GLP-1, CVX-096, ZYOG-1, ZYD-1, ZP-3022, CAM-2036, DA-3091, DA-15864, ARI-2651, ARI-2255, exenatide-XTEN (VRS-859), exenatide-XTEN + Glucagon-XTEN (VRS-859 + AMX-808) and polymer-bound GLP-1 and GLP-1 analogues;
[0225] dual GLP-1/GIP agonists (e.g., RG-7697 (MAR-701), MAR-709, BHM081, BHM089, BHM098); dual GLP-1/glucagon receptor agonists (e.g., BHM-034, OAP-189 (PF-05212389, TKS-1225), TT-401/402, ZP2929, LAPS-HMOXM25, MOD-6030);
[0226] dual GLP-1/gastrin agonists (e.g., ZP-3022);
[0227] gastrointestinal peptides such as peptide YY 3-36 (PYY3-36) or analogues thereof and pancreatic polypeptide (PP) or analogues thereof;
[0228] glucagon receptor agonists or antagonists, glucose-dependent insulinotropic polypeptide (GIP) receptor agonists or antagonists, ghrelin antagonists or inverse agonists, xenin and analogues thereof;
[0229] dipeptidyl peptidase-IV (DPP-4) inhibitors, for example: alogliptin (e.g., Nesina®, Kazano®), linagliptin (e.g., Ondero®, Trajenta®, Tradjenta®, Trayenta®), saxagliptin (e.g., Onglyza®, Komboglyze XR®), sitagliptin (e.g., Januvia®, Xelevia®, Tesavel®, Janumet®, Velmetia®, Juvisync®, Janumet XR®), anagliptin, teneligliptin (e.g., Tenelia®), trelagliptin, vildagliptin (e.g., Galvus®, Galvumet®), gemigliptin, omarigliptin, evogliptin, dutogliptin, DA-1229, MK-3102, KM-223, KRP-104, PBL-1427, Pinoxacin hydrochloride, and Ari-2243;
[0230] sodium-dependent glucose transporter 2 (SGLT-2) inhibitors, for example: canagliflozin, dapagliflozin, remogliflozin, remogliflozin etabonate, sergliflozin, empagliflozin, ipragliflozin, tofogliflozin, luseogliflozin, ertugliflozin, EGT-0001442, LIK-066, SBM-TFC-039, and KGA-3235 (DSP-3235);
[0231] dual inhibitors of SGLT-2 and SGLT-1 (e.g., LX-4211, LIK066).
[0232] SGLT-1 inhibitors (e.g., LX-2761, KGA-3235) or SGLT-1 inhibitors in combination with anti-obesity drugs such as ileal bile acid transfer (IBAT) inhibitors (e.g., GSK-1614235 + GSK-2330672);
[0233] biguanides (e.g., metformin, buformin, phenformin);
[0234] thiazolidinediones (e.g., pioglitazone, rosiglitazone), glitazone analogues (e.g., lobeglitazone);
[0235] peroxisome proliferator-activated receptors (PPAR-)(alpha, gamma or alpha/gamma) agonists or modulators (e.g., saroglitazar (e.g., Lipaglyn®), GFT-505), or PPAR gamma partial agonists (e.g., Int-131);
[0236] sulfonylureas (e.g., tolbutamide, glibenclamide, glimepiride, Amaryl®, glipizide) and meglitinides (e.g., nateglinide, repaglinide, mitiglinide);
[0237] alpha-glucosidase inhibitors (e.g., acarbose, miglitol, voglibose);
[0238] amylin and amylin analogues (e.g., pramlintide, Symlin®);
[0239] G-protein coupled receptor 119 (GPR119) agonists (e.g., GSK-1292263, PSN-821, MBX-2982, APD-597, ARRY-981, ZYG-19, DS-8500, HM-47000, YH-Chem1);
[0240] GPR40 agonists (e.g., TUG-424, P-1736, P-11187, JTT-851, GW9508, CNX-011-67, AM-1638, AM-5262);
[0241] GPR120 agonists and GPR142 agonists;
[0242] systemic or low-absorbable TGR5 (GPBAR1 = G-protein-coupled bile acid receptor 1) agonists (e.g., INT-777, XL-475, SB756050);
[0243] diabetes immunotherapeutics, for example: oral C-C chemokine receptor type 2 (CCR-2) antagonists (e.g., CCX-140, JNJ-41443532 ), interleukin 1 beta (IL-1ß) antagonists (e.g., AC-201), or oral monoclonal antibodies (MoA) (e.g., methalozamide, VVP808, PAZ-320, P-1736, PF-05175157, PF-04937319);
[0244] anti-inflammatory agents for the treatment of the metabolic syndrome and diabetes, for example: nuclear factor kappa B inhibitors (e.g., Triolex®);
[0245] adenosine monophosphate-activated protein kinase (AMPK) stimulants, for example: Imeglimin (PXL-008), Debio-0930 (MT-63-78), R-118;
[0246] inhibitors of 11-beta-hydroxysteroid dehydrogenase 1 (11-beta-HSD-1) (e.g., LY2523199, BMS770767, RG-4929, BMS816336, AZD-8329, HSD-016, BI-135585);
[0247] activators of glucokinase (e.g., PF-04991532, TTP-399 (GK1-399), GKM-001 (ADV-1002401), ARRY-403 (AMG-151), TAK-329, TMG-123, ZYGK1);
[0248] inhibitors of diacylglycerol O-acyltransferase (DGAT) (e.g., pradigastat (LCQ-908)), inhibitors of protein tyrosine phosphatase 1 (e.g., trodusquemine), inhibitors of glucose-6-phosphatase, inhibitors of fructose-1,6-bisphosphatase, inhibitors of glycogen phosphorylase, inhibitors of phosphoenol pyruvate carboxykinase, inhibitors of glycogen synthase kinase, inhibitors of pyruvate dehydrogenase kinase;
[0249] modulators of glucose transporter-4, somatostatin receptor 3 agonists (e.g., MK-4256);
[0250] one or more lipid lowering agents are also suitable as combination partners, for example: 3-hydroxy-3-methylglutaryl-coenzym-A-reductase (HMG-CoA-reductase) inhibitors such as simvastatin (e.g., Zocor®, lnegy®, Simcor®), atorvastatin (e.g., Sortis®, Caduet®), rosuvastatin (e.g., Crestor®), pravastatin (e.g., Lipostat®, Selipran®), fluvastatin (e.g., Lescol®), pitavastatin (e.g., Livazo®, Livalo®), lovastatin (e.g., Mevacor®, Advicor®), mevastatin (e.g., Compactin®), rivastatin, cerivastatin (Lipobay®), fibrates such as bezafibrate (e.g., Cedur® retard), ciprofibrate (e.g., Hyperlipen®), fenofibrate (e.g., Antara®, Lipofen®, Lipanthyl®), gemfibrozil (e.g., Lopid®, Gevilon®), etofibrate, simfibrate, ronifibrate, clinofibrate, clofibride, nicotinic acid and derivatives thereof (e.g., niacin, including slow release formulations of niacin), nicotinic acid receptor 1 agonists (e.g., GSK-256073), PPAR-delta agonists, acetyl-CoA-acetyltransferase (ACAT) inhibitors (e.g., avasimibe), cholesterol absorption inhibitors (e.g., ezetimibe, Ezetrol®, Zetia®, Liptruzet®, Vytorin®, S-556971), bile acid-binding substances (e.g., cholestyramine, colesevelam), ileal bile acid transport (IBAT) inhibitors (e.g., GSK-2330672, LUM-002), microsomal triglyceride transfer protein (MTP) inhibitors (e.g., lomitapide (AEGR-733), SLx-4090, granotapide), modulators of proprotein convertase subtilisin/kexin type 9 (PCSK9) (e.g., alirocumab (REGN727/SAR236553), AMG-145, LGT-209, PF-04950615, MPSK3169A, LY3015014, ALD-306, ALN-PCS, BMS-962476, SPC5001, ISIS-394814, 1B20, LGT-210, 1D05, BMS-PCSK9Rx-2, SX-PCK9, RG7652), LDL receptor upregulators, for example liver selective thyroid hormone receptor beta agonists (e.g., eprotirome (KB-2115), MB07811, sobetirome (QRX-431), VIA-3196, ZYT1), HDL-raising compounds such as: cholesteryl ester transfer protein (CETP) inhibitors (e.g., anacetrapib (MK0859), dalcetrapib, evacetrapib, JTT-302, DRL-17822, TA-8995, R-1658, LY-2484595, DS-1442), or dual CETP/PCSK9 inhibitors (e.g., K-312), ATP-binding cassette (ABC1) regulators, lipid metabolism modulators (e.g., BMS-823778, TAP-301, DRL-21994, DRL-21995), phospholipase A2 (PLA2) inhibitors (e.g., darapladib, Tyrisa®, varespladib, rilapladib), ApoA-I enhancers (e.g., RVX-208, CER-001, MDCO-216, CSL-112), cholesterol synthesis inhibitors (e.g., ETC-1002), lipid metabolism modulators (e.g., BMS-823778, TAP-301, DRL-21994, DRL-21995) and omega-3 fatty acids and derivatives thereof (e.g., icosapent ethyl (AMR101), Epanova®, AKR-063, NKPL-66, PRC-4016, CAT-2003);
[0251] bromocriptine (e.g., Cycloset®, Parlodel®), phentermine and phentermine formulations or combinations (e.g., Adipex-P, Ionamin, Qsymia®), benzphetamine (e.g., Didrex®), diethylpropion (e.g., Tenuate®), phendimetrazin (e.g., Adipost®, Bontril®), bupropion and combinations (e.g., Zyban®, Wellbutrin XL®, Contrave®, Empatic®), sibutramine (e.g., Reductil®, Meridia®), topiramat (e.g., Topamax®), zonisamid (e.g., Zonegran®), tesofensine, opioid antagonists such as naltrexone (e.g., Naltrexin®, naltrexone + bupropion), cannabinoid receptor 1 (CB1) antagonists (e.g., TM-38837), melanin-concentrating hormone (MCH-1) antagonists (e.g., BMS-830216, ALB-127158(a)), MC4 receptor agonists and partial agonists (e.g., AZD-2820, RM-493), neuropeptide Y5 (NPY5) or NPY2 antagonists (e.g., velneperit, S-234462), NPY4 agonists (e.g., PP-1420), beta-3-adrenergic receptor agonists, leptin or leptin mimetics, agonists of the 5-hydroxytryptamine 2c (5HT2c) receptor (e.g., lorcaserin, Belviq®), pramlintide/metreleptin, lipase inhibitors such as cetilistat (e.g., Cametor®), orlistat (e.g., Xenical®, Calobalin®), angiogenesis inhibitors (e.g., ALS-L1023), betahistidin and histamine H3 antagonists (e.g., HPP-404), AgRP (agouti related protein) inhibitors (e.g., TTP-435), serotonin re-uptake inhibitors such as fluoxetine (e.g., Fluctine®), duloxetine (e.g., Cymbalta®), dual or triple monoamine uptake inhibitors (dopamine, norepinephrine and serotonin re-uptake) such as sertraline (e.g., Zoloft®), tesofensine, methionine aminopeptidase 2 (MetAP2) inhibitors (e.g., beloranib), and antisense oligonucleotides against production of fibroblast growth factor receptor 4 (FGFR4) (e.g., ISIS-FGFR4Rx) or prohibitin targeting peptide-1 (e.g., Adipotide®);
[0252] nitric oxide donors, AT1 antagonists or angiotensin II (AT2) receptor antagonists such as telmisartan (e.g., Kinzal®, Micardis®), candesartan (e.g., Atacand®, Blopress®), valsartan (e.g., Diovan®, Co-Diovan®), losartan (e.g., Cosaar®), eprosartan (e.g., Teveten®), irbesartan (e.g., Aprovel®, CoAprovel®), olmesartan (e.g., Votum®, Olmetec®), tasosartan, azilsartan (e.g., Edarbi®), dual angiotensin receptor blockers (dual ARBs), angiotensin converting enzyme (ACE) inhibitors, ACE-2 activators, renin inhibitors, prorenin inhibitors, endothelin converting enzyme (ECE) inhibitors, endothelin receptor (ET1/ETA) blockers, endothelin antagonists, diuretics, aldosterone antagonists, aldosterone synthase inhibitors, alpha-blockers, antagonists of the alpha-2 adrenergic receptor, beta-blockers, mixed alpha-/beta-blockers, calcium antagonists, calcium channel blockers (CCBs), nasal formulations of the calcium channel blocker diltiazem (e.g., CP-404), dual mineralocorticoid/CCBs, centrally acting antihypertensives, inhibitors of neutral endopeptidase, aminopeptidase-A inhibitors, vasopeptide inhibitors, dual vasopeptide inhibitors such as neprilysin-ACE inhibitors or neprilysin-ECE inhibitors, dual-acting AT receptor-neprilysin inhibitors, dual AT1/ETA antagonists, advanced glycation end-product (AGE) breakers, recombinant renalase, blood pressure vaccines such as anti-RAAS (renin-angiotensin-aldosteron-system) vaccines, AT1- or AT2-vaccines, drugs based on hypertension pharmacogenomics such as modulators of genetic polymorphisms with antihypertensive response, thrombocyte aggregation inhibitors, and others or combinations thereof are suitable.

[0253] As used herein, the term “kit of parts (in short: kit)” refers to an article of manufacture comprising one or more containers and, optionally, a data carrier. Said one or more containers may be filled with one or more of the above mentioned agents of the present invention, e.g., fusion proteins, pharmaceutical compositions and related agents, such as nucleic acid molecules and host cells. Additional containers may be included in the kit that contain, e.g., diluents, buffers and further reagents. Said data carrier may be a non-electronical data carrier, e.g., a graphical data carrier such as an information leaflet, an information sheet, a bar code or an access code, or an electronical data carrier such as a compact disk (CD), a digital versatile disk (DVD), a microchip or another semiconductor-based electronical data carrier. The access code may allow the access to a database, e.g., an internet database, a centralized, or a decentralized database. Said data carrier may comprise instructions for the use of the agents of the present invention, e.g., fusion proteins, pharmaceutical compositions and related agents, such as nucleic acid molecules and host cells, as described herein.

[0254] The agents and compositions described herein may be administered via any conventional route, e.g., orally, pulmonary, by inhalation or parenterally, including by injection or infusion. In one embodiment, parenteral administration is used, e.g., intravenously, intraarterially, subcutaneously, intradermally or intramuscularly. The agents and compositions described herein may also be administered through sustained release administration.

[0255] Pharmaceutical compositions suitable for parenteral administration usually comprise a sterile aqueous or non-aqueous preparation of the active compound, which is optionally isotonic to the blood of the recipient. Examples of compatible carriers/solvents/diluents are sterile water, Ringer’s solution, Lactated Ringer’s solution, physiological saline, bacteriostatic saline (e.g., saline containing 0.9% benzyl alcohol), Phosphate Buffered Saline (PBS) and Hank’s solution. In addition, usually sterile, fixed oils may be used as solution or suspension medium.

[0256] The agents and compositions described herein are usually administered in therapeutically effective amounts. A “therapeutically effective amount” refers to the amount, which achieves a desired therapeutic reaction or a desired therapeutic effect alone or together with further doses, optionally without causing unacceptable side-effects. In the case of treatment of a particular disease or of a particular condition, the desired reaction relates to inhibition of the course of the disease. This comprises slowing down the progress of the disease and, in particular, interrupting or reversing the progress of the disease. The desired reaction in a treatment of a disease or of a condition may also be delay of the onset or a prevention of the onset of said disease or said condition. An effective amount of an agent or composition described herein will depend on the condition to be treated, the severeness of the disease, the individual parameters of the subject, including age, physiological condition, size and weight, the duration of treatment, the type of an accompanying therapy (if present), the specific route of administration and similar factors. Accordingly, the doses administered of the agents described herein may depend on various of such parameters. In the case that a reaction in a subject is insufficient with an initial dose, higher doses (or effectively higher doses achieved by a different, more localized route of administration) may be used.

[0257] According to the invention, the term “disease or disorder” refers to any pathological or unhealthy state, in particular obesity, overweight, metabolic syndrome, diabetes mellitus, diabetic retinopathy, hyperglycemia, dyslipidemia, non-alcoholic steatohepatitis (NASH) and/or atherosclerosis.

[0258] The term “obesity” refers to a medical condition in which excess body fat has accumulated to the extent that it may have a negative effect on health. In terms of a human (adult) subject, obesity can be defined as a body mass index (BMI) greater than or equal to 30 kg/m² (BMI ≥ 30 kg/m²).

[0259] The term “overweight” refers to a medical condition in which the amount of body fat is higher than is optimally healthy. In terms of a human (adult) subject, obesity can be defined as a body mass index (BMI) greater than or equal to 25 kg/m² (e.g., 25 kg/m² ≤ BMI < 30 kg/m²).

[0260] The BMI is a simple index of weight-for-height that is commonly used to classify overweight and obesity in adults. It is defined as a person’s weight in kilograms divided by the square of his/her height in meters (kg/m²).

[0261] “Metabolic syndrome” can be defined as a clustering of at least three of the following medical conditions: abdominal (central) obesity (e.g., defined as waist circumference ≥ 94 cm for Europid men and ≥ 80 cm for Europid women, with ethnicity specific values for other groups), elevated blood pressure (e.g., 130/85 mmHg or higher), elevated fasting plasma glucose (e.g., at least 100 mg/dL), high serum triglycerides (e.g., at least 150 mg/dL), and low high-density lipoprotein (HDL) levels (e.g., less than 40 mg/dL for males and less than 50 mg/dL for females).

[0262] “Diabetes mellitus” (also simply referred to as “diabetes”) refers to a group of metabolic diseases characterized by high levels of blood glucose resulting from defects in insulin production, insulin action, or both. In one embodiment, diabetes mellitus is selected from the group consisting of type 1 diabetes mellitus, type 2 diabetes mellitus, gestational diabetes mellitus, Late onset Autoimmune Diabetes in the Adult (LADA), Maturity Onset Diabetes of the Young (MODY) and other types of diabetes resulting from specific genetic conditions, drugs, malnutrition, infections and other illnesses.

[0263] The current WHO diagnostic criteria for diabetes mellitus are as follows: fasting plasma glucose ≥ 7.0 mmol/l (126 mg/dL) or 2-hour plasma glucose ≥ 11.1 mmol/l (200 mg/dL).

[0264] “Type 1 diabetes mellitus” (also known as “insulin-dependent diabetes (IDDM)” or “juvenile diabetes”) is a condition characterized by high blood glucose levels caused by total lack of insulin. This occurs when the body’s immune system attacks the insulin producing beta cells in the pancreas and destroys them. The pancreas then produces little or no insulin. Pancreatic removal or disease may also lead to loss of insulin-producing beta cells. Type 1 diabetes mellitus accounts for between 5% and 10% of cases of diabetes.

[0265] “Type 2 diabetes mellitus” (also known as “Non-Insulin-Dependent Diabetes Mellitus (NIDDM)” or “adult-onset diabetes”) is a condition characterized by excess glucose production in spite of the availability of insulin, and circulating glucose levels remain excessively high as a result of inadequate glucose clearance (insulin action). Type 2 diabetes mellitus may account for about 90% to 95% of all diagnosed cases of diabetes.

[0266] “Gestational diabetes” is a condition in which women without previously diagnosed diabetes exhibit high blood glucose levels during pregnancy (especially during the third trimester). Gestational diabetes affects 3-10% of pregnancies, depending on the population studied.

[0267] “Late onset Autoimmune Diabetes in the Adult (LADA)” (also referred to as “slow onset type 1 diabetes”) is a form of type 1 diabetes mellitus that occurs in adults, often with a slower course of onset.

[0268] “Maturity Onset Diabetes of the Young (MODY)” refers to a hereditary form of diabetes caused by mutations in an autosomal dominant gene disrupting insulin production.

[0269] “Diabetic retinopathy” is an ocular disease induced by the metabolic disarrangements occurring in diabetic patients and leads to progressive loss of vision.

[0270] The term “hyperglycemia” refers to an excess of sugar (glucose) in the blood.

[0271] The term “dyslipidemia” refers to a disorder of lipoprotein metabolism, including lipoprotein overproduction (“hyperlipidemia”) or deficiency (“hypolipidemia”). Dyslipidemias may be manifested by elevation of the total cholesterol, low-density lipoprotein (LDL) cholesterol and/or triglyceride concentrations, and/or a decrease in high-density lipoprotein (HDL) cholesterol concentration in the blood.

[0272] Non-Alcoholic SteatoHepatitis (NASH) is a liver disease characterized by an accumulation of fat (lipid droplets), along with inflammation and degeneration of hepatocytes. Once installed, the disease is accompanied with a high risk of cirrhosis, a state where the liver functions are altered and can progress to liver insufficiency. Thereafter, NASH often progresses to liver cancer.

[0273] “Atherosclerosis” is a vascular disease characterized by irregularly distributed lipid deposits called plaque in the intima of large and medium-sized arteries that may cause narrowing of arterial lumens and proceed to fibrosis and calcification. Lesions are usually focal and progress slowly and intermittently. Occasionally plaque rupture occurs leading to obstruction of blood flow resulting in tissue death distal to the obstruction. Limitation of blood flow accounts for most clinical manifestations, which vary with the distribution and severity of the obstruction.

[0274] The term “medicament”, as used herein, refers to a substance/composition used in therapy, i.e., in the treatment of a disease or disorder.

[0275] By “treat” is meant to administer a compound or composition or a combination of compounds or compositions to a subject in order to: prevent, ameliorate or eliminate a disease or disorder in a subject; arrest or slow a disease or disorder in a subject; inhibit or slow the development of a new disease or disorder in a subject; decrease the frequency or severity of symptoms and/or recurrences in a subject who currently has or who previously has had a disease or disorder; and/or prolong, i.e., increase, the lifespan of a subject.

[0276] In particular, the phrases “treating a disease or disorder” and “treatment of a disease or disorder” include curing, shortening the duration of, ameliorating, preventing, slowing down or inhibiting progression or worsening, or preventing or delaying the onset of a disease or disorder or the symptoms thereof.

[0277] The term “subject”, according to the invention, refers to a subject for treatment, in particular a diseased subject (also referred to as “patient”), including, but not limited to, a human being, a non-human primate, or other animals such as cows, horses, pigs, sheep, goats, dogs, cats, rabbits or rodents (e.g., mice, rats, guinea pigs or hamsters). In one embodiment, the subject or patient is a human being.

[0278] The present invention is now further described by reference to the following Examples, which are intended to illustrate, and not to limit, the scope of the present invention.

### EXAMPLES

### Example 1: Determining the Optimal GLP-1RA/FGF21 Activity Ratio by Systems Pharmacology Modelling

[0279] Improved mechanistic insights into pharmacological effects of GLP-1RA/FGF21 fusion proteins in humans were used to identify optimal GLP-1RA/FGF21 potency ratios. A mechanistic systems pharmacology model was developed describing effects of GLP-1 and FGF21 on glucose, lipid, and energy metabolism in humans (Cuevas-Ramos et al. (2009) Curr Diabetes Rev 5(4): 216-220; Deacon et al. (2011) Rev Diabet Stud 8(3): 293-306; Kim et al. (2008) Pharmacol Rev 60(4): 470-512; Kharitonenkov et al. (2014) Mol Metab 3(3): 221-229).

[0280] The model represented relevant pathways for GLP-1 and FGF21 effects. Glycemic control (i.e., HbA1c, fasting plasma glucose, postprandial glucose), lipid parameters (i.e., plasma triglycerides, fatty acids, cholesterol), and energy balance (i.e., body weight, food intake, energy expenditure) were captured to assess therapeutic responses to simulated drug treatment (e.g., GLP-1RA/FGF21 fusion protein, Liraglutide, FGF21 analog LY2405319). For LY2405319, see Kharitonenkov et al. (2013) PLoS ONE 8(3): e58575.

[0281] The model covered key aspects of glucose homeostasis controlled by the hormones insulin, glucagon, and certain incretins (e.g., GLP-1, GIP). The major model endpoint regarding glycemic control was HbA1c, which is a common clinical endpoint used to estimate average plasma glucose concentrations over the previous several months. HbA1c was estimated within the model using the linear correlation between mean plasma glucose and HbA1c as reported by Nathan et al. (2008) Diabetes Care 31(8): 1473-1478.

[0282] The model incorporated triglyceride and fatty acid metabolism at a level appropriate to handle basic lipid metabolism, including the representation of cholesterol. HDL and non-HDL, i.e., LDL plus VLDL cholesterol, are the circulating lipoproteins. The representation of lipid metabolism allowed simulating the impact of FGF21 compounds on lipids and the interaction with statins. FGF21 compounds had significant effects on lipid concentrations (Gaich et al. (2013) Cell Metab 18(3): 333-340; Fisher et al. (2011) Endocrinology 152(8): 2996-3004).

[0283] Weight loss or gain in the model was measured as changes in body adipose mass. There was a direct relationship between fat mass and body weight (Broyles et al. (2011) Br J Nutr 105(8): 1272-1276). Food intake was based on basal and resting metabolic rate (Amirkalali et al. (2008) Indian J Med Sci 62(7): 283-290). Body adipose mass stayed constant when energy expenditure equaled caloric intake. Therapy effects on food intake were implemented in the model using the formulation of Gobel et al. (2014) (Obesity (Silver Spring) 22(10): 2105-2108). Food was considered to be carbohydrate (glucose equivalents), fat (fatty acid equivalents), and protein (amino acid equivalents). All nutrients entered the stomach, passed through a delay node and then entered a three-compartment gastrointestinal tract. The gastrointestinal tract design was based on work done by Bastianelli et al. (1996) (J Anim Sci 74(8): 1873-1887) and Worthington (1997) (Med Inform (Lond) 22(1): 35-45) regarding food digestion and absorption.

[0284] Nutrients, hormones, drugs, and disease conditions can cause delays in gastric emptying. Under healthy conditions, the gastric emptying rate depends on the size of the meal, its energy density, and the amount of nutrients in the stomach (Achour et al. (2001) Eur J Clin Nutr 55(9): 769-772; Fouillet et al. (2009) Am J Physiol Regul lntegr Comp Physiol 297(6): R1691-1705). Individuals with diabetes often have a delay in glucose absorption as observed with an oral glucose tolerance test or a meal test (Bharucha et al. (2009) Clin Endocrinol (Oxf) 70(3): 415-420; Chang et al. (2012) Diabetes Care 35(12): 2594-2596). This delay is attributed to a slowing of gastric emptying. A delay in travel between the stomach and small intestine was added in the model of this example to account for delayed gastric emptying in diabetic subjects. Drugs and hormones (e.g., GLP-1) can affect the vagal tone of the stomach, which reduces mechanical mixing and/or peristalsis, and also slows gastric emptying (Jelsing et al. (2012) Diabetes Obes Metab 14(6): 531-538; Little et al. (2006) J Clin Endocrinol Metab 91(5): 1916-1923; Nauck et al. (2011) Diabetes 60(5): 1561-1565; van Can et al. (2013) Int J Obes (Lond) 38(6): 784-93).

[0285] One aim of the fusion proteins described herein was to prevent or reduce GLP-1 related adverse effects, i.e., nausea and vomiting (Lean et al. (2014) Int J Obes (Lond) 38(5): 689-697). Gastric emptying measures provided an estimate of adverse events such as nausea and vomiting that correlated with low rates of gastric emptying. Hence, a marker for gastric adverse events in the model was the sum of the gastric emptying rate.

[0286] Different virtual patients were implemented in a model platform representing healthy and type 2 diabetic patients at different stages of the disease. Moreover, the virtual patients covered different degrees of obesity and dyslipidemia. The virtual patients represented variability in disease severity and pathophysiology and phenotypic variability observed in the clinic.

[0287] Several therapies were implemented in the model, i.e., GLP-1RA/FGF21 fusion protein, Liraglutide, FGF21 analog LY2405319, Metformin, Atorvastatin, Sitagliptin, and human insulin. These therapies could be switched on or off in the simulations. The virtual patient was assumed to be on a background of Metformin and Atorvastatin when administered the GLP-1RA/FGF21 fusion protein.

[0288] Virtual GLP-1RA/FGF21 fusion proteins were implemented in the model described in this example. The fusion protein contained both FGF21 and GLP-1 agonistic activities, and it had the same effects as both FGF21 and GLP-1 receptor agonists. The pharmacokinetic profiles of the virtual fusion proteins were assumed to be similar to Dulaglutide (Geiser et al. (2016) Clin Pharmacokinet 55(5): 625-34).

[0289] The model was validated by comparison with numerous data sets. The simulation results were qualitatively consistent with relevant data and knowledge, e.g., Hellerstein et al. (1997) J Clin Invest 100(5): 1305-1319; Muscelli et al. (2008) Diabetes 57(5): 1340-1348. The model matched relevant quantitative test data, e.g., Aschner et al. (2006) Diabetes Care 29(12): 2632-2637; Dalla Man, Caumo et al. (2005) Am J Physiol Endocrinol Metab 289(5): E909-914; Dalla Man et al. (2005) Diabetes 54(11): 3265-3273; Fiallo-Scharer (2005) J Clin Endocrinol Metab 90(6): 3387-3391; Hahn et al. (2011) Theor Biol Med Model 8: 12; Herman et al. (2005) Clin Pharmacol Ther 78(6): 675-688; Herman et al. (2006) J Clin Pharmacol 46(8): 876-886 and J Clin Endocrinol Metab 91(11): 4612-4619; Hojlund et al. (2001) Am J Physiol Endocrinol Metab 280(1): E50-58; Monauni et al. (2000) Diabetes 49(6): 926-935; Nauck et al. (2009) Diabetes Care 32(1): 84-90; Nauck et al. (1993) J Clin Invest 91(1): 301-307; Nauck et al. (2004) Regul Pept 122(3): 209-217; Tzamaloukas et al. (1989) West J Med 150(4): 415-419; Sikaris (2009) J Diabetes Sci Technol 3(3): 429-438; Vicini and Cobelli (2001) Am J Physiol Endocrinol Metab 280(1): E179-186; Vollmer et al. (2008) Diabetes 57(3): 678-687.

[0290] Existing therapies were implemented in the model for direct comparison, including an FGF21 analog and a GLP-1 receptor agonist. The FGF21 analog’s effects were validated with clinical data, e.g., Gaich et al. (2013) Cell Metab 18(3): 333-340. The GLP-1 receptor agonist Liraglutide was a direct competitor for the target, and its implementation was compared with various clinical data, e.g., data described in Jacobsen et al. (2009) Br J Clin Pharmacol 68(6): 898-905; Elbrond et al. (2002) Diabetes Care 25(8): 1398-1404; Chang et al. (2003) Diabetes 52(7): 1786-1791; Kolterman et al. (2003) J Clin Endocrinol Metab 88(7): 3082-3089; Degn et al. (2004) Diabetes 53(5): 1187-1194; Kolterman et al. (2005) Am J Health Syst Pharm 62(2): 173-181; Vilsboll et al. (2008) Diabet Med 25(2): 152-156; Buse et al. (2009) Lancet 374(9683): 39-47; Jelsing et al. (2012) Diabetes Obes Metab 14(6): 531-538; Hermansen et al. (2013) Diabetes Obes Metab 15(11): 1040-1048; Suzuki et al. (2013) Intern Med 52(10): 1029-1034; van Can et al. (2013) Int J Obes (Lond) 38(6): 784-93); Zinman et al. (2009) Diabetes Care 32(7): 1224-1230; Russell-Jones et al. (2009) Diabetologia 52(10): 2046-2055; Pratley et al. (2011) Int J Clin Pract 65(4): 397-407; Nauck et al. (2013) Diabetes Obes Metab 15(3): 204-212; Flint et al. (2011) Adv Ther 28(3): 213-226; Kapitza et al. (2011) Adv Ther 28(8): 650-660; and Astrup et al. (2012) Int J Obes (Lond) 36(6): 843-854.

[0291] The model platform allowed simulation of beneficial and adverse effects of virtual GLP-1RA/FGF21 fusion proteins with varying activity ratios. Effective FGF21-mediated EC50 values were set constant to those derived from Gaich et al. (2013) Cell Metab 18(3): 333-340. Effective GLP-1-mediated EC50 values were reduced by a factor of 2 to 600 in increments of 1 relative to endogenous GLP-1 (Table 1).

TABLE 1

GLP-1R agonist/FGF21 fusion protein pharmacodynamics (EC50 values)

| Potency Ratio* | Effective GLP-1-Mediated EC50 Values | | | | Effective FGF21-Mediated EC50 Values** |
|---|---|---|---|---|---|
| | Peripheral Glucose Uptake | Insulin Release | Gastric Emptying | Food Intake | |
| 1 | 35 pM | 20 pM | 50 pM | 80 pM | 3547 pM |
| 100 | 3500 pM | 2000 pM | 5000 pM | 8000 pM | 3547 pM |

* Relative to endogenous GLP-1
** FGF21 EC50 values were set assuming half maximal effect per Gaich et al. (2013) Cell Metab 18(3): 333-340

[0292] For each virtual fusion protein, the exposure - response relation was simulated for relevant pharmacodynamic endpoints, i.e., HbA1c, triglycerides, fatty acids, non-HDL cholesterol, and adipose mass. As a marker for GLP-1-mediated adverse events, gastric emptying rate was used. 52 weeks treatment of an average obese dyslipidemic type 2 diabetic virtual patient with GLP-1 RA/FGF21 fusion proteins was simulated for a broad dose range. After treatment for 52 weeks, all relevant pharmacodynamic endpoints were expected to reach steady state. For each endpoint, the half maximal effective concentration (EC50 value) was determined from the exposure -response curves. The EC50 values varied with the activity ratio, especially for the mainly GLP-1-mediated endpoints HbA1c and gastric emptying rate. FIG. 1 depicts the EC50 values depending on the GLP-1 attenuation factor. An increased GLP-1 attenuation factor indicated a reduction in GLP-1 R agonistic activity.

[0293] This procedure allowed the identification of relevant activity ratios, for which adverse effects were observed at higher plasma levels as compared to the plasma levels that mediated pharmacodynamics effects. For GLP-1 attenuation factors greater than 9, the EC50 of GLP-1-mediated gastrointestinal adverse effects was greater than the EC50 of pharmacodynamic effects. Hence, gastric adverse effects occurred at higher plasma levels than levels needed to achieve pharmacodynamic effects. It was possible to elucidate doses that provided all desirable pharmacodynamic effects while avoiding GLP-1-mediated gastrointestinal adverse effects.

[0294] The maximal EC50 value for gastric emptying rate was reached at attenuation factor 531. The maximal distance between adverse and mean pharmacodynamics effects was reached at attenuation factor 482 (FIG. 2). Therefore, activity ratios beyond 1:482 were not relevant. The maximal distance between maximum of pharmacodynamics (HbA1c) and adverse effects was 319. The maximal distance between maximum of pharmacodynamics (HbA1c) and adverse effects normalized by spreading of FGF21- (lipids) and GLP-1-mediated effects (HbA1c) was 121.

[0295] GLP-1RA/FGF21 fusion proteins with potency ratios between 1:10 and 1:482 were predicted to be most beneficial in improving lipid profile, body weight, and glucose metabolism and likely caused no significant adverse events based on gastric emptying response. Lower potency ratios were likely not good candidates based on their predicted strong inhibition of gastric emptying and potential for adverse events. Higher potency ratios were thought likely to be not sufficiently effective and therefore not competitive.

[0296] 12 weeks of treatment of an average obese dyslipidemic type 2 diabetic virtual patient with GLP-1RA/FGF21 fusion proteins was simulated for a broad dose range, since the primarily GLP-1-mediated parameter of HbA1c levels clinically reaches steady state after 12 weeks of treatment with GLP-1 receptor agonists and FGF21 agents known in the art.

[0297] FIG. 3 depicts the EC50 values obtained versus GLP-1 attenuation factor over a 12-week simulation period. For GLP-1 attenuation factors greater than 18, the EC50 of GLP-1-mediated gastrointestinal adverse effects was greater than the EC50 of pharmacodynamic effects. The maximal EC50 value for gastric emptying rate was reached at attenuation factor 501. The maximal distance between adverse and mean pharmacodynamics effects was reached at attenuation factor 469 (FIG. 4). The maximal distance between maximum of pharmacodynamics (HbA1c) and adverse effects was 313. The maximal distance between maximum of pharmacodynamics (HbA1c) and adverse effects normalized by spreading of FGF21- (lipids) and GLP-1-mediated effects (HbA1c) was 123.

[0298] Efficacy and potential for adverse events for GLP-1RA/FGF21 fusion proteins with different activity ratios were investigated by means of the described systems pharmacology approach. Fusion proteins with presumably calculated ideal potency ratios were identified, predicted to be beneficial in improving lipid profile, body weight, and glycemic control while likely not causing significant adverse GLP-1RA associated effects based on gastric emptying response. Compounds with the selected model-informed potency ratios were predicted to provide a good efficacy versus risk profile.

### Example 2: Expression of Homodimeric GLP-1RA/FGF21 Fusion Proteins in HEK-293, CHO and E.Coli Cells and Chemical Synthesis of Isolated GLP-1R Agonistic Peptides

[0299] GLP-1 RA/FGF21 Fc fusion proteins were produced by transient transfection in HEK-293 or CHO cells. DNA sequences of the fusion proteins were N-terminally fused to an IL2 signal sequence (SEQ ID NO: 246) followed by a histidine-rich sequence (His-tag) and a TEV protease-cleavage site (SEQ ID NO: 247 or 248). The signal sequence was required for secretion of the desired proteins into the culture medium. The proteins were purified from the culture supernatant using immobilized metal-ion affinity chromatography (IMAC) (cOmplete His-Tag Purification Column™, Roche). After elution from the IMAC-column, the N-terminal His-tag was optionally cleaved by the addition of TEV protease. After His-tag cleavage, the cleavage reaction solution was passed a second time over an IMAC-column (cOmplete His-Tag Purification Column™, Roche), collecting the (His-tag-free) flow-through fraction. The protein was further purified using Protein A affinity chromatography (rProtein A Sepharose, GE Healthcare) and a gel filtration column with phosphate buffered saline (PBS, Gibco) as running buffer. Fractions containing the desired proteins were collected, pooled, concentrated and stored at -80° C. until further usage.

[0300] The FGF21 protein of SEQ ID NO: 252 (mature human wild-type FGF21 with an additional N-terminal Gly; referred to as G-FGF21 herein) was expressed in E. coli. The DNA sequence of the FGF21 protein was N-terminally fused to a Histidine-rich sequence (His-tag) and a TEV or SUMO protease-cleavage site (SEQ ID NO: 248 or 249). The desired protein was purified using immobilized metal-ion affinity chromatography (IMAC) (HisTrap HP, GE Healthcare) followed by cleavage of the N-terminal His-tag by addition of TEV or SUMO protease. After His-tag cleavage, the cleavage reaction solution was purified using an ion exchange column (Source 15, GE Healthcare), followed by a gel filtration column (Superdex 75, GE Healthcare) using phosphate buffered saline (PBS, Gibco) as running buffer. Fractions containing the desired protein were collected, pooled, concentrated and stored at -80° C. until further usage.

[0301] In an alternative approach, fusion proteins were produced by expression in E.coli inclusion bodies followed by a refolding step in which folded fusion protein was obtained by unfolding the inclusion bodies in Tris-buffered guanidinium chloride solution and refolding by dilution in buffer without chaotrophic salt. Fusion proteins were purified using Protein A affinity chromatography (MabSelect SuRe, GE Healthcare) followed by cleavage of the N-terminal pre-sequence by addition of TEV protease. The cleavage reaction solution was purified using an anion exchange column (POROS 50 HQ, ThermoFisher). Fractions containing the desired proteins were collected and pooled. Final buffer conditions and protein concentrations were established by an ultrafiltration/diafiltration step using PBS (Gibco). Samples were stored at -80° C. until further usage.

[0302] Whereas fusion proteins were produced by recombinant methods (see above), isolated peptidic GLP-1R agonists were chemically synthesized.

[0303] More particularly, peptides were synthesized using the following manual synthesis procedure:

[0304] 0.3 g Desiccated Rink amide MBHA Resin (0.66 mmol/g) was placed in a polyethylene vessel equipped with a polypropylene filter. Resin was swollen in DCM (15 mL) for one hour and DMF (15 mL) for one hour. The Fmoc group on the resin was de-protected by treating it twice with 20% (v/v) piperidine/DMF solution for 5 and 15 minutes. The resin was washed with DMF/DCM/DMF (6:6:6 times each). A Kaiser test (quantitative method) was used for the conformation of removal of Fmoc from solid support. The C-terminal Fmoc-amino acid (5 equivalent excess corresponding to resin loading) in dry DMF was added to the de-protected resin and coupling of the next Fmoc-amino acid was initiated with 5 equivalent excess of DIC and HOBT in DMF. The concentration of each reactant in the reaction mixture was approximately 0.4 M. The mixture was rotated on a rotor at room temperature for 2 hours. Resin was filtered and washed with DMF/DCM/DMF (6:6:6 times each). Kaiser tests performed on peptide resin aliquots upon completion of coupling was negative (no color on the resin). After the first amino acid attachment, the unreacted amino group, if any, in the resin was capped used acetic anhydride/pyridine/DCM (1:8:8) for 20 minutes to avoid any deletion of the sequence. After capping, resin was washed with DCM/DMF/DCM/DMF (6/6/6/6 time each). The Fmoc group on the C-terminal amino acid attached peptidyl resin was deprotected by treating it twice with 20% (v/v) piperidine/DMF solution for 5 and 15 minutes. The resin was washed with DMF/DCM/DMF (6:6:6 times each). The Kaiser tests performed on peptide resin aliquots upon completion of Fmoc-deprotection were positive.

[0305] The remaining amino acids in target sequence on Rink amide MBHA Resin were sequentially coupled using Fmoc AA/DIC/HOBt method using 5 equivalent excess corresponding to resin loading in DMF. The concentration of each reactant in the reaction mixture was approximately 0.4 M. The mixture was rotated on a rotor at room temperature for 2 hours. Resin was filtered and washed with DMF/DCM/DMF (6:6:6 times each). After each coupling step and Fmoc deprotection step, a Kaiser test was carried out to confirm the completeness of the reaction.

[0306] After the completion of the linear sequence, the ε-amino group of lysine was used as a branching point or a modification point and was deprotected by using 2.5% hydrazine hydrate in DMF for 15 minutes two times and washed with DMF/DCM/DMF (6:6:6 time each). The ʏ-carboxyl end of glutamic acid was attached to the ε-amino group of Lys using Fmoc-Glu(OH)-OtBu with DIC/HOBt method (using 5 equivalent excess with respect to resin loading) in DMF. The mixture was rotated on a rotor at room temperature for 2 hours. The resin was filtered and washed with DMF/DCM/DMF (6×30 mL each). The Fmoc group on the glutamic acid was de-protected by treating it twice with 20% (v/v) piperidine/DMF solution for 5 and 15 minutes (25 mL each). The resin was washed with DMF/DCM/DMF (6:6:6 times each). A Kaiser test on peptide resin aliquot upon completion of Fmoc-deprotection was positive.

[0307] If the side-chain branching also contained one more ʏ-glutamic acid, a second Fmoc-Glu(OH)-OtBu was used for the attachment to the free amino group of ʏ-glutamic acid using the DIC/HOBt method (with a 5 equivalent excess with respect to resin loading) in DMF. The mixture was rotated on a rotor at room temperature for 2 hours. Resin was filtered and washed with DMF/DCM/DMF (6×30 mL each). The Fmoc group on the ʏ-glutamic acid was de-protected by treating it twice with 20% (v/v) piperidine/DMF solution for 5 and 15 minutes (25 mL). The resin was washed with DMF/DCM/DMF (6:6:6 times each). A Kaiser tests performed on peptide resin aliquots upon completion of Fmoc-deprotection were positive.

[0308] Final cleavage of peptide from the resin:

[0309] The peptidyl resin synthesized by manual synthesis was washed with DCM (6×10 mL), MeOH (6×10 mL) and ether (6×10 mL) and dried in vacuum desiccators overnight. Cleavage of the peptide from the solid support was achieved by treating the peptide-resin with a reagent cocktail (80% TFA / 5% thioanisole/ 5% phenol/ 2.5% EDT/ 2.5% DMS/ 5% DCM) at room temperature for 3 hours. Cleavage mixtures were collected by filtration and the resins were washed with TFA (2 mL) and DCM (2 × 5 mL). The excess TFA and DCM was concentrated to small volume under nitrogen and a small amount of DCM (5-10 mL) was added to the residue and evaporated under nitrogen. The process was repeated 3-4 times to remove most of the volatile impurities. The residue was cooled to 0° C. and anhydrous ether was added to precipitate the peptide. The precipitated peptide was centrifuged and the supernatant ether was removed and fresh ether was added to the peptide and re-centrifuged. The crude sample was preparative HPLC purified and lyophilized. The identity of peptides were confirmed by LCMS.

### Example 3: In Vitro Cellular Assay for Human FGF21 Receptor Efficacy in CHO Cells (In-Cell Western)

[0310] The cellular in vitro efficacy of G-FGF21 (SEQ ID NO: 252) and fusion proteins of the invention were measured using a specific and highly sensitive In-Cell Western (ICW) assay. The ICW assay is an immunocytochemical assay that is usually performed using a microplate format. CHO Flp-In cells (Invitrogen, Darmstadt, Germany) stably expressing the human FGFR1c together with human beta-Klotho (KLB) were used for an FGF21 receptor auto-phosphorylation ICW assay (Aguilar et al. (2010) PLoS ONE 5(4): e9965). In order to determine the receptor auto-phosphorylation level or downstream activation of the MAP kinase ERK1/2, 2×10⁴ cells/well were seeded into 96-well plates and grown for 48 hours. Cells were serum starved with serum-free medium (Ham’s F-12 Nutrient Mix with GlutaMAX, Gibco, Darmstadt, Germany) for 3-4 hours. The cells were subsequently treated with increasing concentrations of either G-FGF21 (SEQ ID NO: 252) or the indicated fusion protein for 5 minutes at 37° C. After incubation, the medium was discarded, and the cells were fixed in 3.7% freshly prepared para-formaldehyde for 20 minutes. Cells were permeabilized with 0.1% Triton-X-100 in PBS for 20 minutes. Blocking was performed with Odyssey blocking buffer (LICOR, Bad Homburg, Germany) for 2 hours at room temperature. As a primary antibody, anti-pFGFR Tyr653/654 (New England Biolabs, Frankfurt, Germany) or anti-pERK Phospho-p44/42 MAP Kinase Thr202/Tyr204 (Cell Signaling) was added and incubated overnight at 4° C. After incubation of the primary antibody, cells were washed with PBS plus 0.1% Tween20. The cells were then incubated with secondary anti-Mouse 800CW antibody (LICOR, Bad Homburg, Germany) for 1 hour at room temperature. Subsequently, the cells were washed again with PBS plus 0.1% Tween20. Infrared dye signals were quantified with an Odyssey imager (LICOR, Bad Homburg, Germany). Results were normalized by quantification of DNA with TO-PRO3 dye (Invitrogen, Karlsruhe, Germany). Data were obtained as arbitrary units (AU), and EC50 values were obtained from dose-response curves (summarized in Tables 2 and 3). FIG. 5 shows the results from an ICW with CHO cells overexpressing human FGFR1c plus KLB.

TABLE 2

EC50 values of G-FGF21 (SEQ ID NO: 252) and GLP-1RA/FGF21 Fc fusion proteins measured via ICW pFGFR in CHO cells

| SEQ ID NO | pFGFR ICW EC50 (nmol/L) |
|---|---|
| 252 | 4.49 |
| 1 | 38.61 |
| 2 | 30.57 |
| 3 | 22.72 |
| 4 | 36.35 |
| 5 | 20.38 |
| 6 | 19.73 |
| 7 | 27.85 |
| 8 | 25.39 |
| 19 | 34.31 |
| 20 | 42.86 |
| 23 | 54.56 |
| 24 | 25.29 |
| 39 | 13.85 |
| 44 | 29.99 |
| 57 | 25.83 |
| 71 | 13.57 |
| 83 | 16.60 |
| 209 | 66.29 |

TABLE 3

EC50 values of G-FGF21 (SEQ ID NO: 252) and GLP-1RA/FGF21 Fc fusion proteins measured via ICW pERK in CHO cells

| SEQ ID NO | pERK ICW EC50 (nmol/L) |
|---|---|
| 252 | 0.17 |
| 1 | 6.72 |
| 2 | 6.94 |
| 3 | 6.07 |
| 4 | 8.61 |
| 5 | 6.84 |
| 6 | 9.86 |
| 7 | 5.96 |
| 8 | 6.75 |
| 19 | 43.75 |
| 20 | 10.40 |
| 23 | 8.60 |
| 24 | 8.39 |
| 39 | 4.28 |
| 44 | 5.40 |
| 57 | 6.86 |
| 71 | 6.19 |
| 83 | 2.44 |
| 209 | 27.93 |

### Example 4: In Vitro Cellular Assay for Human Glucagon-Like-Peptide 1 (GLP-1) Receptor Efficacy

[0311] Agonism of compounds for human glucagon-like peptide-1 (GLP-1) receptor was determined by functional assays measuring the cAMP responses in a HEK-293 cell line stably expressing human GLP-1 receptor.

[0312] Recombinant HEK-293 cells were grown in T175 culture flasks placed at 37° C. to near confluence in medium (DMEM with 10% FBS) and collected in 2 mL vials in cell culture medium containing 10% DMSO in concentrations of 1-5×10⁷ cells/mL. Each vial contained 1.8 mL cell suspension. The vials were slowly frozen to -80° C. in an isopropanol chamber, and then transferred to liquid nitrogen for long term storage.

[0313] Prior to their use, frozen cells were thawed quickly at 37° C., washed with 20 mL cell buffer (1 × HBSS; 20 mM HEPES, 0.1% BSA) and centrifuged for 5 minutes at 900 rpm. Cells were resuspended in assay buffer (cell buffer plus 2 mM IBMX) and adjusted to a cell density of 1×10⁶ cells/mL. For measurement, 5 µL cell suspension (final 5×10³ cells/well) and 5 µL of test compound were added to a well of a 384-well plate, followed by incubation for 30 minutes at room temperature. Human GLP-1(7-36) amide from Bachem (Bubendorf, Switzerland, H-6795) (SEQ ID NO: 260) was taken as a control. The cAMP content of cells was determined using a kit from Cisbio Corp. (cat. no. 62AM4PEC) based on Homogenous Time Resolved Fluorescence (HTRF). After addition of HTRF reagents diluted in lysis buffer (kit components), the plates were incubated for 1 h, followed by measurement of the fluorescence ratio at 665 / 620 nm. The in vitro potency of agonists was quantified by determining the concentrations that caused 50% activation of maximal response (EC50).

[0314] The results are summarized in Table 4, and dose-response curves are shown in FIG. 6.

TABLE 4

EC50 values of human GLP-1(7-36) (SEQ ID NO: 260), GLP-1RA/FGF21 Fc fusion proteins and several single GLP-1R agonistic peptides measured via HTRF cAMP assay in HEK-293 cells

| SEQ ID NO | HTRF cAMP EC50 | | (pmol/L) |
|---|---|---|---|
| | Human GLP-1R | Mouse GLP-1R | Monkey GLP-1R |
| 260 | 0.77 | 0.62 | 1.12 |
| 1 | 218.76 | 2.80 | 161.07 |
| 2 | 193.72 | 2.93 | 164.36 |
| 3 | 211.94 | 97.21 | 278.82 |
| 4 | 313.33 | 5.29 | 261.98 |
| 5 | 125.01 | 96.46 | 195.69 |
| 6 | 383.35 | 6.45 | 347.21 |
| 7 | 130.91 | 68.11 | 190.20 |
| 8 | 152.24 | 77.14 | 217.09 |
| 18 | 9.90 | 2.09 | 10.18 |
| 19 | 11.20 | 2.16 | 10.95 |
| 20 | 9.49 | 1.97 | 9.86 |
| 21 | 93.80 | 4.19 | 78.68 |
| 22 | 85.58 | 3.88 | 73.93 |
| 23 | 78.72 | 3.32 | 70.72 |
| 24 | 48.83 | 2.66 | 43.54 |
| 25 | 45.94 | 101.49 | 81.30 |
| 26 | 40.08 | 95.33 | 73.30 |
| 27 | 37.53 | 90.96 | 75.10 |
| 28 | 32.85 | 106.99 | 68.70 |
| 29 | 37.67 | 113.45 | 64.00 |
| 30 | 41.96 | 125.49 | 73.30 |
| 31 | 32.31 | 113.47 | 62.80 |
| 39 | 8.50 | 1.16 | 12.30 |
| 40 | 46.06 | 39.02 | 50.40 |
| 42 | 18.07 | 43.21 | 22.20 |
| 43 | 13.69 | 31.48 | 17.40 |
| 44 | 125.83 | 325.07 | 174.00 |
| 45 | 48.20 | 492.12 | 60.42 |
| 46 | 8.47 | 17.85 | 11.40 |
| 47 | 16.99 | 6.64 | 35.60 |
| 48 | 35.70 | 10.07 | 60.60 |
| 49 | 23.37 | 6.65 | 42.20 |
| 50 | 20.51 | 7.87 | 38.20 |
| 51 | 26.84 | 7.58 | 51.10 |
| 52 | 25.60 | 7.04 | 46.00 |
| 53 | 28.37 | 128.18 | 25.03 |
| 54 | 107.04 | 118.79 | 97.40 |
| 55 | 261.38 | 595.82 | 156.56 |
| 56 | 15.02 | 66.73 | 11.48 |
| 57 | 21.12 | 19.29 | 15.70 |
| 58 | 9.38 | 7.19 | 5.76 |
| 59 | 13.64 | 13.50 | 10.31 |
| 60 | 22.52 | 11.72 | 13.02 |
| 61 | 68.26 | 42.99 | 40.20 |
| 62 | 20.32 | 13.38 | 12.93 |
| 63 | 95.38 | 54.34 | 52.60 |
| 64 | 9.09 | 6.08 | 7.47 |
| 65 | 16.49 | 6.63 | 10.17 |
| 66 | 33.77 | 11.02 | 31.42 |
| 67 | 36.52 | 10.23 | 21.65 |
| 68 | 16.66 | 9.42 | 10.80 |
| 69 | 15.30 | 17.28 | 14.69 |
| 70 | 41.39 | 83.11 | 38.80 |
| 71 | 27.79 | 53.55 | 26.61 |
| 72 | 20.37 | 77.53 | 25.04 |
| 74 | 13.47 | 18.34 | 13.70 |
| 76 | 39.21 | 189.87 | 40.32 |
| 78 | 50.98 | 323.16 | 52.52 |
| 79 | 243.25 | 2512.19 | 295.89 |
| 80 | 48.63 | 64.39 | 42.55 |
| 81 | 49.87 | 67.40 | 49.36 |
| 82 | 90.13 | 72.47 | 109.18 |
| 83 | 29.30 | 55.99 | 28.11 |
| 84 | 38.20 | n.d. | n.d. |
| 88 | 33.03 | n.d. | n.d. |
| 89 | 45.29 | n.d. | n.d. |
| 90 | 336.00 | n.d. | n.d. |
| 92 | 58.86 | n.d. | n.d. |
| 93 | 48.35 | n.d. | n.d. |
| 94 | 66.49 | n.d. | n.d. |
| 95 | 18.49 | n.d. | n.d. |
| 96 | 43.99 | n.d. | n.d. |
| 97 | 40.39 | n.d. | n.d. |
| 100 | 15.01 | n.d. | n.d. |
| 101 | 83.50 | n.d. | n.d. |
| 102 | 169.50 | n.d. | n.d. |
| 105 | 8.12 | n.d. | n.d. |
| 106 | 9.66 | n.d. | n.d. |
| 107 | 186.50 | n.d. | n.d. |
| 108 | 326.00 | n.d. | n.d. |
| 109 | 278.00 | n.d. | n.d. |
| 112 | 7.23 | n.d. | n.d. |
| 113 | 158.50 | n.d. | n.d. |
| 115 | 92.20 | n.d. | n.d. |
| 116 | 10.61 | n.d. | n.d. |
| 118 | 18.27 | n.d. | n.d. |
| 120 | 10.17 | n.d. | n.d. |
| 121 | 11.87 | n.d. | n.d. |
| 122 | 14.53 | n.d. | n.d. |
| 123 | 12.74 | n.d. | n.d. |
| 124 | 10.58 | n.d. | n.d. |
| 126 | 8.51 | n.d. | n.d. |
| 127 | 10.27 | n.d. | n.d. |
| 128 | 9.83 | n.d. | n.d. |
| 129 | 12.30 | n.d. | n.d. |
| 130 | 7.38 | n.d. | n.d. |
| 132 | 8.48 | n.d. | n.d. |
| 133 | 13.44 | n.d. | n.d. |
| 134 | 17.34 | n.d. | n.d. |
| 135 | 11.49 | n.d. | n.d. |
| 136 | 11.84 | n.d. | n.d. |
| 139 | 7.35 | n.d. | n.d. |
| 142 | 12.89 | n.d. | n.d. |
| 143 | 14.20 | n.d. | n.d. |
| 144 | 16.22 | n.d. | n.d. |
| 145 | 7.63 | n.d. | n.d. |
| 146 | 12.25 | n.d. | n.d. |
| 147 | 10.11 | n.d. | n.d. |
| 148 | 8.48 | n.d. | n.d. |
| 150 | 11.53 | n.d. | n.d. |
| 151 | 8.66 | n.d. | n.d. |
| 152 | 9.43 | n.d. | n.d. |
| 153 | 9.98 | n.d. | n.d. |
| 155 | 11.02 | n.d. | n.d. |
| 156 | 9.22 | n.d. | n.d. |
| 157 | 12.08 | n.d. | n.d. |
| 158 | 8.70 | n.d. | n.d. |
| 161 | 252.21 | n.d. | n.d. |
| 162 | 270.04 | n.d. | n.d. |
| 163 | 374.50 | n.d. | n.d. |
| 164 | 102.76 | 87.97 | 141.14 |
| 165 | 173.00 | n.d. | n.d. |
| 166 | 159.50 | n.d. | n.d. |
| 167 | 309.50 | n.d. | n.d. |
| 168 | 46.10 | n.d. | n.d. |
| 169 | 59.60 | n.d. | n.d. |
| 170 | 233.50 | n.d. | n.d. |
| 171 | 266.50 | n.d. | n.d. |
| 172 | 253.50 | n.d. | n.d. |
| 174 | 76.95 | n.d. | n.d. |
| 175 | 90.85 | n.d. | n.d. |
| 176 | 71.75 | n.d. | n.d. |
| 177 | 48.65 | n.d. | n.d. |
| 180 | 405.50 | n.d. | n.d. |
| 181 | 137.00 | n.d. | n.d. |
| 182 | 123.00 | n.d. | n.d. |
| 183 | 73.80 | n.d. | n.d. |
| 184 | 216.00 | n.d. | n.d. |
| 185 | 13.85 | n.d. | n.d. |
| 186 | 123.85 | n.d. | n.d. |
| 187 | 67.44 | 67.47 | 63.20 |
| 188 | 59.65 | 70.96 | 63.70 |
| 190 | 152.41 | 479.17 | 238.78 |
| 192 | 102.27 | 98.00 | 148.81 |
| 193 | 108.18 | 71.30 | 151.49 |
| 194 | 127.68 | 129.00 | 139.93 |
| 195 | 74.51 | 56.60 | 71.84 |
| 196 | 75.28 | 31.70 | 126.80 |
| 197 | 68.32 | 48.00 | 101.65 |
| 198 | 86.54 | 65.10 | 86.91 |
| 199 | 163.23 | 153.00 | 231.19 |
| 200 | 73.11 | 46.20 | 110.64 |
| 201 | 100.55 | 69.80 | 98.56 |
| 202 | 100.50 | 71.70 | 127.68 |
| 203 | 96.88 | 89.20 | 101.69 |
| 204 | 102.74 | 65.70 | 93.49 |
| 205 | 130.74 | 127.00 | 113.32 |
| 206 | 107.18 | 93.70 | 150.82 |
| 207 | 146.88 | 128.00 | 188.80 |
| 208 | 169.64 | 127.95 | 254.61 |
| 209 | 164.10 | 118.21 | 231.66 |
| 211 | 58.80 | 151.66 | 68.55 |
| 212 | 113.42 | 286.97 | 153.33 |
| 216 | 151.60 | 346.64 | 262.81 |
| 217 | 7.62 | 5.39 | n.d. |
| 219 | 221.50 | 422.46 | n.d. |
| 220 | 95.55 | 110.49 | n.d. |
| 221 | 202.49 | 162.48 | n.d. |
| 222 | 327.48 | 200.50 | n.d. |
| 223 | 80.85 | 79.52 | n.d. |
| 224 | 226.96 | 250.98 | n.d. |
| 225 | 127.98 | 61.60 | n.d. |
| 226 | 64.09 | 43.53 | n.d. |
| 227 | 61.35 | 40.75 | n.d. |
| 228 | 49.19 | 30.10 | n.d. |
| 229 | 62.87 | 469.79 | 82.08 |
| 261 | 56.32 | 1.12 | 49.40 |
| 262 | 10.48 | 7.65 | 5.74 |
| 271 | 6.94 | 0.84 | 9.51 |
| 272 | 20.80 | 1.31 | 21.74 |
| 274 | 19.47 | 71.25 | 19.95 |
| 275 | 31.15 | 101.21 | 20.00 |
| 278 | 10.48 | 7.65 | 5.74 |
| 279 | 210.23 | 380.23 | 250.95 |
| 281 | 9.87 | 20.04 | 7.11 |
| 282 | 34.04 | 40.15 | 26.60 |
| 284 | 51.40 | 69.52 | 39.71 |
| 286 | 15.57 | 29.08 | 12.99 |
| 291 | 28.89 | 11.09 | 28.36 |
| 292 | 8.48 | 8.56 | 8.77 |
| 293 | 29.23 | 5.06 | 27.60 |
| 294 | 208.98 | 42.34 | 182.99 |
| 295 | 9.23 | 49.40 | 9.87 |
| 297 | 21.30 | 33.10 | 21.54 |
| 298 | 93.60 | 65.80 | 56.70 |
| 301 | 23.68 | 23.70 | 16.31 |

n.d.: not determined

### Example 5: Analyzing Conformational and Thermal Stability of GLP-1RA/FGF21 Fc Fusion Proteins

[0315] Conformational stability and propensity to aggregate was determined simultaneously for the GLP-1RA/FGF21 Fc fusion proteins using a UNit (Unchained Labs, CA, USA). The UNit combines the analysis of intrinsic fluorescence of a protein to detect unfolding of the protein and a Static Light Scattering (SLS) measurement in order to investigate the aggregation behavior.

[0316] Data were acquired for the fusion proteins at a concentration of 5 mg/mL formulated in phosphate buffer at pH 7.4. A volume of 9 µL of each sample were loaded into a UNi capillary holder and analyzed in triplicate on the UNit. The temperature was increased from 20 to 95° C. at a constant linear rate of 0.3° C./min. The BaryCentric Mean (BCM) indicating the intrinsic fluorescence and SLS signals detected with a 266 nm laser were plotted against the applied temperature in order to obtain melting temperatures (Tm) and aggregation onset temperatures (Tagg). Data were analyzed using the UNit Analysis software v. 2.1 and are summarized in Table 5.

[0317] In addition, for some proteins, a thermal shift assay was applied to analyze thermostability in imitation of differential scanning fluorimetry (DSF or ThermoFluor™) assays (Ahmad S. et al. (2012) Protein Science 21: 433-446; Pantoliano et al. (2001) J. Biomol. Screen 6: 429-440; Niesen et al. (2007) Nat. Protoc. 2: 2212-21). This assay is based on the observation that hydrophobic fluorescent dyes, such as Sypro™ Orange (Life Technologies, cat. No. S6651), increase their fluorescence when they bind to hydrophobic patches on a protein. Such hydrophobic patches are exposed in proteins when they unfold upon heating, so that the increase in fluorescence can be used as a measure for the degree of unfolding and, hence, for the thermostability of the proteins.

[0318] Proteins were tested by mixing a solution of each protein in PBS (Gibco) with a 160x solution of Sypro™ Orange (diluted in water from a 5000X DMSO stock as provided by the supplier). The sample volume was adjusted to 20 µL with PBS. Typical conditions contained 0.8 mg/mL protein and 8x Sypro™ Orange in the final mixture, but protein concentrations could be varied between 0.4 mg/mL and 1.2 mg/mL. Samples were dispensed in 96-well PCR plates (BioRad Semi-Skirt 96 white) and shortly centrifuged to remove air bubbles. Plates were inserted in a BioRad iQ5 real-time PCR instrument and subjected to a thermal gradient from 10 to 90° C. at a ramp speed of 1° C./minute. For excitation and quantification of fluorescence, filters for wavelengths of 485 nm and 575 nm were chosen. BioRad iQ5 Standard Edition software (v. 2.0.148.60623) was used for data processing. In curves of fluorescence intensity against temperature, the inflection point was chosen as the measure for the melting temperature (Tm).

TABLE 5

Melting and aggregation temperatures of G-FGF21 (SEQ ID NO: 252) and selected GLP-1 RA/FGF21 Fc fusion proteins

| SEQ ID NO | Tm (°C) | Tagg (°C) |
|---|---|---|
| 252 | 43.1 * | n.d. |
| 2 | 69.6 | 71.5 |
| 7 | 68.7 | 66.1 |
| 8 | 68.6 | 65.3 |
| 4 | 64.9 | 64.0 |
| 6 | 64.1 | 63.4 |
| 3 | 63.9 | 65.3 |
| 5 | 62.6 | 63.2 |
| 1 | 70.5 | 75.5 |

* Data generated via DSF; n.d.: not determined

### Example 6: Pharmacokinetics in Mouse and Non-Human Primate

[0319] Plasma concentrations and pharmacokinetic parameters of GLP-1RA/FGF21 Fc fusion proteins were determined after single subcutaneous administration of 0.3 mg/kg in solution to female C57Bl/6 mice or male Cynomolgus monkeys using three different methods. Blood samples were obtained at time points from 30 minutes to 168 hours after dosing.

### A.) Bioanalytical Screening Method for Quantification of the Intact FGF21 Part of the GLP-1RA/FGF21 Fc Fusion Proteins

[0320] Plasma samples were analyzed for the intact FGF21 part of the fusion proteins with an ELISA kit (F1231-K01, Eagle Biosciences, USA). The assay utilized the two-site sandwich technique with two selected antibodies that bound to different epitopes of human intact FGF21. One of the antibodies specifically bound to the N-terminal amino acids (aa 29-35) of human FGF21, and the other antibody specifically bound to the C-terminus (aa 203-209) of human FGF21. Assay standards, controls and unknown samples were added directly to wells of microplate that was coated with an anti-human FGF21 (aa 29-35)-specific antibody. Simultaneously, a horseradish peroxidase conjugated anti-human FGF21 (aa 203-209)-specific antibody was added to each well. After the first incubation period, the antibody on the walls of the microtiter wells captured human FGF21 in the sample and unbound protein in each microtiter well was washed away. A “sandwich” of “anti-FGF21 antibody-human intact FGF21-HRP conjugated tracer antibody” was formed. The unbound tracer antibody was removed in the subsequent washing step. For the detection of the immunocomplex, the well was then incubated with a substrate solution in a timed reaction and then measured in a spectrophotometric microplate reader. The enzymatic activity of the immunocomplex bound to human intact FGF21 on the wall of the microtiter wells was directly proportional to the amount of intact FGF21 in the sample.

### B.) Bioanalytical Screening Method for Quantification of the Intact Full-Length Fusions Proteins

[0321] The concentration of the full-length GLP-1RA/FGF21 Fc fusion proteins in plasma were determined utilizing an ELISA method. The N-terminus of the fusion proteins were captured by a mouse monoclonal anti-GLP1 antibody (Mesoscale Discovery, MSD). Following blocking the plates with 150 µL of Blocker A (MSD) for 1 hour at room temperature (RT) with gentle shaking and washing 3 times with 300 µL wash buffer 50 µL of diluted plasma samples (standards and PK study samples) were added to each well and the plates were incubated for 1 hour at RT with gentle shaking. Following washing 3 times with 300 µL wash buffer, 50 µL of the primer detection antibody (C-terminus rabbit anti-FGF21 antibody, Pineda Antikörper-Service, Berlin, Germany) was added to each well and the plates were incubated for 1 hour at RT. Following washing 3 times with 300 µL wash buffer, 25 µL goat-anti-rabbit antibody (Sulfo-Tag labelled, MSD) diluted in PBS-Tween 0.05% (PBS-T) was added to each well and the plates were incubated for 1 hour at RT. Following washing 3 times with 300 µL PBS-T 150 µL read buffer was added to the wells.

### C.) Bioanalytical Screening Method for Quantification of the Intact GLP-1 Part of the GLP-1 FGF21 Fc Fusion Proteins

[0322] Plasma samples were analyzed for the intact GLP-1 part of the fusion proteins with a GLP-1 ELISA method. The ELISA plates were coated with mouse monoclonal anti-GLP-1 antibody (Mesoscale Discovery, MSD). Following blocking with 150 µL of Blocker A (MSD) for 1 hour at room temperature (RT) with gentle shaking and washing 3 times with 300 µL PBS-T, 50 µL of diluted plasma samples (standards and PK study samples) were added to each well and the plates were incubated for 1 hour at RT with gentle shaking. Following washing 3 times with 300 µL PBS-T, 25 µL of goat anti-human IgG diluted (1/3,333) in PBS-T (Sulfo-Tag labelled, MSD) was added to each well and the plates were incubated for 1 hour at RT. Following washing 3 times with 300 µL PBS-T, 150 µL read buffer was added to the wells.

[0323] The pharmacokinetic parameters were calculated by the program WinNonlin 6.4 using a non-compartmental model and linear trapezoidal interpolation calculation. The results are presented in FIGS. 7 and 8 as well as in Table 6. The results show that the novel GLP-1 RA/FGF21 Fc fusion proteins maintained their plasma levels in the ng/mL range with half-lives up to 20-40 hours.

TABLE 6

Terminal half-lives of selected GLP-1 RA/FGF21 Fc fusion proteins and G-FGF21 (SEQ ID NO: 252) after subcutaneous injection of 0.3 mg/kg in mouse and non-human primate

| | | | |
|---|---|---|---|
| SEQ ID NO | Assay | t_{½} mouse (h) | t_{½} monkey (h) |
| | FGF21 intact | 27.6 | 42.5 |
| 2 | GLP-1 intact | 27.8 | 33.4 |
| | full-length | 16.1 | 23.5 |
| | FGF21 intact | 14.2 | 31.7 |
| 7 | GLP-1 intact | n.d. | 21.3 |
| | full-length | 13.9 | 28.7 |
| | FGF21 intact | 17.9 | 33.6 |
| 8 | GLP-1 intact | n.d. | 23.7 |
| | full-length | 13.3 | 27.6 |
| | FGF21 intact | 0.7 | n.d. |
| 252 | GLP-1 intact | n.d. | n.d. |
| | full-length | n.d. | n.d. |

n.d.: not determined

### Example 7: In Vivo Efficacy in Murine Models

### A.) Multiple Dose Diet-Induced Obese (DIO) Mice

[0324] Female C57BL/6N Charles River mice were housed in groups in a specific pathogen-free barrier facility on a 12 hour light/dark cycle with free access to water and standard or high-fat diet (ssniff adjusted Fat Diet E15797). After 20 weeks of pre-feeding on high-fat diet, mice were stratified for body weight to treatment groups (n = 8), so that each group had similar mean body weight. An age-matched group with ad-libitum access to standard chow (ssniff R/M-H, V1534-0) was included as standard control group. A dulaglutide treated group was also included as comparator. Prior to the start of treatment, mice were subcutaneously (s.c.) injected with vehicle solution and weighed for 3 days to acclimate them to the procedures.

[0325] 1) Acute effect on blood glucose in fed female DIO mice: initial blood samples were taken just before first administration (s.c.) of vehicle (phosphate buffer solution) or first administration of GLP-1 RA/FGF21 Fc fusion proteins (dissolved in phosphate buffer), respectively. The volume of administration was 5 or 10 mL/kg, depending on concentration of stock solution. The animals had access to water and their corresponding diet during the experiment. Blood glucose levels were measured at t = 0 hours, t = 1 hour, t = 2 hours, t = 3 hours, t = 4 hours, t = 6 hours and t = 24 hours (method: Accu-Check glucometer). Blood sampling was performed by tail incision without anaesthesia.

[0326] 2) Chronic effect on body weight in female DIO mice: mice were treated once weekly, every 8^{th} day in the morning at the beginning of the light phase with either vehicle or test compound for 4 weeks. Body weight and food consumption were recorded daily. Two days before start of treatment and on day 26, total fat mass was measured by nuclear magnetic resonance (NMR).

[0327] The effect of the fusion proteins on body weight and food consumption is shown in FIG. 9 and FIG. 10, respectively. Although animals treated with the fusion protein of SEQ ID NO: 8 or SEQ ID NO: 7 cumulatively consumed more food than vehicle or dulaglutide treated animals by the end of the study, they significantly lost more body weight than the vehicle or dulaglutide treated animals. This clearly demonstrates the balancing of the GLP-1 receptor activity versus the FGF21 mimetic activity of both molecules of SEQ ID NO: 7 and SEQ ID NO: 8, because their effect on body weight reduction did not need suppression of food consumption in order to materialize.

### B.) Blood Glucose-Lowering Effects of Multiple, Subcutaneous Doses in Fed, Female Diabetic Db/db Mice

### Animals, Study Design (Pre-Dosing Phase, Dosing Phase), Pharmacological Intervention

[0328] Female, healthy, lean (BKS.Cg-(lean)/OlaHsd or BKS.Cg-Dock7(m)+/+ Lepr(db)J) and diabetes-prone, obese db/db (BKS.Cg-+Leprdb/+Leprdb/OlaHsd or BKS.CG-m +/+ Lepr(db)/J) mice were ordered from Envigo RMS Inc. or Charles River Laboratories. All animals were group housed in shoebox cages with wood chip bedding and were acclimated for approximately 2 to 3 weeks prior to dosing phase.

[0329] Mice were housed under vivarium conditions including a 12 hour light/dark cycle (light phase 04:00 AM - 4:00 PM), a room temperature between 20 - 26° C. and a relative humidity between 30 - 70%. All animals had free access to Greenfield city water and a Purina Fomulab Diet 5008. At the study start mice were approximately 10-12 weeks old.

### Pre-Dose Phase (15 Days)

[0330] Blood was collected for a HbA1c and blood glucose measurement on day 9 via tail clips. Blood glucose concentrations were measured using AlphaTRAK glucometers extended range (code 29 strips). Glucometer measurements were taken prior to any other in life activities and were performed in duplicate. If the values differed by more than 20 mg/dL (calculated glucometer value) a third value was recorded. Body mass measurements were collected on days 9 and 15. HbA1c and body mass values were used for block randomization. Animals were assigned to treatment groups (n = 8/group) and to new cages and cage mates (n=4 animals/cage) on day 15 according to block randomization results. The lean group was included in the study as an age-matched, healthy reference group.

### Dose Formulation and Dosing

[0331] Animals were either treated with a subcutaneous injection volume of 5 ml/kg of vehicle (sterile PBS), dulaglutide, SEQ ID NO: 8 or SEQ ID NO: 7 once on days 1, 8, 15, 22, and 27 of the dosing phase. Dosing was completed between 10:00 and 12:00 AM and was adjusted to the most recent body mass recording of each individual. Injection solutions including Trulicity (Dulaglutide Pen) were prepared by addition of sterile PBS to the stock solutions or Pen formulation in order to achieve the appropriate concentrations.

### Dosing Phase (36 Days)

[0332] 1) Blood glucose concentrations in morning-fed animals: Animals had unlimited access to water and feed during the experiment. Blood glucose was measured prior to any other in life activities between 10:00 to 12:00 AM on days 1, 2, 8, 9, 15, 16, 22, 23, 27, and 28 as well as 24 hours post-dose on days 2, 9, 16, 23, and 28. In addition, on days 1 and 22, blood was collected 1, 2, 3, 4, 6 and 24 hours post-dose (FIG. 11). Approximately 5 µL of blood were collected via tail clip, and blood glucose measurements were performed in duplicate using AlphaTRAK glucometers with the extended range (code 29 strips). If the values differed by more than 20 mg/dL (calculated glucose value), then a third value was recorded. The Area Under the Curve (AUC) was calculated by the trapezoid method for each individual and time period as indicated.

[0333] 2) HbA1c analysis: Blood was collected via a tail clip on day 9 of the pre-dose phase and day 36 of the dosing phase. Blood was collected into a 5 µL non-additive micro capillary tube and immediately placed into a centrifuge tube containing hemolysate. The tube was shaken vigorously to mix the hemolysate with the blood and placed on a rocker to ensure the blood and reagent were completely mixed. Plasma HbA1c levels at study start and after study termination are shown in FIG. 12.

[0334] Statistical analyses: Data are depicted as means±SEM. For statistical analyses a One Way Analysis of Variance (ANOVA) and multiple comparisons (Dunnett’s Method) were performed comparing the group of diabetic, obese db/db vehicle mice (n=8) with the group of diabetic, obese db/db test article treated mice (n=8). When the difference in the mean values of the two groups was greater than 0.05 they were considered statistically significantly different. Non-diabetic, lean-vehicle group data are depicted in FIGS. 11 and 12 and serve as a reference dataset for the non-obese, non-diabetic state.

[0335] In the animals treated with the fusion protein of SEQ ID NO: 8 or SEQ ID NO: 7, the lowering effect on blood glucose levels was significantly greater than in vehicle or dulaglutide treated animals (FIG. 11). The highest dose of the fusion protein of SEQ ID NO: 8 even lead to a reduction of blood glucose levels to normal non-diabetic animal levels over almost the whole 24 hour blood glucose profile measured on day 22 of treatment. In addition, animals treated with the fusion protein of SEQ ID NO: 8 or SEQ ID NO: 7 showed more pronounced suppression of HbA1c increase by the end of the study than vehicle or dulaglutide treated animals, as shown in FIG. 12.

### C.) DIO-NASH Mouse Model

### Animals and Experimental Set-Up

[0336] All animal experiments were conformed to international accepted principles for the care and use of laboratory animals.

[0337] Male C57BI/6J mice at 5 weeks of age were obtained from JanVier (JanVier labs, France), and each group housed 5 animals per cage under a 12/12 hour dark-light cycle. Room temperature was controlled to 22° C. ± 1° C., with 50% ± 10% humidity. Animals had ad libitum access to diet high in fat (40%, of these 18% trans-fat), 40% carbohydrates (20% fructose) and 2% cholesterol (D09100301, Research Diet, United States) previously described as the AMLN diet (Clapper et al. (2013) Am J Physiol Gastrointest Liver Physiol 305:G483-G495), or regular rodent chow (Altromin 1324, Brogaarden, Denmark), and tap water (lean chow, n = 10-12). After 26 weeks, liver biopsies were performed for histological assessment of individual fibrosis and steatosis staging at baseline.

[0338] Mice were pre-treated with enrofloxazin (Bayer, Germany) (5 mg/mL / 1 mL/kg) one day before being biopsied. Prior to biopsy, mice were anesthetized with isoflurane (2%-3%) in 100% oxygen. A small abdominal incision in the midline was made and the left lateral lobe of the liver was exposed. A cone shaped wedge of liver tissue (50-100 mg) was excised from the distal portion of the lobe fixed in 4% paraformaldehyde for histology. The biopsy procedure previously described by Clapper et al. was refined using electrocoagulation of the cut surface of the liver by means of bipolar coagulation using ERBE VIO 100C electrosurgical unit (ERBE, United States). The liver was returned to the abdominal cavity, abdominal wall was sutured and skin stapled. Carprofen (Pfizer, United States) (5 mg/mL-0.01 mL/10 g) and enrofloxazin (5 mg/mL-1 mL/kg) were administered intraperitoneal at the time of surgery and at post-operation day one and two, to control postoperative pain relief and infection, respectively. Following biopsy procedure, animals were single housed and kept on AMLN diet for 3 weeks to recover. Stratification and randomization into study groups of 10-12 animals was based on individual disease staging as assessed by baseline liver biopsies.

[0339] Animals were then treated with 50 mg/kg GLP-1RA/FGF21 Fc fusion protein, 0.6 mg/kg dulaglutide, or vehicle (PBS) once-weekly subcutaneously injections for further 8 weeks either on AMLN diet or chow diet. Subsequently, animals were euthanized, liver weights were determined, and liver tissues collected for histological and biochemical analyses (see FIG. 13).

### Histology Assessment and Digital Image Analysis

[0340] Baseline liver biopsy and terminal samples were collected from the left lateral lobe (about 100 mg) and fixed overnight in 4% paraformaldehyde. Liver tissue was paraffin embedded and sectioned (3 µm thickness). To assess hepatic morphology and fibrosis, sections were stained with Hematoxylin and Eosin and Sirius Red, respectively, followed by analysis with Visiomorph software (Visiopharm, Denmark). Histological assessment and scoring was performed by a pathologist blinded to the study. NAFLD activity score (NAS) (steatosis, inflammation, ballooning degeneration) and fibrosis stage were performed using the clinical criteria outlined by Kleiner et al. (2005) Hepatology 41: 1313-1321. Data are presented in two different formats in FIG. 14 and FIG. 15.

[0341] The fusion protein of SEQ ID NO: 8 clearly showed effects on liver weight, liver total lipid content, liver cholesterol and triglyceride content and NAFLD activity score, which were superior to those of GLP-1 agonism alone, the latter being exemplified by the effect of dulaglutide.

The application's sequence listing, which the Patent Office published only in electronic form, follows.

SEQUENCE LISTING (4079 sequences)

SEQ ID NO: 1 - protein, 471 aa, Artificial Sequence
  Fusion Protein
HGEGTFTSDLSKQLEEERVQLFIEWLKATGPSSGAPPPSGGGGGGGSGGGGSGGGGSADKTHTCPPCPAPEAAGGPSVFLFPPKPKDTLMISRTPEVTCVVVDVSHEDPEVKFNWYVDGVEVHNAKTKPREEQYNSTYRVVSVLTVLHQDWLNGKEYKCKVSNKALPAPIEKTISKAKGQPREPQVYTLPPSRDELTKNQVSLTCLVKGFYPSDIAVEWESNGQPENNYKTTPPVLDSDGSFFLYSKLTVDKSRWQQGNVFSCSVMHEALHNHYTQKSLSLSPGGGGSGSAHPIPDSSPLLQFGGQVRQRYLYTDDACQTEAHLEIREDGTVGGAADQSPESLLQLKALKPGVIQILGVKTSRFLCQRPDGALYGSLHFDPEACSFRELLLEDGYNVYQSEAHGLPLHLPGCKSPHRDPAPRGPARFLPLPGLPPAPPEPPGILAPQPPDVGSSDPLSMVGSQGRSPSYAS

SEQ ID NO: 2 - protein, 472 aa, Artificial Sequence
  Fusion Protein
HGEGTFTSDLSKQLEEERVQLFIEWLKATGPSSGAPPPSGGGGGGGSGGGGSGGGGSADKTHTCPPCPAPEAAGGPSVFLFPPKPKDTLMISRTPEVTCVVVDVSHEDPEVKFNWYVDGVEVHNAKTKPREEQYNSTYRVVSVLTVLHQDWLNGKEYKCKVSNKALPAPIEKTISKAKGQPREPQVYTLPPSRDELTKNQVSLTCLVKGFYPSDIAVEWESNGQPENNYKTTPPVLDSDGSFFLYSKLTVDKSRWQQGNVFSCSVMHEALHNHYTQKSLSLSPGGGGSGSAHPIPDSSPLLQFGGQVRQRYLYTDDACQTEAHLEIREDGTVGGAADQSPESLLQLKALKPGVIQILGVKTSRFLCQRPDGALYGSLHFDPEACSFRELLLEDGYNVYQSEAHGLPLHLPGCKSPHRDPAPRGPARFLPLPGLPPAPPEPPGILAPQPPDVGSSDPLSMVYPSQGRSPSYAS

SEQ ID NO: 3 - protein, 472 aa, Artificial Sequence
  Fusion Protein
GHGEGTFTSDKSKQLEEEAVRLFIEWLKAGGPKKIRYSGGGGGGGSGGGGSGGGGSAESKYGPPCPPCPAPEFEGGPSVFLFPPKPKDTLMISRTPEVTCVVVDVSQEDPEVQFNWYVDGVEVHNAKTKPREEQFNSTYRVVSVLTVLHQDWLNGKEYKCKVSNKGLPSSIEKTISKAKGQPREPQVYTLPPSQEEMTKNQVSLTCLVKGFYPSDIAVEWESNGQPENNYKTTPPVLDSDGSFFLYSRLTVDKSRWQEGNVFSCSVMHEALHNHYTQKSLSLSLGGGGSGSAHPIPDSSPLLQFGGQVRQRYLYTDDACQTEAHLEIREDGTVGGAADQSPESLLQLKALKPGVIQILGVKTSRFLCQRPDGALYGSLHFDPEACSFRELLLEDGYNVYQSEAHGLPLHLPGCKSPHRDPAPRGPARFLPLPGLPPAPPEPPGILAPQPPDVGSSDPLSMVGSQGRSPSYAS

SEQ ID NO: 4 - protein, 473 aa, Artificial Sequence
  Fusion Protein
HGEGTFTSDLSKQLEEERVQLFIEWLKATGPSSGAPPPSGGGGGGGSGGGGSGGGGSAESKYGPPCPPCPAPEFEGGPSVFLFPPKPKDTLMISRTPEVTCVVVDVSQEDPEVQFNWYVDGVEVHNAKTKPREEQFNSTYRVVSVLTVLHQDWLNGKEYKCKVSNKGLPSSIEKTISKAKGQPREPQVYTLPPSQEEMTKNQVSLTCLVKGFYPSDIAVEWESNGQPENNYKTTPPVLDSDGSFFLYSRLTVDKSRWQEGNVFSCSVMHEALHNHYTQKSLSLSLGGGGSGSAHPIPDSSPLLQFGGQVRQRYLYTDDACQTEAHLEIREDGTVGGAADQSPESLLQLKALKPGVIQILGVKTSRFLCQRPDGALYGSLHFDPEACSFRELLLEDGYNVYQSEAHGLPLHLPGCKSPHRDPAPRGPARFLPLPGLPPAPPEPPGILAPQPPDVGSSDPLSMVGSQGRSPSYAS

SEQ ID NO: 5 - protein, 473 aa, Artificial Sequence
  Fusion Protein
GHGEGTFTSDKSKQLEEEAVRLFIEWLKAGGPKKIRYSGGGGGGGSGGGGSGGGGSAESKYGPPCPPCPAPEFEGGPSVFLFPPKPKDTLMISRTPEVTCVVVDVSQEDPEVQFNWYVDGVEVHNAKTKPREEQFNSTYRVVSVLTVLHQDWLNGKEYKCKVSNKGLPSSIEKTISKAKGQPREPQVYTLPPSQEEMTKNQVSLTCLVKGFYPSDIAVEWESNGQPENNYKTTPPVLDSDGSFFLYSRLTVDKSRWQEGNVFSCSVMHEALHNHYTQKSLSLSLGGGGSGSAHPIPDSSPLLQFGGQVRQRYLYTDDACQTEAHLEIREDGTVGGAADQSPESLLQLKALKPGVIQILGVKTSRFLCQRPDGALYGSLHFDPEACSFRELLLEDGYNVYQSEAHGLPLHLPGCKSPHRDPAPRGPARFLPLPGLPPAPPEPPGILAPQPPDVGSSDPLSMVYPSQGRSPSYAS

SEQ ID NO: 6 - protein, 474 aa, Artificial Sequence
  Fusion Protein
HGEGTFTSDLSKQLEEERVQLFIEWLKATGPSSGAPPPSGGGGGGGSGGGGSGGGGSAESKYGPPCPPCPAPEFEGGPSVFLFPPKPKDTLMISRTPEVTCVVVDVSQEDPEVQFNWYVDGVEVHNAKTKPREEQFNSTYRVVSVLTVLHQDWLNGKEYKCKVSNKGLPSSIEKTISKAKGQPREPQVYTLPPSQEEMTKNQVSLTCLVKGFYPSDIAVEWESNGQPENNYKTTPPVLDSDGSFFLYSRLTVDKSRWQEGNVFSCSVMHEALHNHYTQKSLSLSLGGGGSGSAHPIPDSSPLLQFGGQVRQRYLYTDDACQTEAHLEIREDGTVGGAADQSPESLLQLKALKPGVIQILGVKTSRFLCQRPDGALYGSLHFDPEACSFRELLLEDGYNVYQSEAHGLPLHLPGCKSPHRDPAPRGPARFLPLPGLPPAPPEPPGILAPQPPDVGSSDPLSMVYPSQGRSPSYAS

SEQ ID NO: 7 - protein, 470 aa, Artificial Sequence
  Fusion Protein
GHGEGTFTSDKSKQLEEEAVRLFIEWLKAGGPKKIRYSGGGGGGGSGGGGSGGGGSADKTHTCPPCPAPEAAGGPSVFLFPPKPKDTLMISRTPEVTCVVVDVSHEDPEVKFNWYVDGVEVHNAKTKPREEQYNSTYRVVSVLTVLHQDWLNGKEYKCKVSNKALPAPIEKTISKAKGQPREPQVYTLPPSRDELTKNQVSLTCLVKGFYPSDIAVEWESNGQPENNYKTTPPVLDSDGSFFLYSKLTVDKSRWQQGNVFSCSVMHEALHNHYTQKSLSLSPGGGGSGSAHPIPDSSPLLQFGGQVRQRYLYTDDACQTEAHLEIREDGTVGGAADQSPESLLQLKALKPGVIQILGVKTSRFLCQRPDGALYGSLHFDPEACSFRELLLEDGYNVYQSEAHGLPLHLPGCKSPHRDPAPRGPARFLPLPGLPPAPPEPPGILAPQPPDVGSSDPLSMVGSQGRSPSYAS

SEQ ID NO: 8 - protein, 471 aa, Artificial Sequence
  Fusion Protein
GHGEGTFTSDKSKQLEEEAVRLFIEWLKAGGPKKIRYSGGGGGGGSGGGGSGGGGSADKTHTCPPCPAPEAAGGPSVFLFPPKPKDTLMISRTPEVTCVVVDVSHEDPEVKFNWYVDGVEVHNAKTKPREEQYNSTYRVVSVLTVLHQDWLNGKEYKCKVSNKALPAPIEKTISKAKGQPREPQVYTLPPSRDELTKNQVSLTCLVKGFYPSDIAVEWESNGQPENNYKTTPPVLDSDGSFFLYSKLTVDKSRWQQGNVFSCSVMHEALHNHYTQKSLSLSPGGGGSGSAHPIPDSSPLLQFGGQVRQRYLYTDDACQTEAHLEIREDGTVGGAADQSPESLLQLKALKPGVIQILGVKTSRFLCQRPDGALYGSLHFDPEACSFRELLLEDGYNVYQSEAHGLPLHLPGCKSPHRDPAPRGPARFLPLPGLPPAPPEPPGILAPQPPDVGSSDPLSMVYPSQGRSPSYAS

SEQ ID NO: 9 - protein, 467 aa, Artificial Sequence
  Fusion Protein
HGEGTFTSDLSKQMEEEAVRLFIEWLKNGGPSSGAPPPSESKYGPPCPPCPAPEFEGGPSVFLFPPKPKDTLMISRTPEVTCVVVDVSQEDPEVQFNWYVDGVEVHNAKTKPREEQFNSTYRVVSVLTVLHQDWLNGKEYKCKVSNKGLPSSIEKTISKAKGQPREPQVYTLPPSQEEMTKNQVSLTCLVKGFYPSDIAVEWESNGQPENNYKTTPPVLDSDGSFFLYSRLTVDKSRWQEGNVFSCSVMHEALHNHYTQKSLSLSLGGGGGGGGSGGGGSGGGGSAHPIPDSSPLLQFGGQVRQRYLYTDDAQQTEAHLEIREDGTVGGAADQSPESLLQLKALKPGVIQILGVKTSRFLCQRPDGALYGSLHFDPEACSFRELLLEDGYNVYQSEAHGLPLHLPGNKSPHRDPAPRGPARFLPLPGLPPAPPEPPGILAPQPPDVGSSDPLSMVGPSQGRSPSYAS

SEQ ID NO: 10 - protein, 463 aa, Artificial Sequence
  Fusion Protein
HGEGTFTSDLSKQMEEEAVRLFIEWLKNGGPSSGAPPPSESKYGPPCPPCPAPEFEGGPSVFLFPPKPKDTLMISRTPEVTCVVVDVSQEDPEVQFNWYVDGVEVHNAKTKPREEQFNSTYRVVSVLTVLHQDWLNGKEYKCKVSNKGLPSSIEKTISKAKGQPREPQVYTLPPSQEEMTKNQVSLTCLVKGFYPSDIAVEWESNGQPENNYKTTPPVLDSDGSFFLYSRLTVDKSRWQEGNVFSCSVMHEALHNHYTQKSLSLSLGGGGSGGGGSGGGGSAHPIPDSSPLLQFGGQVRQRYLYTDDAQQTEAHLEIREDGTVGGAADQSPESLLQLKALKPGVIQILGVKTSRFLCQRPDGALYGSLHFDPEACSFRELLLEDGYNVYQSEAHGLPLHLPGNKSPHRDPAPRGPARFLPLPGLPPAPPEPPGILAPQPPDVGSSDPLSMVGPSQGRSPSYAS

SEQ ID NO: 11 - protein, 459 aa, Artificial Sequence
  Fusion Protein
HGEGTFTSDLSKQMEEEAVRLFIEWLKNGGPSSGAPPPSESKYGPPCPPCPAPEFEGGPSVFLFPPKPKDTLMISRTPEVTCVVVDVSQEDPEVQFNWYVDGVEVHNAKTKPREEQFNSTYRVVSVLTVLHQDWLNGKEYKCKVSNKGLPSSIEKTISKAKGQPREPQVYTLPPSQEEMTKNQVSLTCLVKGFYPSDIAVEWESNGQPENNYKTTPPVLDSDGSFFLYSRLTVDKSRWQEGNVFSCSVMHEALHNHYTQKSLSLSLGGGGSGGSGGSAHPIPDSSPLLQFGGQVRQRYLYTDDAQQTEAHLEIREDGTVGGAADQSPESLLQLKALKPGVIQILGVKTSRFLCQRPDGALYGSLHFDPEACSFRELLLEDGYNVYQSEAHGLPLHLPGNKSPHRDPAPRGPARFLPLPGLPPAPPEPPGILAPQPPDVGSSDPLSMVGPSQGRSPSYAS

SEQ ID NO: 12 - protein, 455 aa, Artificial Sequence
  Fusion Protein
HGEGTFTSDLSKQMEEEAVRLFIEWLKNGGPSSGAPPPSESKYGPPCPPCPAPEFEGGPSVFLFPPKPKDTLMISRTPEVTCVVVDVSQEDPEVQFNWYVDGVEVHNAKTKPREEQFNSTYRVVSVLTVLHQDWLNGKEYKCKVSNKGLPSSIEKTISKAKGQPREPQVYTLPPSQEEMTKNQVSLTCLVKGFYPSDIAVEWESNGQPENNYKTTPPVLDSDGSFFLYSRLTVDKSRWQEGNVFSCSVMHEALHNHYTQKSLSLSLGGGGSGSAHPIPDSSPLLQFGGQVRQRYLYTDDAQQTEAHLEIREDGTVGGAADQSPESLLQLKALKPGVIQILGVKTSRFLCQRPDGALYGSLHFDPEACSFRELLLEDGYNVYQSEAHGLPLHLPGNKSPHRDPAPRGPARFLPLPGLPPAPPEPPGILAPQPPDVGSSDPLSMVGPSQGRSPSYAS

SEQ ID NO: 13 - protein, 462 aa, Artificial Sequence
  Fusion Protein
HGEGTFTSDLSKQMEEEAVRLFIEWLKNGGPSSGAPPPSGGGSGSAESKYGPPCPPCPAPEFEGGPSVFLFPPKPKDTLMISRTPEVTCVVVDVSQEDPEVQFNWYVDGVEVHNAKTKPREEQFNSTYRVVSVLTVLHQDWLNGKEYKCKVSNKGLPSSIEKTISKAKGQPREPQVYTLPPSQEEMTKNQVSLTCLVKGFYPSDIAVEWESNGQPENNYKTTPPVLDSDGSFFLYSRLTVDKSRWQEGNVFSCSVMHEALHNHYTQKSLSLSLGGGGSGSAHPIPDSSPLLQFGGQVRQRYLYTDDAQQTEAHLEIREDGTVGGAADQSPESLLQLKALKPGVIQILGVKTSRFLCQRPDGALYGSLHFDPEACSFRELLLEDGYNVYQSEAHGLPLHLPGNKSPHRDPAPRGPARFLPLPGLPPAPPEPPGILAPQPPDVGSSDPLSMVGPSQGRSPSYAS

SEQ ID NO: 14 - protein, 466 aa, Artificial Sequence
  Fusion Protein
HGEGTFTSDLSKQMEEEAVRLFIEWLKNGGPSSGAPPPSGGGSGGSGGSAESKYGPPCPPCPAPEFEGGPSVFLFPPKPKDTLMISRTPEVTCVVVDVSQEDPEVQFNWYVDGVEVHNAKTKPREEQFNSTYRVVSVLTVLHQDWLNGKEYKCKVSNKGLPSSIEKTISKAKGQPREPQVYTLPPSQEEMTKNQVSLTCLVKGFYPSDIAVEWESNGQPENNYKTTPPVLDSDGSFFLYSRLTVDKSRWQEGNVFSCSVMHEALHNHYTQKSLSLSLGGGGSGSAHPIPDSSPLLQFGGQVRQRYLYTDDAQQTEAHLEIREDGTVGGAADQSPESLLQLKALKPGVIQILGVKTSRFLCQRPDGALYGSLHFDPEACSFRELLLEDGYNVYQSEAHGLPLHLPGNKSPHRDPAPRGPARFLPLPGLPPAPPEPPGILAPQPPDVGSSDPLSMVGPSQGRSPSYAS

SEQ ID NO: 15 - protein, 470 aa, Artificial Sequence
  Fusion Protein
HGEGTFTSDLSKQMEEEAVRLFIEWLKNGGPSSGAPPPSGGGSGGGGSGGGGSAESKYGPPCPPCPAPEFEGGPSVFLFPPKPKDTLMISRTPEVTCVVVDVSQEDPEVQFNWYVDGVEVHNAKTKPREEQFNSTYRVVSVLTVLHQDWLNGKEYKCKVSNKGLPSSIEKTISKAKGQPREPQVYTLPPSQEEMTKNQVSLTCLVKGFYPSDIAVEWESNGQPENNYKTTPPVLDSDGSFFLYSRLTVDKSRWQEGNVFSCSVMHEALHNHYTQKSLSLSLGGGGSGSAHPIPDSSPLLQFGGQVRQRYLYTDDAQQTEAHLEIREDGTVGGAADQSPESLLQLKALKPGVIQILGVKTSRFLCQRPDGALYGSLHFDPEACSFRELLLEDGYNVYQSEAHGLPLHLPGNKSPHRDPAPRGPARFLPLPGLPPAPPEPPGILAPQPPDVGSSDPLSMVGPSQGRSPSYAS

SEQ ID NO: 16 - protein, 473 aa, Artificial Sequence
  Fusion Protein
HGEGTFTSDLSKQLEEERVQLFIEWLKATGPSSGAPPPSGGGGGGGSGGGGSGGGGSAESKYGPPCPPCPAPEFEGGPSVFLFPPKPKDTLMISRTPEVTCVVVDVSQEDPEVQFNWYVDGVEVHNAKTKPREEQFNSTYRVVSVLTVLHQDWLNGKEYKCKVSNKGLPSSIEKTISKAKGQPREPQVYTLPPSQEEMTKNQVSLTCLVKGFYPSDIAVEWESNGQPENNYKTTPPVLDSDGSFFLYSRLTVDKSRWQEGNVFSCSVMHEALHNHYTQKSLSLSLGGGGSGSAHPIPDSSPLLQFGGQVRQRYLYTDDACQTEAHLEIREDGTVGGAADQSPESLLQLKALKPGVIQILGVKTSRFLCQRPDGALYGSLHFDPEACSFRELLLEDGYNVYQSEAHGLPLHLCGNKSPHRDPAPRGPARFLPLPGLPPAPPEPPGILAPQPPDVGSSDPLSMVGSQGRSPSYAS

SEQ ID NO: 17 - protein, 474 aa, Artificial Sequence
  Fusion Protein
HGEGTFTSDLSKQLEEERVQLFIEWLKATGPSSGAPPPSGGGGGGGSGGGGSGGGGSAESKYGPPCPPCPAPEFEGGPSVFLFPPKPKDTLMISRTPEVTCVVVDVSQEDPEVQFNWYVDGVEVHNAKTKPREEQFNSTYRVVSVLTVLHQDWLNGKEYKCKVSNKGLPSSIEKTISKAKGQPREPQVYTLPPSQEEMTKNQVSLTCLVKGFYPSDIAVEWESNGQPENNYKTTPPVLDSDGSFFLYSRLTVDKSRWQEGNVFSCSVMHEALHNHYTQKSLSLSLGGGGSGSAHPIPDSSPLLQFGGQVRQRYLYTDDACQTEAHLEIREDGTVGGAADQSPESLLQLKALKPGVIQILGVKTSRFLCQRPDGALYGSLHFDPEACSFRELLLEDGYNVYQSEAHGLPLHLCGNKSPHRDPAPRGPARFLPLPGLPPAPPEPPGILAPQPPDVGSSDPLSMVYPSQGRSPSYAS

SEQ ID NO: 18 - protein, 473 aa, Artificial Sequence
  Fusion Protein
HGEGTFTSDLSKQLEEERVQEFIEWLKAGGPSSGAPPPSGGGGGGGSGGGGSGGGGSAESKYGPPCPPCPAPEFEGGPSVFLFPPKPKDTLMISRTPEVTCVVVDVSQEDPEVQFNWYVDGVEVHNAKTKPREEQFNSTYRVVSVLTVLHQDWLNGKEYKCKVSNKGLPSSIEKTISKAKGQPREPQVYTLPPSQEEMTKNQVSLTCLVKGFYPSDIAVEWESNGQPENNYKTTPPVLDSDGSFFLYSRLTVDKSRWQEGNVFSCSVMHEALHNHYTQKSLSLSLGGGGSGSAHPIPDSSPLLQFGGQVRQRYLYTDDACQTEAHLEIREDGTVGGAADQSPESLLQLKALKPGVIQILGVKTSRFLCQRPDGALYGSLHFDPEACSFRELLLEDGYNVYQSEAHGLPLHLCGNKSPHRDPAPRGPARFLPLPGLPPAPPEPPGILAPQPPDVGSSDPLSMVGSQGRSPSYAS

SEQ ID NO: 19 - protein, 474 aa, Artificial Sequence
  Fusion Protein
HGEGTFTSDLSKQLEEERVQEFIEWLKAGGPSSGAPPPSGGGGGGGSGGGGSGGGGSAESKYGPPCPPCPAPEFEGGPSVFLFPPKPKDTLMISRTPEVTCVVVDVSQEDPEVQFNWYVDGVEVHNAKTKPREEQFNSTYRVVSVLTVLHQDWLNGKEYKCKVSNKGLPSSIEKTISKAKGQPREPQVYTLPPSQEEMTKNQVSLTCLVKGFYPSDIAVEWESNGQPENNYKTTPPVLDSDGSFFLYSRLTVDKSRWQEGNVFSCSVMHEALHNHYTQKSLSLSLGGGGSGSAHPIPDSSPLLQFGGQVRQRYLYTDDACQTEAHLEIREDGTVGGAADQSPESLLQLKALKPGVIQILGVKTSRFLCQRPDGALYGSLHFDPEACSFRELLLEDGYNVYQSEAHGLPLHLCGNKSPHRDPAPRGPARFLPLPGLPPAPPEPPGILAPQPPDVGSSDPLSMVYPSQGRSPSYAS

SEQ ID NO: 20 - protein, 474 aa, Artificial Sequence
  Fusion Protein
HGEGTFTSDLSKQLEEERVQEFIEWLKAGGPSSGAPPPSGGGGGGGSGGGGSGGGGSAESKYGPPCPPCPAPEFEGGPSVFLFPPKPKDTLMISRTPEVTCVVVDVSQEDPEVQFNWYVDGVEVHNAKTKPREEQFNSTYRVVSVLTVLHQDWLNGKEYKCKVSNKGLPSSIEKTISKAKGQPREPQVYTLPPSQEEMTKNQVSLTCLVKGFYPSDIAVEWESNGQPENNYKTTPPVLDSDGSFFLYSRLTVDKSRWQEGNVFSCSVMHEALHNHYTQKSLSLSLGGGGSGSAHPIPDSSPLLQFGGQVRQRYLYTDDACQTEAHLEIREDGTVGGAADQSPESLLQLKALKPGVIQILGVKTSRFLCQRPDGALYGSLHFDPEACSFRELLLEDGYNVYQSEAHGLPLHLPGCKSPHRDPAPRGPARFLPLPGLPPAPPEPPGILAPQPPDVGSSDPLSMVYPSQGRSPSYAS

SEQ ID NO: 21 - protein, 473 aa, Artificial Sequence
  Fusion Protein
HGEGTFTSDLSIQLEEEAVQEFIEWLLATGPSSGAPPPSGGGGGGGSGGGGSGGGGSAESKYGPPCPPCPAPEFEGGPSVFLFPPKPKDTLMISRTPEVTCVVVDVSQEDPEVQFNWYVDGVEVHNAKTKPREEQFNSTYRVVSVLTVLHQDWLNGKEYKCKVSNKGLPSSIEKTISKAKGQPREPQVYTLPPSQEEMTKNQVSLTCLVKGFYPSDIAVEWESNGQPENNYKTTPPVLDSDGSFFLYSRLTVDKSRWQEGNVFSCSVMHEALHNHYTQKSLSLSLGGGGSGSAHPIPDSSPLLQFGGQVRQRYLYTDDACQTEAHLEIREDGTVGGAADQSPESLLQLKALKPGVIQILGVKTSRFLCQRPDGALYGSLHFDPEACSFRELLLEDGYNVYQSEAHGLPLHLCGNKSPHRDPAPRGPARFLPLPGLPPAPPEPPGILAPQPPDVGSSDPLSMVGSQGRSPSYAS

SEQ ID NO: 22 - protein, 474 aa, Artificial Sequence
  Fusion Protein
HGEGTFTSDLSIQLEEEAVQEFIEWLLATGPSSGAPPPSGGGGGGGSGGGGSGGGGSAESKYGPPCPPCPAPEFEGGPSVFLFPPKPKDTLMISRTPEVTCVVVDVSQEDPEVQFNWYVDGVEVHNAKTKPREEQFNSTYRVVSVLTVLHQDWLNGKEYKCKVSNKGLPSSIEKTISKAKGQPREPQVYTLPPSQEEMTKNQVSLTCLVKGFYPSDIAVEWESNGQPENNYKTTPPVLDSDGSFFLYSRLTVDKSRWQEGNVFSCSVMHEALHNHYTQKSLSLSLGGGGSGSAHPIPDSSPLLQFGGQVRQRYLYTDDACQTEAHLEIREDGTVGGAADQSPESLLQLKALKPGVIQILGVKTSRFLCQRPDGALYGSLHFDPEACSFRELLLEDGYNVYQSEAHGLPLHLCGNKSPHRDPAPRGPARFLPLPGLPPAPPEPPGILAPQPPDVGSSDPLSMVYPSQGRSPSYAS

SEQ ID NO: 23 - protein, 473 aa, Artificial Sequence
  Fusion Protein
HGEGTFTSDLSIQLEEEAVQEFIEWLLATGPSSGAPPPSGGGGGGGSGGGGSGGGGSAESKYGPPCPPCPAPEFEGGPSVFLFPPKPKDTLMISRTPEVTCVVVDVSQEDPEVQFNWYVDGVEVHNAKTKPREEQFNSTYRVVSVLTVLHQDWLNGKEYKCKVSNKGLPSSIEKTISKAKGQPREPQVYTLPPSQEEMTKNQVSLTCLVKGFYPSDIAVEWESNGQPENNYKTTPPVLDSDGSFFLYSRLTVDKSRWQEGNVFSCSVMHEALHNHYTQKSLSLSLGGGGSGSAHPIPDSSPLLQFGGQVRQRYLYTDDACQTEAHLEIREDGTVGGAADQSPESLLQLKALKPGVIQILGVKTSRFLCQRPDGALYGSLHFDPEACSFRELLLEDGYNVYQSEAHGLPLHLPGCKSPHRDPAPRGPARFLPLPGLPPAPPEPPGILAPQPPDVGSSDPLSMVGSQGRSPSYAS

SEQ ID NO: 24 - protein, 474 aa, Artificial Sequence
  Fusion Protein
HGEGTFTSDLSIQLEEEAVQEFIEWLLATGPSSGAPPPSGGGGGGGSGGGGSGGGGSAESKYGPPCPPCPAPEFEGGPSVFLFPPKPKDTLMISRTPEVTCVVVDVSQEDPEVQFNWYVDGVEVHNAKTKPREEQFNSTYRVVSVLTVLHQDWLNGKEYKCKVSNKGLPSSIEKTISKAKGQPREPQVYTLPPSQEEMTKNQVSLTCLVKGFYPSDIAVEWESNGQPENNYKTTPPVLDSDGSFFLYSRLTVDKSRWQEGNVFSCSVMHEALHNHYTQKSLSLSLGGGGSGSAHPIPDSSPLLQFGGQVRQRYLYTDDACQTEAHLEIREDGTVGGAADQSPESLLQLKALKPGVIQILGVKTSRFLCQRPDGALYGSLHFDPEACSFRELLLEDGYNVYQSEAHGLPLHLPGCKSPHRDPAPRGPARFLPLPGLPPAPPEPPGILAPQPPDVGSSDPLSMVYPSQGRSPSYAS

SEQ ID NO: 25 - protein, 473 aa, Artificial Sequence
  Fusion Protein
HGEGTFTSDLSILLDEEAVRLFIEWLLATGPVSGAPPPSGGGGGGGSGGGGSGGGGSAESKYGPPCPPCPAPEFEGGPSVFLFPPKPKDTLMISRTPEVTCVVVDVSQEDPEVQFNWYVDGVEVHNAKTKPREEQFNSTYRVVSVLTVLHQDWLNGKEYKCKVSNKGLPSSIEKTISKAKGQPREPQVYTLPPSQEEMTKNQVSLTCLVKGFYPSDIAVEWESNGQPENNYKTTPPVLDSDGSFFLYSRLTVDKSRWQEGNVFSCSVMHEALHNHYTQKSLSLSLGGGGSGSAHPIPDSSPLLQFGGQVRQRYLYTDDACQTEAHLEIREDGTVGGAADQSPESLLQLKALKPGVIQILGVKTSRFLCQRPDGALYGSLHFDPEACSFRELLLEDGYNVYQSEAHGLPLHLCGNKSPHRDPAPRGPARFLPLPGLPPAPPEPPGILAPQPPDVGSSDPLSMVGSQGRSPSYAS

SEQ ID NO: 26 - protein, 473 aa, Artificial Sequence
  Fusion Protein
HGEGTFTSDLSILLDEEAVRLFIEWLLATGPVSGAPPPSGGGGGGGSGGGGSGGGGSAESKYGPPCPPCPAPEFEGGPSVFLFPPKPKDTLMISRTPEVTCVVVDVSQEDPEVQFNWYVDGVEVHNAKTKPREEQFNSTYRVVSVLTVLHQDWLNGKEYKCKVSNKGLPSSIEKTISKAKGQPREPQVYTLPPSQEEMTKNQVSLTCLVKGFYPSDIAVEWESNGQPENNYKTTPPVLDSDGSFFLYSRLTVDKSRWQEGNVFSCSVMHEALHNHYTQKSLSLSLGGGGSGSAHPIPDSSPLLQFGGQVRQRYLYTDDACQTEAHLEIREDGTVGGAADQSPESLLQLKALKPGVIQILGVKTSRFLCQRPDGALYGSLHFDPEACSFRELLLEDGYNVYQSEAHGLPLHLPGCKSPHRDPAPRGPARFLPLPGLPPAPPEPPGILAPQPPDVGSSDPLSMVGSQGRSPSYAS

SEQ ID NO: 27 - protein, 474 aa, Artificial Sequence
  Fusion Protein
HGEGTFTSDLSILLDEEAVRLFIEWLLATGPVSGAPPPSGGGGGGGSGGGGSGGGGSAESKYGPPCPPCPAPEFEGGPSVFLFPPKPKDTLMISRTPEVTCVVVDVSQEDPEVQFNWYVDGVEVHNAKTKPREEQFNSTYRVVSVLTVLHQDWLNGKEYKCKVSNKGLPSSIEKTISKAKGQPREPQVYTLPPSQEEMTKNQVSLTCLVKGFYPSDIAVEWESNGQPENNYKTTPPVLDSDGSFFLYSRLTVDKSRWQEGNVFSCSVMHEALHNHYTQKSLSLSLGGGGSGSAHPIPDSSPLLQFGGQVRQRYLYTDDACQTEAHLEIREDGTVGGAADQSPESLLQLKALKPGVIQILGVKTSRFLCQRPDGALYGSLHFDPEACSFRELLLEDGYNVYQSEAHGLPLHLPGCKSPHRDPAPRGPARFLPLPGLPPAPPEPPGILAPQPPDVGSSDPLSMVYPSQGRSPSYAS

SEQ ID NO: 28 - protein, 473 aa, Artificial Sequence
  Fusion Protein
HGEGTFTSDLSILLDEEAVREFIEWLLATGPVSGAPPPSGGGGGGGSGGGGSGGGGSAESKYGPPCPPCPAPEFEGGPSVFLFPPKPKDTLMISRTPEVTCVVVDVSQEDPEVQFNWYVDGVEVHNAKTKPREEQFNSTYRVVSVLTVLHQDWLNGKEYKCKVSNKGLPSSIEKTISKAKGQPREPQVYTLPPSQEEMTKNQVSLTCLVKGFYPSDIAVEWESNGQPENNYKTTPPVLDSDGSFFLYSRLTVDKSRWQEGNVFSCSVMHEALHNHYTQKSLSLSLGGGGSGSAHPIPDSSPLLQFGGQVRQRYLYTDDACQTEAHLEIREDGTVGGAADQSPESLLQLKALKPGVIQILGVKTSRFLCQRPDGALYGSLHFDPEACSFRELLLEDGYNVYQSEAHGLPLHLCGNKSPHRDPAPRGPARFLPLPGLPPAPPEPPGILAPQPPDVGSSDPLSMVGSQGRSPSYAS

SEQ ID NO: 29 - protein, 474 aa, Artificial Sequence
  Fusion Protein
HGEGTFTSDLSILLDEEAVREFIEWLLATGPVSGAPPPSGGGGGGGSGGGGSGGGGSAESKYGPPCPPCPAPEFEGGPSVFLFPPKPKDTLMISRTPEVTCVVVDVSQEDPEVQFNWYVDGVEVHNAKTKPREEQFNSTYRVVSVLTVLHQDWLNGKEYKCKVSNKGLPSSIEKTISKAKGQPREPQVYTLPPSQEEMTKNQVSLTCLVKGFYPSDIAVEWESNGQPENNYKTTPPVLDSDGSFFLYSRLTVDKSRWQEGNVFSCSVMHEALHNHYTQKSLSLSLGGGGSGSAHPIPDSSPLLQFGGQVRQRYLYTDDACQTEAHLEIREDGTVGGAADQSPESLLQLKALKPGVIQILGVKTSRFLCQRPDGALYGSLHFDPEACSFRELLLEDGYNVYQSEAHGLPLHLCGNKSPHRDPAPRGPARFLPLPGLPPAPPEPPGILAPQPPDVGSSDPLSMVYPSQGRSPSYAS

SEQ ID NO: 30 - protein, 473 aa, Artificial Sequence
  Fusion Protein
HGEGTFTSDLSILLDEEAVREFIEWLLATGPVSGAPPPSGGGGGGGSGGGGSGGGGSAESKYGPPCPPCPAPEFEGGPSVFLFPPKPKDTLMISRTPEVTCVVVDVSQEDPEVQFNWYVDGVEVHNAKTKPREEQFNSTYRVVSVLTVLHQDWLNGKEYKCKVSNKGLPSSIEKTISKAKGQPREPQVYTLPPSQEEMTKNQVSLTCLVKGFYPSDIAVEWESNGQPENNYKTTPPVLDSDGSFFLYSRLTVDKSRWQEGNVFSCSVMHEALHNHYTQKSLSLSLGGGGSGSAHPIPDSSPLLQFGGQVRQRYLYTDDACQTEAHLEIREDGTVGGAADQSPESLLQLKALKPGVIQILGVKTSRFLCQRPDGALYGSLHFDPEACSFRELLLEDGYNVYQSEAHGLPLHLPGCKSPHRDPAPRGPARFLPLPGLPPAPPEPPGILAPQPPDVGSSDPLSMVGSQGRSPSYAS

SEQ ID NO: 31 - protein, 474 aa, Artificial Sequence
  Fusion Protein
HGEGTFTSDLSILLDEEAVREFIEWLLATGPVSGAPPPSGGGGGGGSGGGGSGGGGSAESKYGPPCPPCPAPEFEGGPSVFLFPPKPKDTLMISRTPEVTCVVVDVSQEDPEVQFNWYVDGVEVHNAKTKPREEQFNSTYRVVSVLTVLHQDWLNGKEYKCKVSNKGLPSSIEKTISKAKGQPREPQVYTLPPSQEEMTKNQVSLTCLVKGFYPSDIAVEWESNGQPENNYKTTPPVLDSDGSFFLYSRLTVDKSRWQEGNVFSCSVMHEALHNHYTQKSLSLSLGGGGSGSAHPIPDSSPLLQFGGQVRQRYLYTDDACQTEAHLEIREDGTVGGAADQSPESLLQLKALKPGVIQILGVKTSRFLCQRPDGALYGSLHFDPEACSFRELLLEDGYNVYQSEAHGLPLHLPGCKSPHRDPAPRGPARFLPLPGLPPAPPEPPGILAPQPPDVGSSDPLSMVYPSQGRSPSYAS

SEQ ID NO: 32 - protein, 472 aa, Artificial Sequence
  Fusion Protein
HGEGTFTSDLSKQMEEEAVRLFIEWLKNGGPSSGAPPPSGGGGGGGSGGGGSGGGGSADKTHTCPPCPAPEAAGGPSVFLFPPKPKDTLMISRTPEVTCVVVDVSHEDPEVKFNWYVDGVEVHNAKTKPREEQYNSTYRVVSVLTVLHQDWLNGKEYKCKVSNKALPAPIEKTISKAKGQPREPQVYTLPPSRDELTKNQVSLTCLVKGFYPSDIAVEWESNGQPENNYKTTPPVLDSDGSFFLYSKLTVDKSRWQQGNVFSCSVMHEALHNHYTQKSLSLSPGGGGSGSAHPIPDSSPLLQFGGQVRQRYLYTDDACQTEAHLEIREDGTVGGAADQSPESLLQLKALKPGVIQILGVKTSRFLCQRPDGALYGSLHFDPEACSFRELLLEDGYNVYQSEAHGLPLHLPGCKSPHRDPAPRGPARFLPLPGLPPAPPEPPGILAPQPPDVGSSDPLSMVYPSQGRSPSYAS

SEQ ID NO: 33 - protein, 471 aa, Artificial Sequence
  Fusion Protein
HGEGTFTSDLSKQLEEERVQLFIEWLKATGPSSGAPPPSGGGGGGGSGGGGSGGGGSADKTHTCPPCPAPEAAGGPSVFLFPPKPKDTLMISRTPEVTCVVVDVSHEDPEVKFNWYVDGVEVHNAKTKPREEQYNSTYRVVSVLTVLHQDWLNGKEYKCKVSNKALPAPIEKTISKAKGQPREPQVYTLPPSRDELTKNQVSLTCLVKGFYPSDIAVEWESNGQPENNYKTTPPVLDSDGSFFLYSKLTVDKSRWQQGNVFSCSVMHEALHNHYTQKSLSLSPGGGGSGSAHPIPDSSPLLQFGGQVRQRYLYTDDACQTEAHLEIREDGTVGGAADQSPESLLQLKALKPGVIQILGVKTSRFLCQRPDGALYGSLHFDPEACSFRELLLEDGYNVYQSEAHGLPLHLCGNKSPHRDPAPRGPARFLPLPGLPPAPPEPPGILAPQPPDVGSSDPLSMVGSQGRSPSYAS

SEQ ID NO: 34 - protein, 472 aa, Artificial Sequence
  Fusion Protein
HGEGTFTSDLSKQLEEERVQLFIEWLKATGPSSGAPPPSGGGGGGGSGGGGSGGGGSADKTHTCPPCPAPEAAGGPSVFLFPPKPKDTLMISRTPEVTCVVVDVSHEDPEVKFNWYVDGVEVHNAKTKPREEQYNSTYRVVSVLTVLHQDWLNGKEYKCKVSNKALPAPIEKTISKAKGQPREPQVYTLPPSRDELTKNQVSLTCLVKGFYPSDIAVEWESNGQPENNYKTTPPVLDSDGSFFLYSKLTVDKSRWQQGNVFSCSVMHEALHNHYTQKSLSLSPGGGGSGSAHPIPDSSPLLQFGGQVRQRYLYTDDACQTEAHLEIREDGTVGGAADQSPESLLQLKALKPGVIQILGVKTSRFLCQRPDGALYGSLHFDPEACSFRELLLEDGYNVYQSEAHGLPLHLCGNKSPHRDPAPRGPARFLPLPGLPPAPPEPPGILAPQPPDVGSSDPLSMVYPSQGRSPSYAS

SEQ ID NO: 35 - protein, 471 aa, Artificial Sequence
  Fusion Protein
HGEGTFTSDLSKQLEEERVQEFIEWLKAGGPSSGAPPPSGGGGGGGSGGGGSGGGGSADKTHTCPPCPAPEAAGGPSVFLFPPKPKDTLMISRTPEVTCVVVDVSHEDPEVKFNWYVDGVEVHNAKTKPREEQYNSTYRVVSVLTVLHQDWLNGKEYKCKVSNKALPAPIEKTISKAKGQPREPQVYTLPPSRDELTKNQVSLTCLVKGFYPSDIAVEWESNGQPENNYKTTPPVLDSDGSFFLYSKLTVDKSRWQQGNVFSCSVMHEALHNHYTQKSLSLSPGGGGSGSAHPIPDSSPLLQFGGQVRQRYLYTDDACQTEAHLEIREDGTVGGAADQSPESLLQLKALKPGVIQILGVKTSRFLCQRPDGALYGSLHFDPEACSFRELLLEDGYNVYQSEAHGLPLHLCGNKSPHRDPAPRGPARFLPLPGLPPAPPEPPGILAPQPPDVGSSDPLSMVGSQGRSPSYAS

SEQ ID NO: 36 - protein, 472 aa, Artificial Sequence
  Fusion Protein
HGEGTFTSDLSKQLEEERVQEFIEWLKAGGPSSGAPPPSGGGGGGGSGGGGSGGGGSADKTHTCPPCPAPEAAGGPSVFLFPPKPKDTLMISRTPEVTCVVVDVSHEDPEVKFNWYVDGVEVHNAKTKPREEQYNSTYRVVSVLTVLHQDWLNGKEYKCKVSNKALPAPIEKTISKAKGQPREPQVYTLPPSRDELTKNQVSLTCLVKGFYPSDIAVEWESNGQPENNYKTTPPVLDSDGSFFLYSKLTVDKSRWQQGNVFSCSVMHEALHNHYTQKSLSLSPGGGGSGSAHPIPDSSPLLQFGGQVRQRYLYTDDACQTEAHLEIREDGTVGGAADQSPESLLQLKALKPGVIQILGVKTSRFLCQRPDGALYGSLHFDPEACSFRELLLEDGYNVYQSEAHGLPLHLCGNKSPHRDPAPRGPARFLPLPGLPPAPPEPPGILAPQPPDVGSSDPLSMVYPSQGRSPSYAS

SEQ ID NO: 37 - protein, 471 aa, Artificial Sequence
  Fusion Protein
HGEGTFTSDLSKQLEEERVQEFIEWLKAGGPSSGAPPPSGGGGGGGSGGGGSGGGGSADKTHTCPPCPAPEAAGGPSVFLFPPKPKDTLMISRTPEVTCVVVDVSHEDPEVKFNWYVDGVEVHNAKTKPREEQYNSTYRVVSVLTVLHQDWLNGKEYKCKVSNKALPAPIEKTISKAKGQPREPQVYTLPPSRDELTKNQVSLTCLVKGFYPSDIAVEWESNGQPENNYKTTPPVLDSDGSFFLYSKLTVDKSRWQQGNVFSCSVMHEALHNHYTQKSLSLSPGGGGSGSAHPIPDSSPLLQFGGQVRQRYLYTDDACQTEAHLEIREDGTVGGAADQSPESLLQLKALKPGVIQILGVKTSRFLCQRPDGALYGSLHFDPEACSFRELLLEDGYNVYQSEAHGLPLHLPGCKSPHRDPAPRGPARFLPLPGLPPAPPEPPGILAPQPPDVGSSDPLSMVGSQGRSPSYAS

SEQ ID NO: 38 - protein, 471 aa, Artificial Sequence
  Fusion Protein
HGEGTFTSDLSKQLEEEAVQLFIEWLLATGPSSGAPPPSGGGGGGGSGGGGSGGGGSADKTHTCPPCPAPEAAGGPSVFLFPPKPKDTLMISRTPEVTCVVVDVSHEDPEVKFNWYVDGVEVHNAKTKPREEQYNSTYRVVSVLTVLHQDWLNGKEYKCKVSNKALPAPIEKTISKAKGQPREPQVYTLPPSRDELTKNQVSLTCLVKGFYPSDIAVEWESNGQPENNYKTTPPVLDSDGSFFLYSKLTVDKSRWQQGNVFSCSVMHEALHNHYTQKSLSLSPGGGGSGSAHPIPDSSPLLQFGGQVRQRYLYTDDACQTEAHLEIREDGTVGGAADQSPESLLQLKALKPGVIQILGVKTSRFLCQRPDGALYGSLHFDPEACSFRELLLEDGYNVYQSEAHGLPLHLPGCKSPHRDPAPRGPARFLPLPGLPPAPPEPPGILAPQPPDVGSSDPLSMVGSQGRSPSYAS

SEQ ID NO: 39 - protein, 471 aa, Artificial Sequence
  Fusion Protein
HGEGTFTSDLSIQLEEEAVQEFIEWLLATGPSSGAPPPSGGGGGGGSGGGGSGGGGSADKTHTCPPCPAPEAAGGPSVFLFPPKPKDTLMISRTPEVTCVVVDVSHEDPEVKFNWYVDGVEVHNAKTKPREEQYNSTYRVVSVLTVLHQDWLNGKEYKCKVSNKALPAPIEKTISKAKGQPREPQVYTLPPSRDELTKNQVSLTCLVKGFYPSDIAVEWESNGQPENNYKTTPPVLDSDGSFFLYSKLTVDKSRWQQGNVFSCSVMHEALHNHYTQKSLSLSPGGGGSGSAHPIPDSSPLLQFGGQVRQRYLYTDDACQTEAHLEIREDGTVGGAADQSPESLLQLKALKPGVIQILGVKTSRFLCQRPDGALYGSLHFDPEACSFRELLLEDGYNVYQSEAHGLPLHLPGCKSPHRDPAPRGPARFLPLPGLPPAPPEPPGILAPQPPDVGSSDPLSMVGSQGRSPSYAS

SEQ ID NO: 40 - protein, 472 aa, Artificial Sequence
  Fusion Protein
GHGEGTFTSDLSIQLEEEAVRLFIEWLLAGGPSSGAPPPSGGGGGGGSGGGGSGGGGSADKTHTCPPCPAPEAAGGPSVFLFPPKPKDTLMISRTPEVTCVVVDVSHEDPEVKFNWYVDGVEVHNAKTKPREEQYNSTYRVVSVLTVLHQDWLNGKEYKCKVSNKALPAPIEKTISKAKGQPREPQVYTLPPSRDELTKNQVSLTCLVKGFYPSDIAVEWESNGQPENNYKTTPPVLDSDGSFFLYSKLTVDKSRWQQGNVFSCSVMHEALHNHYTQKSLSLSPGGGGSGSAHPIPDSSPLLQFGGQVRQRYLYTDDACQTEAHLEIREDGTVGGAADQSPESLLQLKALKPGVIQILGVKTSRFLCQRPDGALYGSLHFDPEACSFRELLLEDGYNVYQSEAHGLPLHLPGCKSPHRDPAPRGPARFLPLPGLPPAPPEPPGILAPQPPDVGSSDPLSMVGSQGRSPSYAS

SEQ ID NO: 41 - protein, 472 aa, Artificial Sequence
  Fusion Protein
GHGEGTFTSDLSIQLEEEAVRLFIEWLLATGPSSGAPPPSGGGGGGGSGGGGSGGGGSADKTHTCPPCPAPEAAGGPSVFLFPPKPKDTLMISRTPEVTCVVVDVSHEDPEVKFNWYVDGVEVHNAKTKPREEQYNSTYRVVSVLTVLHQDWLNGKEYKCKVSNKALPAPIEKTISKAKGQPREPQVYTLPPSRDELTKNQVSLTCLVKGFYPSDIAVEWESNGQPENNYKTTPPVLDSDGSFFLYSKLTVDKSRWQQGNVFSCSVMHEALHNHYTQKSLSLSPGGGGSGSAHPIPDSSPLLQFGGQVRQRYLYTDDACQTEAHLEIREDGTVGGAADQSPESLLQLKALKPGVIQILGVKTSRFLCQRPDGALYGSLHFDPEACSFRELLLEDGYNVYQSEAHGLPLHLPGCKSPHRDPAPRGPARFLPLPGLPPAPPEPPGILAPQPPDVGSSDPLSMVGSQGRSPSYAS

SEQ ID NO: 42 - protein, 471 aa, Artificial Sequence
  Fusion Protein
HGEGTFTSDLSIQLDEEAVRLFIEWLLATGPVSGAPPPSGGGGGGGSGGGGSGGGGSADKTHTCPPCPAPEAAGGPSVFLFPPKPKDTLMISRTPEVTCVVVDVSHEDPEVKFNWYVDGVEVHNAKTKPREEQYNSTYRVVSVLTVLHQDWLNGKEYKCKVSNKALPAPIEKTISKAKGQPREPQVYTLPPSRDELTKNQVSLTCLVKGFYPSDIAVEWESNGQPENNYKTTPPVLDSDGSFFLYSKLTVDKSRWQQGNVFSCSVMHEALHNHYTQKSLSLSPGGGGSGSAHPIPDSSPLLQFGGQVRQRYLYTDDACQTEAHLEIREDGTVGGAADQSPESLLQLKALKPGVIQILGVKTSRFLCQRPDGALYGSLHFDPEACSFRELLLEDGYNVYQSEAHGLPLHLPGCKSPHRDPAPRGPARFLPLPGLPPAPPEPPGILAPQPPDVGSSDPLSMVGSQGRSPSYAS

SEQ ID NO: 43 - protein, 471 aa, Artificial Sequence
  Fusion Protein
HGEGTFTSDLSILLDEEAVRLFIEWLLATGPVSGAPPPSGGGGGGGSGGGGSGGGGSADKTHTCPPCPAPEAAGGPSVFLFPPKPKDTLMISRTPEVTCVVVDVSHEDPEVKFNWYVDGVEVHNAKTKPREEQYNSTYRVVSVLTVLHQDWLNGKEYKCKVSNKALPAPIEKTISKAKGQPREPQVYTLPPSRDELTKNQVSLTCLVKGFYPSDIAVEWESNGQPENNYKTTPPVLDSDGSFFLYSKLTVDKSRWQQGNVFSCSVMHEALHNHYTQKSLSLSPGGGGSGSAHPIPDSSPLLQFGGQVRQRYLYTDDACQTEAHLEIREDGTVGGAADQSPESLLQLKALKPGVIQILGVKTSRFLCQRPDGALYGSLHFDPEACSFRELLLEDGYNVYQSEAHGLPLHLPGCKSPHRDPAPRGPARFLPLPGLPPAPPEPPGILAPQPPDVGSSDPLSMVGSQGRSPSYAS

SEQ ID NO: 44 - protein, 471 aa, Artificial Sequence
  Fusion Protein
HGEGTFTSDLSIQLDEEAVRLFIEWLEATGPVSGAPPPSGGGGGGGSGGGGSGGGGSADKTHTCPPCPAPEAAGGPSVFLFPPKPKDTLMISRTPEVTCVVVDVSHEDPEVKFNWYVDGVEVHNAKTKPREEQYNSTYRVVSVLTVLHQDWLNGKEYKCKVSNKALPAPIEKTISKAKGQPREPQVYTLPPSRDELTKNQVSLTCLVKGFYPSDIAVEWESNGQPENNYKTTPPVLDSDGSFFLYSKLTVDKSRWQQGNVFSCSVMHEALHNHYTQKSLSLSPGGGGSGSAHPIPDSSPLLQFGGQVRQRYLYTDDACQTEAHLEIREDGTVGGAADQSPESLLQLKALKPGVIQILGVKTSRFLCQRPDGALYGSLHFDPEACSFRELLLEDGYNVYQSEAHGLPLHLPGCKSPHRDPAPRGPARFLPLPGLPPAPPEPPGILAPQPPDVGSSDPLSMVGSQGRSPSYAS

SEQ ID NO: 45 - protein, 472 aa, Artificial Sequence
  Fusion Protein
HGEGTFTSDLSIQLDEEAVRLFIEWLEATGPVSGAPPPSGGGGGGGSGGGGSGGGGSADKTHTCPPCPAPEAAGGPSVFLFPPKPKDTLMISRTPEVTCVVVDVSHEDPEVKFNWYVDGVEVHNAKTKPREEQYNSTYRVVSVLTVLHQDWLNGKEYKCKVSNKALPAPIEKTISKAKGQPREPQVYTLPPSRDELTKNQVSLTCLVKGFYPSDIAVEWESNGQPENNYKTTPPVLDSDGSFFLYSKLTVDKSRWQQGNVFSCSVMHEALHNHYTQKSLSLSPGGGGSGSAHPIPDSSPLLQFGGQVRQRYLYTDDACQTEAHLEIREDGTVGGAADQSPESLLQLKALKPGVIQILGVKTSRFLCQRPDGALYGSLHFDPEACSFRELLLEDGYNVYQSEAHGLPLHLPGCKSPHRDPAPRGPARFLPLPGLPPAPPEPPGILAPQPPDVGSSDPLSMVYPSQGRSPSYAS

SEQ ID NO: 46 - protein, 471 aa, Artificial Sequence
  Fusion Protein
HGEGTFTSDLSILLDEEAVREFIEWLLATGPVSGAPPPSGGGGGGGSGGGGSGGGGSADKTHTCPPCPAPEAAGGPSVFLFPPKPKDTLMISRTPEVTCVVVDVSHEDPEVKFNWYVDGVEVHNAKTKPREEQYNSTYRVVSVLTVLHQDWLNGKEYKCKVSNKALPAPIEKTISKAKGQPREPQVYTLPPSRDELTKNQVSLTCLVKGFYPSDIAVEWESNGQPENNYKTTPPVLDSDGSFFLYSKLTVDKSRWQQGNVFSCSVMHEALHNHYTQKSLSLSPGGGGSGSAHPIPDSSPLLQFGGQVRQRYLYTDDACQTEAHLEIREDGTVGGAADQSPESLLQLKALKPGVIQILGVKTSRFLCQRPDGALYGSLHFDPEACSFRELLLEDGYNVYQSEAHGLPLHLPGCKSPHRDPAPRGPARFLPLPGLPPAPPEPPGILAPQPPDVGSSDPLSMVGSQGRSPSYAS

SEQ ID NO: 47 - protein, 475 aa, Artificial Sequence
  Fusion Protein
HGEGTFTSDLSKQLEEEAVQLFIEWLLATGPSSGKPPPKSGGGGGGGSGGGGSGGGGSAESKYGPPCPPCPAPEFEGGPSVFLFPPKPKDTLMISRTPEVTCVVVDVSQEDPEVQFNWYVDGVEVHNAKTKPREEQFNSTYRVVSVLTVLHQDWLNGKEYKCKVSNKGLPSSIEKTISKAKGQPREPQVYTLPPSQEEMTKNQVSLTCLVKGFYPSDIAVEWESNGQPENNYKTTPPVLDSDGSFFLYSRLTVDKSRWQEGNVFSCSVMHEALHNHYTQKSLSLSLGGGGSGSAHPIPDSSPLLQFGGQVRQRYLYTDDACQTEAHLEIREDGTVGGAADQSPESLLQLKALKPGVIQILGVKTSRFLCQRPDGALYGSLHFDPEACSFRELLLEDGYNVYQSEAHGLPLHLPGCKSPHRDPAPRGPARFLPLPGLPPAPPEPPGILAPQPPDVGSSDPLSMVYPSQGRSPSYAS

SEQ ID NO: 48 - protein, 475 aa, Artificial Sequence
  Fusion Protein
HGEGTFTSDLSKQLEEEAVQLFIEWLLATGPSSGKPPPESGGGGGGGSGGGGSGGGGSAESKYGPPCPPCPAPEFEGGPSVFLFPPKPKDTLMISRTPEVTCVVVDVSQEDPEVQFNWYVDGVEVHNAKTKPREEQFNSTYRVVSVLTVLHQDWLNGKEYKCKVSNKGLPSSIEKTISKAKGQPREPQVYTLPPSQEEMTKNQVSLTCLVKGFYPSDIAVEWESNGQPENNYKTTPPVLDSDGSFFLYSRLTVDKSRWQEGNVFSCSVMHEALHNHYTQKSLSLSLGGGGSGSAHPIPDSSPLLQFGGQVRQRYLYTDDACQTEAHLEIREDGTVGGAADQSPESLLQLKALKPGVIQILGVKTSRFLCQRPDGALYGSLHFDPEACSFRELLLEDGYNVYQSEAHGLPLHLPGCKSPHRDPAPRGPARFLPLPGLPPAPPEPPGILAPQPPDVGSSDPLSMVYPSQGRSPSYAS

SEQ ID NO: 49 - protein, 475 aa, Artificial Sequence
  Fusion Protein
HGEGTFTSDLSKQLEEEAVQLFIEWLLATGPSSGEPPPKSGGGGGGGSGGGGSGGGGSAESKYGPPCPPCPAPEFEGGPSVFLFPPKPKDTLMISRTPEVTCVVVDVSQEDPEVQFNWYVDGVEVHNAKTKPREEQFNSTYRVVSVLTVLHQDWLNGKEYKCKVSNKGLPSSIEKTISKAKGQPREPQVYTLPPSQEEMTKNQVSLTCLVKGFYPSDIAVEWESNGQPENNYKTTPPVLDSDGSFFLYSRLTVDKSRWQEGNVFSCSVMHEALHNHYTQKSLSLSLGGGGSGSAHPIPDSSPLLQFGGQVRQRYLYTDDACQTEAHLEIREDGTVGGAADQSPESLLQLKALKPGVIQILGVKTSRFLCQRPDGALYGSLHFDPEACSFRELLLEDGYNVYQSEAHGLPLHLPGCKSPHRDPAPRGPARFLPLPGLPPAPPEPPGILAPQPPDVGSSDPLSMVYPSQGRSPSYAS

SEQ ID NO: 50 - protein, 474 aa, Artificial Sequence
  Fusion Protein
HGEGTFTSDLSKQLEEEAVQLFIEWLLATGPSSGKPPPKGGGGGGGSGGGGSGGGGSAESKYGPPCPPCPAPEFEGGPSVFLFPPKPKDTLMISRTPEVTCVVVDVSQEDPEVQFNWYVDGVEVHNAKTKPREEQFNSTYRVVSVLTVLHQDWLNGKEYKCKVSNKGLPSSIEKTISKAKGQPREPQVYTLPPSQEEMTKNQVSLTCLVKGFYPSDIAVEWESNGQPENNYKTTPPVLDSDGSFFLYSRLTVDKSRWQEGNVFSCSVMHEALHNHYTQKSLSLSLGGGGSGSAHPIPDSSPLLQFGGQVRQRYLYTDDACQTEAHLEIREDGTVGGAADQSPESLLQLKALKPGVIQILGVKTSRFLCQRPDGALYGSLHFDPEACSFRELLLEDGYNVYQSEAHGLPLHLPGCKSPHRDPAPRGPARFLPLPGLPPAPPEPPGILAPQPPDVGSSDPLSMVYPSQGRSPSYAS

SEQ ID NO: 51 - protein, 474 aa, Artificial Sequence
  Fusion Protein
HGEGTFTSDLSKQLEEEAVQLFIEWLLATGPSSGKPPPEGGGGGGGSGGGGSGGGGSAESKYGPPCPPCPAPEFEGGPSVFLFPPKPKDTLMISRTPEVTCVVVDVSQEDPEVQFNWYVDGVEVHNAKTKPREEQFNSTYRVVSVLTVLHQDWLNGKEYKCKVSNKGLPSSIEKTISKAKGQPREPQVYTLPPSQEEMTKNQVSLTCLVKGFYPSDIAVEWESNGQPENNYKTTPPVLDSDGSFFLYSRLTVDKSRWQEGNVFSCSVMHEALHNHYTQKSLSLSLGGGGSGSAHPIPDSSPLLQFGGQVRQRYLYTDDACQTEAHLEIREDGTVGGAADQSPESLLQLKALKPGVIQILGVKTSRFLCQRPDGALYGSLHFDPEACSFRELLLEDGYNVYQSEAHGLPLHLPGCKSPHRDPAPRGPARFLPLPGLPPAPPEPPGILAPQPPDVGSSDPLSMVYPSQGRSPSYAS

SEQ ID NO: 52 - protein, 474 aa, Artificial Sequence
  Fusion Protein
HGEGTFTSDLSKQLEEEAVQLFIEWLLATGPSSGEPPPKGGGGGGGSGGGGSGGGGSAESKYGPPCPPCPAPEFEGGPSVFLFPPKPKDTLMISRTPEVTCVVVDVSQEDPEVQFNWYVDGVEVHNAKTKPREEQFNSTYRVVSVLTVLHQDWLNGKEYKCKVSNKGLPSSIEKTISKAKGQPREPQVYTLPPSQEEMTKNQVSLTCLVKGFYPSDIAVEWESNGQPENNYKTTPPVLDSDGSFFLYSRLTVDKSRWQEGNVFSCSVMHEALHNHYTQKSLSLSLGGGGSGSAHPIPDSSPLLQFGGQVRQRYLYTDDACQTEAHLEIREDGTVGGAADQSPESLLQLKALKPGVIQILGVKTSRFLCQRPDGALYGSLHFDPEACSFRELLLEDGYNVYQSEAHGLPLHLPGCKSPHRDPAPRGPARFLPLPGLPPAPPEPPGILAPQPPDVGSSDPLSMVYPSQGRSPSYAS

SEQ ID NO: 53 - protein, 473 aa, Artificial Sequence
  Fusion Protein
HGEGTFTSDKSKQLDEQRAKEFIEWLKAGGHPSGKPPPKGGGGGGGSGGGGSGGGGSAESKYGPPCPPCPAPEFEGGPSVFLFPPKPKDTLMISRTPEVTCVVVDVSQEDPEVQFNWYVDGVEVHNAKTKPREEQFNSTYRVVSVLTVLHQDWLNGKEYKCKVSNKGLPSSIEKTISKAKGQPREPQVYTLPPSQEEMTKNQVSLTCLVKGFYPSDIAVEWESNGQPENNYKTTPPVLDSDGSFFLYSRLTVDKSRWQEGNVFSCSVMHEALHNHYTQKSLSLSLGGGGSGSAHPIPDSSPLLQFGGQVRQRYLYTDDACQTEAHLEIREDGTVGGAADQSPESLLQLKALKPGVIQILGVKTSRFLCQRPDGALYGSLHFDPEACSFRELLLEDGYNVYQSEAHGLPLHLPGCKSPHRDPAPRGPARFLPLPGLPPAPPEPPGILAPQPPDVGSSDPLSMVGSQGRSPSYAS

SEQ ID NO: 54 - protein, 474 aa, Artificial Sequence
  Fusion Protein
GHGEGTFTSDKSKQLEEEAVRLFIEWLKAGGHPSGKPPPKGGGGGGGSGGGGSGGGGSAESKYGPPCPPCPAPEFEGGPSVFLFPPKPKDTLMISRTPEVTCVVVDVSQEDPEVQFNWYVDGVEVHNAKTKPREEQFNSTYRVVSVLTVLHQDWLNGKEYKCKVSNKGLPSSIEKTISKAKGQPREPQVYTLPPSQEEMTKNQVSLTCLVKGFYPSDIAVEWESNGQPENNYKTTPPVLDSDGSFFLYSRLTVDKSRWQEGNVFSCSVMHEALHNHYTQKSLSLSLGGGGSGSAHPIPDSSPLLQFGGQVRQRYLYTDDACQTEAHLEIREDGTVGGAADQSPESLLQLKALKPGVIQILGVKTSRFLCQRPDGALYGSLHFDPEACSFRELLLEDGYNVYQSEAHGLPLHLPGCKSPHRDPAPRGPARFLPLPGLPPAPPEPPGILAPQPPDVGSSDPLSMVGSQGRSPSYAS

SEQ ID NO: 55 - protein, 474 aa, Artificial Sequence
  Fusion Protein
GHGEGTFTSDKSIQLEEEAVRLFIEWLLAGGHPSGKPPPKGGGGGGGSGGGGSGGGGSAESKYGPPCPPCPAPEFEGGPSVFLFPPKPKDTLMISRTPEVTCVVVDVSQEDPEVQFNWYVDGVEVHNAKTKPREEQFNSTYRVVSVLTVLHQDWLNGKEYKCKVSNKGLPSSIEKTISKAKGQPREPQVYTLPPSQEEMTKNQVSLTCLVKGFYPSDIAVEWESNGQPENNYKTTPPVLDSDGSFFLYSRLTVDKSRWQEGNVFSCSVMHEALHNHYTQKSLSLSLGGGGSGSAHPIPDSSPLLQFGGQVRQRYLYTDDACQTEAHLEIREDGTVGGAADQSPESLLQLKALKPGVIQILGVKTSRFLCQRPDGALYGSLHFDPEACSFRELLLEDGYNVYQSEAHGLPLHLPGCKSPHRDPAPRGPARFLPLPGLPPAPPEPPGILAPQPPDVGSSDPLSMVGSQGRSPSYAS

SEQ ID NO: 56 - protein, 474 aa, Artificial Sequence
  Fusion Protein
AHGEGTFTSDKSIQLEKEAVRLFIEWLLAGGHPSGKPPPKGGGGGGGSGGGGSGGGGSAESKYGPPCPPCPAPEFEGGPSVFLFPPKPKDTLMISRTPEVTCVVVDVSQEDPEVQFNWYVDGVEVHNAKTKPREEQFNSTYRVVSVLTVLHQDWLNGKEYKCKVSNKGLPSSIEKTISKAKGQPREPQVYTLPPSQEEMTKNQVSLTCLVKGFYPSDIAVEWESNGQPENNYKTTPPVLDSDGSFFLYSRLTVDKSRWQEGNVFSCSVMHEALHNHYTQKSLSLSLGGGGSGSAHPIPDSSPLLQFGGQVRQRYLYTDDACQTEAHLEIREDGTVGGAADQSPESLLQLKALKPGVIQILGVKTSRFLCQRPDGALYGSLHFDPEACSFRELLLEDGYNVYQSEAHGLPLHLPGCKSPHRDPAPRGPARFLPLPGLPPAPPEPPGILAPQPPDVGSSDPLSMVGSQGRSPSYAS

SEQ ID NO: 57 - protein, 473 aa, Artificial Sequence
  Fusion Protein
YGEGTFTSDKSQLLEKRLAHLFIEWLIAGGHSSGKPPPKGGGGGGGSGGGGSGGGGSAESKYGPPCPPCPAPEFEGGPSVFLFPPKPKDTLMISRTPEVTCVVVDVSQEDPEVQFNWYVDGVEVHNAKTKPREEQFNSTYRVVSVLTVLHQDWLNGKEYKCKVSNKGLPSSIEKTISKAKGQPREPQVYTLPPSQEEMTKNQVSLTCLVKGFYPSDIAVEWESNGQPENNYKTTPPVLDSDGSFFLYSRLTVDKSRWQEGNVFSCSVMHEALHNHYTQKSLSLSLGGGGSGSAHPIPDSSPLLQFGGQVRQRYLYTDDACQTEAHLEIREDGTVGGAADQSPESLLQLKALKPGVIQILGVKTSRFLCQRPDGALYGSLHFDPEACSFRELLLEDGYNVYQSEAHGLPLHLPGCKSPHRDPAPRGPARFLPLPGLPPAPPEPPGILAPQPPDVGSSDPLSMVGSQGRSPSYAS

SEQ ID NO: 58 - protein, 473 aa, Artificial Sequence
  Fusion Protein
YGEGTFTSDKSKLLEKRLVRLFIEWLIAGGHSSGKPPPKGGGGGGGSGGGGSGGGGSAESKYGPPCPPCPAPEFEGGPSVFLFPPKPKDTLMISRTPEVTCVVVDVSQEDPEVQFNWYVDGVEVHNAKTKPREEQFNSTYRVVSVLTVLHQDWLNGKEYKCKVSNKGLPSSIEKTISKAKGQPREPQVYTLPPSQEEMTKNQVSLTCLVKGFYPSDIAVEWESNGQPENNYKTTPPVLDSDGSFFLYSRLTVDKSRWQEGNVFSCSVMHEALHNHYTQKSLSLSLGGGGSGSAHPIPDSSPLLQFGGQVRQRYLYTDDACQTEAHLEIREDGTVGGAADQSPESLLQLKALKPGVIQILGVKTSRFLCQRPDGALYGSLHFDPEACSFRELLLEDGYNVYQSEAHGLPLHLPGCKSPHRDPAPRGPARFLPLPGLPPAPPEPPGILAPQPPDVGSSDPLSMVGSQGRSPSYAS

SEQ ID NO: 59 - protein, 473 aa, Artificial Sequence
  Fusion Protein
YGEGTFTSDKSKLLEKRLAHLFIEWLIAGGHSSGKPPPKGGGGGGGSGGGGSGGGGSAESKYGPPCPPCPAPEFEGGPSVFLFPPKPKDTLMISRTPEVTCVVVDVSQEDPEVQFNWYVDGVEVHNAKTKPREEQFNSTYRVVSVLTVLHQDWLNGKEYKCKVSNKGLPSSIEKTISKAKGQPREPQVYTLPPSQEEMTKNQVSLTCLVKGFYPSDIAVEWESNGQPENNYKTTPPVLDSDGSFFLYSRLTVDKSRWQEGNVFSCSVMHEALHNHYTQKSLSLSLGGGGSGSAHPIPDSSPLLQFGGQVRQRYLYTDDACQTEAHLEIREDGTVGGAADQSPESLLQLKALKPGVIQILGVKTSRFLCQRPDGALYGSLHFDPEACSFRELLLEDGYNVYQSEAHGLPLHLPGCKSPHRDPAPRGPARFLPLPGLPPAPPEPPGILAPQPPDVGSSDPLSMVGSQGRSPSYAS

SEQ ID NO: 60 - protein, 473 aa, Artificial Sequence
  Fusion Protein
YGEGTFTSDKSKQLEKRLVRLFIEWLIAGGHSSGKPPPKGGGGGGGSGGGGSGGGGSAESKYGPPCPPCPAPEFEGGPSVFLFPPKPKDTLMISRTPEVTCVVVDVSQEDPEVQFNWYVDGVEVHNAKTKPREEQFNSTYRVVSVLTVLHQDWLNGKEYKCKVSNKGLPSSIEKTISKAKGQPREPQVYTLPPSQEEMTKNQVSLTCLVKGFYPSDIAVEWESNGQPENNYKTTPPVLDSDGSFFLYSRLTVDKSRWQEGNVFSCSVMHEALHNHYTQKSLSLSLGGGGSGSAHPIPDSSPLLQFGGQVRQRYLYTDDACQTEAHLEIREDGTVGGAADQSPESLLQLKALKPGVIQILGVKTSRFLCQRPDGALYGSLHFDPEACSFRELLLEDGYNVYQSEAHGLPLHLPGCKSPHRDPAPRGPARFLPLPGLPPAPPEPPGILAPQPPDVGSSDPLSMVGSQGRSPSYAS

SEQ ID NO: 61 - protein, 473 aa, Artificial Sequence
  Fusion Protein
YGEGTFTSDKSKQLEKRLAHLFIEWLIAGGHSSGKPPPKGGGGGGGSGGGGSGGGGSAESKYGPPCPPCPAPEFEGGPSVFLFPPKPKDTLMISRTPEVTCVVVDVSQEDPEVQFNWYVDGVEVHNAKTKPREEQFNSTYRVVSVLTVLHQDWLNGKEYKCKVSNKGLPSSIEKTISKAKGQPREPQVYTLPPSQEEMTKNQVSLTCLVKGFYPSDIAVEWESNGQPENNYKTTPPVLDSDGSFFLYSRLTVDKSRWQEGNVFSCSVMHEALHNHYTQKSLSLSLGGGGSGSAHPIPDSSPLLQFGGQVRQRYLYTDDACQTEAHLEIREDGTVGGAADQSPESLLQLKALKPGVIQILGVKTSRFLCQRPDGALYGSLHFDPEACSFRELLLEDGYNVYQSEAHGLPLHLPGCKSPHRDPAPRGPARFLPLPGLPPAPPEPPGILAPQPPDVGSSDPLSMVGSQGRSPSYAS

SEQ ID NO: 62 - protein, 473 aa, Artificial Sequence
  Fusion Protein
YGEGTFTSDKSKQLEKRLVRLFIEWLIKGGHSSGKPPPKGGGGGGGSGGGGSGGGGSAESKYGPPCPPCPAPEFEGGPSVFLFPPKPKDTLMISRTPEVTCVVVDVSQEDPEVQFNWYVDGVEVHNAKTKPREEQFNSTYRVVSVLTVLHQDWLNGKEYKCKVSNKGLPSSIEKTISKAKGQPREPQVYTLPPSQEEMTKNQVSLTCLVKGFYPSDIAVEWESNGQPENNYKTTPPVLDSDGSFFLYSRLTVDKSRWQEGNVFSCSVMHEALHNHYTQKSLSLSLGGGGSGSAHPIPDSSPLLQFGGQVRQRYLYTDDACQTEAHLEIREDGTVGGAADQSPESLLQLKALKPGVIQILGVKTSRFLCQRPDGALYGSLHFDPEACSFRELLLEDGYNVYQSEAHGLPLHLPGCKSPHRDPAPRGPARFLPLPGLPPAPPEPPGILAPQPPDVGSSDPLSMVGSQGRSPSYAS

SEQ ID NO: 63 - protein, 473 aa, Artificial Sequence
  Fusion Protein
YGEGTFTSDKSKQLEKRLAHLFIEWLIKGGHSSGKPPPKGGGGGGGSGGGGSGGGGSAESKYGPPCPPCPAPEFEGGPSVFLFPPKPKDTLMISRTPEVTCVVVDVSQEDPEVQFNWYVDGVEVHNAKTKPREEQFNSTYRVVSVLTVLHQDWLNGKEYKCKVSNKGLPSSIEKTISKAKGQPREPQVYTLPPSQEEMTKNQVSLTCLVKGFYPSDIAVEWESNGQPENNYKTTPPVLDSDGSFFLYSRLTVDKSRWQEGNVFSCSVMHEALHNHYTQKSLSLSLGGGGSGSAHPIPDSSPLLQFGGQVRQRYLYTDDACQTEAHLEIREDGTVGGAADQSPESLLQLKALKPGVIQILGVKTSRFLCQRPDGALYGSLHFDPEACSFRELLLEDGYNVYQSEAHGLPLHLPGCKSPHRDPAPRGPARFLPLPGLPPAPPEPPGILAPQPPDVGSSDPLSMVGSQGRSPSYAS

SEQ ID NO: 64 - protein, 473 aa, Artificial Sequence
  Fusion Protein
HTEGTFTSDKSKQLEKRLVRLFIEWLIKGGHSSGKPPPKGGGGGGGSGGGGSGGGGSAESKYGPPCPPCPAPEFEGGPSVFLFPPKPKDTLMISRTPEVTCVVVDVSQEDPEVQFNWYVDGVEVHNAKTKPREEQFNSTYRVVSVLTVLHQDWLNGKEYKCKVSNKGLPSSIEKTISKAKGQPREPQVYTLPPSQEEMTKNQVSLTCLVKGFYPSDIAVEWESNGQPENNYKTTPPVLDSDGSFFLYSRLTVDKSRWQEGNVFSCSVMHEALHNHYTQKSLSLSLGGGGSGSAHPIPDSSPLLQFGGQVRQRYLYTDDACQTEAHLEIREDGTVGGAADQSPESLLQLKALKPGVIQILGVKTSRFLCQRPDGALYGSLHFDPEACSFRELLLEDGYNVYQSEAHGLPLHLPGCKSPHRDPAPRGPARFLPLPGLPPAPPEPPGILAPQPPDVGSSDPLSMVGSQGRSPSYAS

SEQ ID NO: 65 - protein, 473 aa, Artificial Sequence
  Fusion Protein
HGEGTFTSDKSKQLAKRLVRLFIEWLIKGGHSSGKPPPKGGGGGGGSGGGGSGGGGSAESKYGPPCPPCPAPEFEGGPSVFLFPPKPKDTLMISRTPEVTCVVVDVSQEDPEVQFNWYVDGVEVHNAKTKPREEQFNSTYRVVSVLTVLHQDWLNGKEYKCKVSNKGLPSSIEKTISKAKGQPREPQVYTLPPSQEEMTKNQVSLTCLVKGFYPSDIAVEWESNGQPENNYKTTPPVLDSDGSFFLYSRLTVDKSRWQEGNVFSCSVMHEALHNHYTQKSLSLSLGGGGSGSAHPIPDSSPLLQFGGQVRQRYLYTDDACQTEAHLEIREDGTVGGAADQSPESLLQLKALKPGVIQILGVKTSRFLCQRPDGALYGSLHFDPEACSFRELLLEDGYNVYQSEAHGLPLHLPGCKSPHRDPAPRGPARFLPLPGLPPAPPEPPGILAPQPPDVGSSDPLSMVGSQGRSPSYAS

SEQ ID NO: 66 - protein, 472 aa, Artificial Sequence
  Fusion Protein
GHGEGTFTSDKSKQLEEEAVRLFIEWLKAGGPKKQRLSGGGGGGGSGGGGSGGGGSAESKYGPPCPPCPAPEFEGGPSVFLFPPKPKDTLMISRTPEVTCVVVDVSQEDPEVQFNWYVDGVEVHNAKTKPREEQFNSTYRVVSVLTVLHQDWLNGKEYKCKVSNKGLPSSIEKTISKAKGQPREPQVYTLPPSQEEMTKNQVSLTCLVKGFYPSDIAVEWESNGQPENNYKTTPPVLDSDGSFFLYSRLTVDKSRWQEGNVFSCSVMHEALHNHYTQKSLSLSLGGGGSGSAHPIPDSSPLLQFGGQVRQRYLYTDDACQTEAHLEIREDGTVGGAADQSPESLLQLKALKPGVIQILGVKTSRFLCQRPDGALYGSLHFDPEACSFRELLLEDGYNVYQSEAHGLPLHLPGCKSPHRDPAPRGPARFLPLPGLPPAPPEPPGILAPQPPDVGSSDPLSMVGSQGRSPSYAS

SEQ ID NO: 67 - protein, 474 aa, Artificial Sequence
  Fusion Protein
GHGEGTFTSDLSIQLEEEAVRLFIEWLLAGGPSSGKPPPKGGGGGGGSGGGGSGGGGSAESKYGPPCPPCPAPEFEGGPSVFLFPPKPKDTLMISRTPEVTCVVVDVSQEDPEVQFNWYVDGVEVHNAKTKPREEQFNSTYRVVSVLTVLHQDWLNGKEYKCKVSNKGLPSSIEKTISKAKGQPREPQVYTLPPSQEEMTKNQVSLTCLVKGFYPSDIAVEWESNGQPENNYKTTPPVLDSDGSFFLYSRLTVDKSRWQEGNVFSCSVMHEALHNHYTQKSLSLSLGGGGSGSAHPIPDSSPLLQFGGQVRQRYLYTDDACQTEAHLEIREDGTVGGAADQSPESLLQLKALKPGVIQILGVKTSRFLCQRPDGALYGSLHFDPEACSFRELLLEDGYNVYQSEAHGLPLHLPGCKSPHRDPAPRGPARFLPLPGLPPAPPEPPGILAPQPPDVGSSDPLSMVGSQGRSPSYAS

SEQ ID NO: 68 - protein, 474 aa, Artificial Sequence
  Fusion Protein
GHGEGTFTSDLSIQLEEEAVRLFIEWLLAGGPSKGKPPPKGGGGGGGSGGGGSGGGGSAESKYGPPCPPCPAPEFEGGPSVFLFPPKPKDTLMISRTPEVTCVVVDVSQEDPEVQFNWYVDGVEVHNAKTKPREEQFNSTYRVVSVLTVLHQDWLNGKEYKCKVSNKGLPSSIEKTISKAKGQPREPQVYTLPPSQEEMTKNQVSLTCLVKGFYPSDIAVEWESNGQPENNYKTTPPVLDSDGSFFLYSRLTVDKSRWQEGNVFSCSVMHEALHNHYTQKSLSLSLGGGGSGSAHPIPDSSPLLQFGGQVRQRYLYTDDACQTEAHLEIREDGTVGGAADQSPESLLQLKALKPGVIQILGVKTSRFLCQRPDGALYGSLHFDPEACSFRELLLEDGYNVYQSEAHGLPLHLPGCKSPHRDPAPRGPARFLPLPGLPPAPPEPPGILAPQPPDVGSSDPLSMVGSQGRSPSYAS

SEQ ID NO: 69 - protein, 474 aa, Artificial Sequence
  Fusion Protein
GHGEGTFTSDLSIQLEEEAVRLFIEWLLAGGPSSGKPKPKGGGGGGGSGGGGSGGGGSAESKYGPPCPPCPAPEFEGGPSVFLFPPKPKDTLMISRTPEVTCVVVDVSQEDPEVQFNWYVDGVEVHNAKTKPREEQFNSTYRVVSVLTVLHQDWLNGKEYKCKVSNKGLPSSIEKTISKAKGQPREPQVYTLPPSQEEMTKNQVSLTCLVKGFYPSDIAVEWESNGQPENNYKTTPPVLDSDGSFFLYSRLTVDKSRWQEGNVFSCSVMHEALHNHYTQKSLSLSLGGGGSGSAHPIPDSSPLLQFGGQVRQRYLYTDDACQTEAHLEIREDGTVGGAADQSPESLLQLKALKPGVIQILGVKTSRFLCQRPDGALYGSLHFDPEACSFRELLLEDGYNVYQSEAHGLPLHLPGCKSPHRDPAPRGPARFLPLPGLPPAPPEPPGILAPQPPDVGSSDPLSMVGSQGRSPSYAS

SEQ ID NO: 70 - protein, 474 aa, Artificial Sequence
  Fusion Protein
GHGEGTFTSDLSIQLEEEAVRLFIEWLLAKGKSKGKPKPKGGGGGGGSGGGGSGGGGSAESKYGPPCPPCPAPEFEGGPSVFLFPPKPKDTLMISRTPEVTCVVVDVSQEDPEVQFNWYVDGVEVHNAKTKPREEQFNSTYRVVSVLTVLHQDWLNGKEYKCKVSNKGLPSSIEKTISKAKGQPREPQVYTLPPSQEEMTKNQVSLTCLVKGFYPSDIAVEWESNGQPENNYKTTPPVLDSDGSFFLYSRLTVDKSRWQEGNVFSCSVMHEALHNHYTQKSLSLSLGGGGSGSAHPIPDSSPLLQFGGQVRQRYLYTDDACQTEAHLEIREDGTVGGAADQSPESLLQLKALKPGVIQILGVKTSRFLCQRPDGALYGSLHFDPEACSFRELLLEDGYNVYQSEAHGLPLHLPGCKSPHRDPAPRGPARFLPLPGLPPAPPEPPGILAPQPPDVGSSDPLSMVGSQGRSPSYAS

SEQ ID NO: 71 - protein, 473 aa, Artificial Sequence
  Fusion Protein
FGEGTFTSDKSKQLEKRLVRLFIEWLIAGGHSSGKPPPKGGGGGGGSGGGGSGGGGSAESKYGPPCPPCPAPEFEGGPSVFLFPPKPKDTLMISRTPEVTCVVVDVSQEDPEVQFNWYVDGVEVHNAKTKPREEQFNSTYRVVSVLTVLHQDWLNGKEYKCKVSNKGLPSSIEKTISKAKGQPREPQVYTLPPSQEEMTKNQVSLTCLVKGFYPSDIAVEWESNGQPENNYKTTPPVLDSDGSFFLYSRLTVDKSRWQEGNVFSCSVMHEALHNHYTQKSLSLSLGGGGSGSAHPIPDSSPLLQFGGQVRQRYLYTDDACQTEAHLEIREDGTVGGAADQSPESLLQLKALKPGVIQILGVKTSRFLCQRPDGALYGSLHFDPEACSFRELLLEDGYNVYQSEAHGLPLHLPGCKSPHRDPAPRGPARFLPLPGLPPAPPEPPGILAPQPPDVGSSDPLSMVGSQGRSPSYAS

SEQ ID NO: 72 - protein, 473 aa, Artificial Sequence
  Fusion Protein
HGEGTFTSDKSKQLEKRLFRLFIEWLIAGGHSSGKPPPKGGGGGGGSGGGGSGGGGSAESKYGPPCPPCPAPEFEGGPSVFLFPPKPKDTLMISRTPEVTCVVVDVSQEDPEVQFNWYVDGVEVHNAKTKPREEQFNSTYRVVSVLTVLHQDWLNGKEYKCKVSNKGLPSSIEKTISKAKGQPREPQVYTLPPSQEEMTKNQVSLTCLVKGFYPSDIAVEWESNGQPENNYKTTPPVLDSDGSFFLYSRLTVDKSRWQEGNVFSCSVMHEALHNHYTQKSLSLSLGGGGSGSAHPIPDSSPLLQFGGQVRQRYLYTDDACQTEAHLEIREDGTVGGAADQSPESLLQLKALKPGVIQILGVKTSRFLCQRPDGALYGSLHFDPEACSFRELLLEDGYNVYQSEAHGLPLHLPGCKSPHRDPAPRGPARFLPLPGLPPAPPEPPGILAPQPPDVGSSDPLSMVGSQGRSPSYAS

SEQ ID NO: 73 - protein, 473 aa, Artificial Sequence
  Fusion Protein
HGEGTFTSDKSKQLEKRLVFLFIEWLIAGGHSSGKPPPKGGGGGGGSGGGGSGGGGSAESKYGPPCPPCPAPEFEGGPSVFLFPPKPKDTLMISRTPEVTCVVVDVSQEDPEVQFNWYVDGVEVHNAKTKPREEQFNSTYRVVSVLTVLHQDWLNGKEYKCKVSNKGLPSSIEKTISKAKGQPREPQVYTLPPSQEEMTKNQVSLTCLVKGFYPSDIAVEWESNGQPENNYKTTPPVLDSDGSFFLYSRLTVDKSRWQEGNVFSCSVMHEALHNHYTQKSLSLSLGGGGSGSAHPIPDSSPLLQFGGQVRQRYLYTDDACQTEAHLEIREDGTVGGAADQSPESLLQLKALKPGVIQILGVKTSRFLCQRPDGALYGSLHFDPEACSFRELLLEDGYNVYQSEAHGLPLHLPGCKSPHRDPAPRGPARFLPLPGLPPAPPEPPGILAPQPPDVGSSDPLSMVGSQGRSPSYAS

SEQ ID NO: 74 - protein, 473 aa, Artificial Sequence
  Fusion Protein
HGEGTFTSDKSKQLEKRLVILFIEWLIAGGHSSGKPPPKGGGGGGGSGGGGSGGGGSAESKYGPPCPPCPAPEFEGGPSVFLFPPKPKDTLMISRTPEVTCVVVDVSQEDPEVQFNWYVDGVEVHNAKTKPREEQFNSTYRVVSVLTVLHQDWLNGKEYKCKVSNKGLPSSIEKTISKAKGQPREPQVYTLPPSQEEMTKNQVSLTCLVKGFYPSDIAVEWESNGQPENNYKTTPPVLDSDGSFFLYSRLTVDKSRWQEGNVFSCSVMHEALHNHYTQKSLSLSLGGGGSGSAHPIPDSSPLLQFGGQVRQRYLYTDDACQTEAHLEIREDGTVGGAADQSPESLLQLKALKPGVIQILGVKTSRFLCQRPDGALYGSLHFDPEACSFRELLLEDGYNVYQSEAHGLPLHLPGCKSPHRDPAPRGPARFLPLPGLPPAPPEPPGILAPQPPDVGSSDPLSMVGSQGRSPSYAS

SEQ ID NO: 75 - protein, 473 aa, Artificial Sequence
  Fusion Protein
HGEGTFTSDKSKQLEKRLVRIFIEWLIAGGHSSGKPPPKGGGGGGGSGGGGSGGGGSAESKYGPPCPPCPAPEFEGGPSVFLFPPKPKDTLMISRTPEVTCVVVDVSQEDPEVQFNWYVDGVEVHNAKTKPREEQFNSTYRVVSVLTVLHQDWLNGKEYKCKVSNKGLPSSIEKTISKAKGQPREPQVYTLPPSQEEMTKNQVSLTCLVKGFYPSDIAVEWESNGQPENNYKTTPPVLDSDGSFFLYSRLTVDKSRWQEGNVFSCSVMHEALHNHYTQKSLSLSLGGGGSGSAHPIPDSSPLLQFGGQVRQRYLYTDDACQTEAHLEIREDGTVGGAADQSPESLLQLKALKPGVIQILGVKTSRFLCQRPDGALYGSLHFDPEACSFRELLLEDGYNVYQSEAHGLPLHLPGCKSPHRDPAPRGPARFLPLPGLPPAPPEPPGILAPQPPDVGSSDPLSMVGSQGRSPSYAS

SEQ ID NO: 76 - protein, 473 aa, Artificial Sequence
  Fusion Protein
HGEGTFTSDKSKQLEKRLVRLLIEWLIAGGHSSGKPPPKGGGGGGGSGGGGSGGGGSAESKYGPPCPPCPAPEFEGGPSVFLFPPKPKDTLMISRTPEVTCVVVDVSQEDPEVQFNWYVDGVEVHNAKTKPREEQFNSTYRVVSVLTVLHQDWLNGKEYKCKVSNKGLPSSIEKTISKAKGQPREPQVYTLPPSQEEMTKNQVSLTCLVKGFYPSDIAVEWESNGQPENNYKTTPPVLDSDGSFFLYSRLTVDKSRWQEGNVFSCSVMHEALHNHYTQKSLSLSLGGGGSGSAHPIPDSSPLLQFGGQVRQRYLYTDDACQTEAHLEIREDGTVGGAADQSPESLLQLKALKPGVIQILGVKTSRFLCQRPDGALYGSLHFDPEACSFRELLLEDGYNVYQSEAHGLPLHLPGCKSPHRDPAPRGPARFLPLPGLPPAPPEPPGILAPQPPDVGSSDPLSMVGSQGRSPSYAS

SEQ ID NO: 77 - protein, 473 aa, Artificial Sequence
  Fusion Protein
HGEGTFTSDKSKQLEKRLVRLFHEWLIAGGHSSGKPPPKGGGGGGGSGGGGSGGGGSAESKYGPPCPPCPAPEFEGGPSVFLFPPKPKDTLMISRTPEVTCVVVDVSQEDPEVQFNWYVDGVEVHNAKTKPREEQFNSTYRVVSVLTVLHQDWLNGKEYKCKVSNKGLPSSIEKTISKAKGQPREPQVYTLPPSQEEMTKNQVSLTCLVKGFYPSDIAVEWESNGQPENNYKTTPPVLDSDGSFFLYSRLTVDKSRWQEGNVFSCSVMHEALHNHYTQKSLSLSLGGGGSGSAHPIPDSSPLLQFGGQVRQRYLYTDDACQTEAHLEIREDGTVGGAADQSPESLLQLKALKPGVIQILGVKTSRFLCQRPDGALYGSLHFDPEACSFRELLLEDGYNVYQSEAHGLPLHLPGCKSPHRDPAPRGPARFLPLPGLPPAPPEPPGILAPQPPDVGSSDPLSMVGSQGRSPSYAS

SEQ ID NO: 78 - protein, 473 aa, Artificial Sequence
  Fusion Protein
HGEGTFTSDKSKQLEKRLVRLFYEWLIAGGHSSGKPPPKGGGGGGGSGGGGSGGGGSAESKYGPPCPPCPAPEFEGGPSVFLFPPKPKDTLMISRTPEVTCVVVDVSQEDPEVQFNWYVDGVEVHNAKTKPREEQFNSTYRVVSVLTVLHQDWLNGKEYKCKVSNKGLPSSIEKTISKAKGQPREPQVYTLPPSQEEMTKNQVSLTCLVKGFYPSDIAVEWESNGQPENNYKTTPPVLDSDGSFFLYSRLTVDKSRWQEGNVFSCSVMHEALHNHYTQKSLSLSLGGGGSGSAHPIPDSSPLLQFGGQVRQRYLYTDDACQTEAHLEIREDGTVGGAADQSPESLLQLKALKPGVIQILGVKTSRFLCQRPDGALYGSLHFDPEACSFRELLLEDGYNVYQSEAHGLPLHLPGCKSPHRDPAPRGPARFLPLPGLPPAPPEPPGILAPQPPDVGSSDPLSMVGSQGRSPSYAS

SEQ ID NO: 79 - protein, 473 aa, Artificial Sequence
  Fusion Protein
HGEGTFTSDKSKQLEKRLVRLFFEWLIAGGHSSGKPPPKGGGGGGGSGGGGSGGGGSAESKYGPPCPPCPAPEFEGGPSVFLFPPKPKDTLMISRTPEVTCVVVDVSQEDPEVQFNWYVDGVEVHNAKTKPREEQFNSTYRVVSVLTVLHQDWLNGKEYKCKVSNKGLPSSIEKTISKAKGQPREPQVYTLPPSQEEMTKNQVSLTCLVKGFYPSDIAVEWESNGQPENNYKTTPPVLDSDGSFFLYSRLTVDKSRWQEGNVFSCSVMHEALHNHYTQKSLSLSLGGGGSGSAHPIPDSSPLLQFGGQVRQRYLYTDDACQTEAHLEIREDGTVGGAADQSPESLLQLKALKPGVIQILGVKTSRFLCQRPDGALYGSLHFDPEACSFRELLLEDGYNVYQSEAHGLPLHLPGCKSPHRDPAPRGPARFLPLPGLPPAPPEPPGILAPQPPDVGSSDPLSMVGSQGRSPSYAS

SEQ ID NO: 80 - protein, 473 aa, Artificial Sequence
  Fusion Protein
HGEGTFTSDKSKQLEKRLVRLFILWLIAGGHSSGKPPPKGGGGGGGSGGGGSGGGGSAESKYGPPCPPCPAPEFEGGPSVFLFPPKPKDTLMISRTPEVTCVVVDVSQEDPEVQFNWYVDGVEVHNAKTKPREEQFNSTYRVVSVLTVLHQDWLNGKEYKCKVSNKGLPSSIEKTISKAKGQPREPQVYTLPPSQEEMTKNQVSLTCLVKGFYPSDIAVEWESNGQPENNYKTTPPVLDSDGSFFLYSRLTVDKSRWQEGNVFSCSVMHEALHNHYTQKSLSLSLGGGGSGSAHPIPDSSPLLQFGGQVRQRYLYTDDACQTEAHLEIREDGTVGGAADQSPESLLQLKALKPGVIQILGVKTSRFLCQRPDGALYGSLHFDPEACSFRELLLEDGYNVYQSEAHGLPLHLPGCKSPHRDPAPRGPARFLPLPGLPPAPPEPPGILAPQPPDVGSSDPLSMVGSQGRSPSYAS

SEQ ID NO: 81 - protein, 473 aa, Artificial Sequence
  Fusion Protein
HGEGTFTSDKSKQLEKRLVRLFIYWLIAGGHSSGKPPPKGGGGGGGSGGGGSGGGGSAESKYGPPCPPCPAPEFEGGPSVFLFPPKPKDTLMISRTPEVTCVVVDVSQEDPEVQFNWYVDGVEVHNAKTKPREEQFNSTYRVVSVLTVLHQDWLNGKEYKCKVSNKGLPSSIEKTISKAKGQPREPQVYTLPPSQEEMTKNQVSLTCLVKGFYPSDIAVEWESNGQPENNYKTTPPVLDSDGSFFLYSRLTVDKSRWQEGNVFSCSVMHEALHNHYTQKSLSLSLGGGGSGSAHPIPDSSPLLQFGGQVRQRYLYTDDACQTEAHLEIREDGTVGGAADQSPESLLQLKALKPGVIQILGVKTSRFLCQRPDGALYGSLHFDPEACSFRELLLEDGYNVYQSEAHGLPLHLPGCKSPHRDPAPRGPARFLPLPGLPPAPPEPPGILAPQPPDVGSSDPLSMVGSQGRSPSYAS

SEQ ID NO: 82 - protein, 473 aa, Artificial Sequence
  Fusion Protein
HGEGTFTSDKSKQLEKRLVRLFIELLIAGGHSSGKPPPKGGGGGGGSGGGGSGGGGSAESKYGPPCPPCPAPEFEGGPSVFLFPPKPKDTLMISRTPEVTCVVVDVSQEDPEVQFNWYVDGVEVHNAKTKPREEQFNSTYRVVSVLTVLHQDWLNGKEYKCKVSNKGLPSSIEKTISKAKGQPREPQVYTLPPSQEEMTKNQVSLTCLVKGFYPSDIAVEWESNGQPENNYKTTPPVLDSDGSFFLYSRLTVDKSRWQEGNVFSCSVMHEALHNHYTQKSLSLSLGGGGSGSAHPIPDSSPLLQFGGQVRQRYLYTDDACQTEAHLEIREDGTVGGAADQSPESLLQLKALKPGVIQILGVKTSRFLCQRPDGALYGSLHFDPEACSFRELLLEDGYNVYQSEAHGLPLHLPGCKSPHRDPAPRGPARFLPLPGLPPAPPEPPGILAPQPPDVGSSDPLSMVGSQGRSPSYAS

SEQ ID NO: 83 - protein, 472 aa, Artificial Sequence
  Fusion Protein
HGEGTFTSDKSKQLEKRLVRLFIEWLIAVGHSGKPPPKGGGGGGGSGGGGSGGGGSAESKYGPPCPPCPAPEFEGGPSVFLFPPKPKDTLMISRTPEVTCVVVDVSQEDPEVQFNWYVDGVEVHNAKTKPREEQFNSTYRVVSVLTVLHQDWLNGKEYKCKVSNKGLPSSIEKTISKAKGQPREPQVYTLPPSQEEMTKNQVSLTCLVKGFYPSDIAVEWESNGQPENNYKTTPPVLDSDGSFFLYSRLTVDKSRWQEGNVFSCSVMHEALHNHYTQKSLSLSLGGGGSGSAHPIPDSSPLLQFGGQVRQRYLYTDDACQTEAHLEIREDGTVGGAADQSPESLLQLKALKPGVIQILGVKTSRFLCQRPDGALYGSLHFDPEACSFRELLLEDGYNVYQSEAHGLPLHLPGCKSPHRDPAPRGPARFLPLPGLPPAPPEPPGILAPQPPDVGSSDPLSMVGSQGRSPSYAS

SEQ ID NO: 84 - protein, 473 aa, Artificial Sequence
  Fusion Protein
HGEGTFTSDLSIQLDEEAVREFIEWLLATGPVSGAPPPSGGGGGGGSGGGGSGGGGSAESKYGPPCPPCPAPEFEGGPSVFLFPPKPKDTLMISRTPEVTCVVVDVSQEDPEVQFNWYVDGVEVHNAKTKPREEQFNSTYRVVSVLTVLHQDWLNGKEYKCKVSNKGLPSSIEKTISKAKGQPREPQVYTLPPSQEEMTKNQVSLTCLVKGFYPSDIAVEWESNGQPENNYKTTPPVLDSDGSFFLYSRLTVDKSRWQEGNVFSCSVMHEALHNHYTQKSLSLSLGGGGSGSAHPIPDSSPLLQFGGQVRQRYLYTDDACQTEAHLEIREDGTVGGAADQSPESLLQLKALKPGVIQILGVKTSRFLCQRPDGALYGSLHFDPEACSFRELLLEDGYNVYQSEAHGLPLHLPGCKSPHRDPAPRGPARFLPLPGLPPAPPEPPGILAPQPPDVGSSDPLSMVGSQGRSPSYAS

SEQ ID NO: 85 - protein, 473 aa, Artificial Sequence
  Fusion Protein
HGEGTFTSDLSIQLDEEAVQEFIEWLLATGPSSGAPPPSGGGGGGGSGGGGSGGGGSAESKYGPPCPPCPAPEFEGGPSVFLFPPKPKDTLMISRTPEVTCVVVDVSQEDPEVQFNWYVDGVEVHNAKTKPREEQFNSTYRVVSVLTVLHQDWLNGKEYKCKVSNKGLPSSIEKTISKAKGQPREPQVYTLPPSQEEMTKNQVSLTCLVKGFYPSDIAVEWESNGQPENNYKTTPPVLDSDGSFFLYSRLTVDKSRWQEGNVFSCSVMHEALHNHYTQKSLSLSLGGGGSGSAHPIPDSSPLLQFGGQVRQRYLYTDDACQTEAHLEIREDGTVGGAADQSPESLLQLKALKPGVIQILGVKTSRFLCQRPDGALYGSLHFDPEACSFRELLLEDGYNVYQSEAHGLPLHLPGCKSPHRDPAPRGPARFLPLPGLPPAPPEPPGILAPQPPDVGSSDPLSMVGSQGRSPSYAS

SEQ ID NO: 86 - protein, 473 aa, Artificial Sequence
  Fusion Protein
HGEGTFTSDLSIQLDEEAVQLFIEWLLATGPSSGAPPPSGGGGGGGSGGGGSGGGGSAESKYGPPCPPCPAPEFEGGPSVFLFPPKPKDTLMISRTPEVTCVVVDVSQEDPEVQFNWYVDGVEVHNAKTKPREEQFNSTYRVVSVLTVLHQDWLNGKEYKCKVSNKGLPSSIEKTISKAKGQPREPQVYTLPPSQEEMTKNQVSLTCLVKGFYPSDIAVEWESNGQPENNYKTTPPVLDSDGSFFLYSRLTVDKSRWQEGNVFSCSVMHEALHNHYTQKSLSLSLGGGGSGSAHPIPDSSPLLQFGGQVRQRYLYTDDACQTEAHLEIREDGTVGGAADQSPESLLQLKALKPGVIQILGVKTSRFLCQRPDGALYGSLHFDPEACSFRELLLEDGYNVYQSEAHGLPLHLPGCKSPHRDPAPRGPARFLPLPGLPPAPPEPPGILAPQPPDVGSSDPLSMVGSQGRSPSYAS

SEQ ID NO: 87 - protein, 473 aa, Artificial Sequence
  Fusion Protein
HGEGTFTSDLSIQLDEEAVQLFIEWLLATGPVSGAPPPSGGGGGGGSGGGGSGGGGSAESKYGPPCPPCPAPEFEGGPSVFLFPPKPKDTLMISRTPEVTCVVVDVSQEDPEVQFNWYVDGVEVHNAKTKPREEQFNSTYRVVSVLTVLHQDWLNGKEYKCKVSNKGLPSSIEKTISKAKGQPREPQVYTLPPSQEEMTKNQVSLTCLVKGFYPSDIAVEWESNGQPENNYKTTPPVLDSDGSFFLYSRLTVDKSRWQEGNVFSCSVMHEALHNHYTQKSLSLSLGGGGSGSAHPIPDSSPLLQFGGQVRQRYLYTDDACQTEAHLEIREDGTVGGAADQSPESLLQLKALKPGVIQILGVKTSRFLCQRPDGALYGSLHFDPEACSFRELLLEDGYNVYQSEAHGLPLHLPGCKSPHRDPAPRGPARFLPLPGLPPAPPEPPGILAPQPPDVGSSDPLSMVGSQGRSPSYAS

SEQ ID NO: 88 - protein, 473 aa, Artificial Sequence
  Fusion Protein
HGEGTFTSDLSILLDEEAVREFIEWLLATGPSSGAPPPSGGGGGGGSGGGGSGGGGSAESKYGPPCPPCPAPEFEGGPSVFLFPPKPKDTLMISRTPEVTCVVVDVSQEDPEVQFNWYVDGVEVHNAKTKPREEQFNSTYRVVSVLTVLHQDWLNGKEYKCKVSNKGLPSSIEKTISKAKGQPREPQVYTLPPSQEEMTKNQVSLTCLVKGFYPSDIAVEWESNGQPENNYKTTPPVLDSDGSFFLYSRLTVDKSRWQEGNVFSCSVMHEALHNHYTQKSLSLSLGGGGSGSAHPIPDSSPLLQFGGQVRQRYLYTDDACQTEAHLEIREDGTVGGAADQSPESLLQLKALKPGVIQILGVKTSRFLCQRPDGALYGSLHFDPEACSFRELLLEDGYNVYQSEAHGLPLHLPGCKSPHRDPAPRGPARFLPLPGLPPAPPEPPGILAPQPPDVGSSDPLSMVGSQGRSPSYAS

SEQ ID NO: 89 - protein, 473 aa, Artificial Sequence
  Fusion Protein
HGEGTFTSDLSILLDEEAVRLFIEWLLATGPSSGAPPPSGGGGGGGSGGGGSGGGGSAESKYGPPCPPCPAPEFEGGPSVFLFPPKPKDTLMISRTPEVTCVVVDVSQEDPEVQFNWYVDGVEVHNAKTKPREEQFNSTYRVVSVLTVLHQDWLNGKEYKCKVSNKGLPSSIEKTISKAKGQPREPQVYTLPPSQEEMTKNQVSLTCLVKGFYPSDIAVEWESNGQPENNYKTTPPVLDSDGSFFLYSRLTVDKSRWQEGNVFSCSVMHEALHNHYTQKSLSLSLGGGGSGSAHPIPDSSPLLQFGGQVRQRYLYTDDACQTEAHLEIREDGTVGGAADQSPESLLQLKALKPGVIQILGVKTSRFLCQRPDGALYGSLHFDPEACSFRELLLEDGYNVYQSEAHGLPLHLPGCKSPHRDPAPRGPARFLPLPGLPPAPPEPPGILAPQPPDVGSSDPLSMVGSQGRSPSYAS

SEQ ID NO: 90 - protein, 473 aa, Artificial Sequence
  Fusion Protein
HGEGTFTSDLSILLDEEAVQLFIEWLLATGPSSGAPPPSGGGGGGGSGGGGSGGGGSAESKYGPPCPPCPAPEFEGGPSVFLFPPKPKDTLMISRTPEVTCVVVDVSQEDPEVQFNWYVDGVEVHNAKTKPREEQFNSTYRVVSVLTVLHQDWLNGKEYKCKVSNKGLPSSIEKTISKAKGQPREPQVYTLPPSQEEMTKNQVSLTCLVKGFYPSDIAVEWESNGQPENNYKTTPPVLDSDGSFFLYSRLTVDKSRWQEGNVFSCSVMHEALHNHYTQKSLSLSLGGGGSGSAHPIPDSSPLLQFGGQVRQRYLYTDDACQTEAHLEIREDGTVGGAADQSPESLLQLKALKPGVIQILGVKTSRFLCQRPDGALYGSLHFDPEACSFRELLLEDGYNVYQSEAHGLPLHLPGCKSPHRDPAPRGPARFLPLPGLPPAPPEPPGILAPQPPDVGSSDPLSMVGSQGRSPSYAS

SEQ ID NO: 91 - protein, 473 aa, Artificial Sequence
  Fusion Protein
HGEGTFTSDLSILLDEEAVQLFIEWLLATGPVSGAPPPSGGGGGGGSGGGGSGGGGSAESKYGPPCPPCPAPEFEGGPSVFLFPPKPKDTLMISRTPEVTCVVVDVSQEDPEVQFNWYVDGVEVHNAKTKPREEQFNSTYRVVSVLTVLHQDWLNGKEYKCKVSNKGLPSSIEKTISKAKGQPREPQVYTLPPSQEEMTKNQVSLTCLVKGFYPSDIAVEWESNGQPENNYKTTPPVLDSDGSFFLYSRLTVDKSRWQEGNVFSCSVMHEALHNHYTQKSLSLSLGGGGSGSAHPIPDSSPLLQFGGQVRQRYLYTDDACQTEAHLEIREDGTVGGAADQSPESLLQLKALKPGVIQILGVKTSRFLCQRPDGALYGSLHFDPEACSFRELLLEDGYNVYQSEAHGLPLHLPGCKSPHRDPAPRGPARFLPLPGLPPAPPEPPGILAPQPPDVGSSDPLSMVGSQGRSPSYAS

SEQ ID NO: 92 - protein, 473 aa, Artificial Sequence
  Fusion Protein
HGEGTFTSDLSIQLEEEAVRLFIEWLLATGPVSGAPPPSGGGGGGGSGGGGSGGGGSAESKYGPPCPPCPAPEFEGGPSVFLFPPKPKDTLMISRTPEVTCVVVDVSQEDPEVQFNWYVDGVEVHNAKTKPREEQFNSTYRVVSVLTVLHQDWLNGKEYKCKVSNKGLPSSIEKTISKAKGQPREPQVYTLPPSQEEMTKNQVSLTCLVKGFYPSDIAVEWESNGQPENNYKTTPPVLDSDGSFFLYSRLTVDKSRWQEGNVFSCSVMHEALHNHYTQKSLSLSLGGGGSGSAHPIPDSSPLLQFGGQVRQRYLYTDDACQTEAHLEIREDGTVGGAADQSPESLLQLKALKPGVIQILGVKTSRFLCQRPDGALYGSLHFDPEACSFRELLLEDGYNVYQSEAHGLPLHLPGCKSPHRDPAPRGPARFLPLPGLPPAPPEPPGILAPQPPDVGSSDPLSMVGSQGRSPSYAS

SEQ ID NO: 93 - protein, 473 aa, Artificial Sequence
  Fusion Protein
HGEGTFTSDLSIQLEEEAVQEFIEWLLATGPVSGAPPPSGGGGGGGSGGGGSGGGGSAESKYGPPCPPCPAPEFEGGPSVFLFPPKPKDTLMISRTPEVTCVVVDVSQEDPEVQFNWYVDGVEVHNAKTKPREEQFNSTYRVVSVLTVLHQDWLNGKEYKCKVSNKGLPSSIEKTISKAKGQPREPQVYTLPPSQEEMTKNQVSLTCLVKGFYPSDIAVEWESNGQPENNYKTTPPVLDSDGSFFLYSRLTVDKSRWQEGNVFSCSVMHEALHNHYTQKSLSLSLGGGGSGSAHPIPDSSPLLQFGGQVRQRYLYTDDACQTEAHLEIREDGTVGGAADQSPESLLQLKALKPGVIQILGVKTSRFLCQRPDGALYGSLHFDPEACSFRELLLEDGYNVYQSEAHGLPLHLPGCKSPHRDPAPRGPARFLPLPGLPPAPPEPPGILAPQPPDVGSSDPLSMVGSQGRSPSYAS

SEQ ID NO: 94 - protein, 473 aa, Artificial Sequence
  Fusion Protein
HGEGTFTSDLSIQLEEEAVQLFIEWLLATGPVSGAPPPSGGGGGGGSGGGGSGGGGSAESKYGPPCPPCPAPEFEGGPSVFLFPPKPKDTLMISRTPEVTCVVVDVSQEDPEVQFNWYVDGVEVHNAKTKPREEQFNSTYRVVSVLTVLHQDWLNGKEYKCKVSNKGLPSSIEKTISKAKGQPREPQVYTLPPSQEEMTKNQVSLTCLVKGFYPSDIAVEWESNGQPENNYKTTPPVLDSDGSFFLYSRLTVDKSRWQEGNVFSCSVMHEALHNHYTQKSLSLSLGGGGSGSAHPIPDSSPLLQFGGQVRQRYLYTDDACQTEAHLEIREDGTVGGAADQSPESLLQLKALKPGVIQILGVKTSRFLCQRPDGALYGSLHFDPEACSFRELLLEDGYNVYQSEAHGLPLHLPGCKSPHRDPAPRGPARFLPLPGLPPAPPEPPGILAPQPPDVGSSDPLSMVGSQGRSPSYAS

SEQ ID NO: 95 - protein, 473 aa, Artificial Sequence
  Fusion Protein
HGEGTFTSDLSILLEEEAVREFIEWLLATGPSSGAPPPSGGGGGGGSGGGGSGGGGSAESKYGPPCPPCPAPEFEGGPSVFLFPPKPKDTLMISRTPEVTCVVVDVSQEDPEVQFNWYVDGVEVHNAKTKPREEQFNSTYRVVSVLTVLHQDWLNGKEYKCKVSNKGLPSSIEKTISKAKGQPREPQVYTLPPSQEEMTKNQVSLTCLVKGFYPSDIAVEWESNGQPENNYKTTPPVLDSDGSFFLYSRLTVDKSRWQEGNVFSCSVMHEALHNHYTQKSLSLSLGGGGSGSAHPIPDSSPLLQFGGQVRQRYLYTDDACQTEAHLEIREDGTVGGAADQSPESLLQLKALKPGVIQILGVKTSRFLCQRPDGALYGSLHFDPEACSFRELLLEDGYNVYQSEAHGLPLHLPGCKSPHRDPAPRGPARFLPLPGLPPAPPEPPGILAPQPPDVGSSDPLSMVGSQGRSPSYAS

SEQ ID NO: 96 - protein, 473 aa, Artificial Sequence
  Fusion Protein
HGEGTFTSDLSILLEEEAVRLFIEWLLATGPSSGAPPPSGGGGGGGSGGGGSGGGGSAESKYGPPCPPCPAPEFEGGPSVFLFPPKPKDTLMISRTPEVTCVVVDVSQEDPEVQFNWYVDGVEVHNAKTKPREEQFNSTYRVVSVLTVLHQDWLNGKEYKCKVSNKGLPSSIEKTISKAKGQPREPQVYTLPPSQEEMTKNQVSLTCLVKGFYPSDIAVEWESNGQPENNYKTTPPVLDSDGSFFLYSRLTVDKSRWQEGNVFSCSVMHEALHNHYTQKSLSLSLGGGGSGSAHPIPDSSPLLQFGGQVRQRYLYTDDACQTEAHLEIREDGTVGGAADQSPESLLQLKALKPGVIQILGVKTSRFLCQRPDGALYGSLHFDPEACSFRELLLEDGYNVYQSEAHGLPLHLPGCKSPHRDPAPRGPARFLPLPGLPPAPPEPPGILAPQPPDVGSSDPLSMVGSQGRSPSYAS

SEQ ID NO: 97 - protein, 473 aa, Artificial Sequence
  Fusion Protein
HGEGTFTSDLSILLEEEAVRLFIEWLLATGPVSGAPPPSGGGGGGGSGGGGSGGGGSAESKYGPPCPPCPAPEFEGGPSVFLFPPKPKDTLMISRTPEVTCVVVDVSQEDPEVQFNWYVDGVEVHNAKTKPREEQFNSTYRVVSVLTVLHQDWLNGKEYKCKVSNKGLPSSIEKTISKAKGQPREPQVYTLPPSQEEMTKNQVSLTCLVKGFYPSDIAVEWESNGQPENNYKTTPPVLDSDGSFFLYSRLTVDKSRWQEGNVFSCSVMHEALHNHYTQKSLSLSLGGGGSGSAHPIPDSSPLLQFGGQVRQRYLYTDDACQTEAHLEIREDGTVGGAADQSPESLLQLKALKPGVIQILGVKTSRFLCQRPDGALYGSLHFDPEACSFRELLLEDGYNVYQSEAHGLPLHLPGCKSPHRDPAPRGPARFLPLPGLPPAPPEPPGILAPQPPDVGSSDPLSMVGSQGRSPSYAS

SEQ ID NO: 98 - protein, 474 aa, Artificial Sequence
  Fusion Protein
GHGEGTFTSDLSKQMEEEAVRLFIEWLKNGGPSSGAPPPSGGGGGGGSGGGGSGGGGSAESKYGPPCPPCPAPEFEGGPSVFLFPPKPKDTLMISRTPEVTCVVVDVSQEDPEVQFNWYVDGVEVHNAKTKPREEQFNSTYRVVSVLTVLHQDWLNGKEYKCKVSNKGLPSSIEKTISKAKGQPREPQVYTLPPSQEEMTKNQVSLTCLVKGFYPSDIAVEWESNGQPENNYKTTPPVLDSDGSFFLYSRLTVDKSRWQEGNVFSCSVMHEALHNHYTQKSLSLSLGGGGSGSAHPIPDSSPLLQFGGQVRQRYLYTDDACQTEAHLEIREDGTVGGAADQSPESLLQLKALKPGVIQILGVKTSRFLCQRPDGALYGSLHFDPEACSFRELLLEDGYNVYQSEAHGLPLHLPGCKSPHRDPAPRGPARFLPLPGLPPAPPEPPGILAPQPPDVGSSDPLSMVGSQGRSPSYAS

SEQ ID NO: 99 - protein, 473 aa, Artificial Sequence
  Fusion Protein
HGEGTFTSDLSKQLEEEAVQLFIEWLLNGGPSSGAPPPEGGGGGGGSGGGGSGGGGSAESKYGPPCPPCPAPEFEGGPSVFLFPPKPKDTLMISRTPEVTCVVVDVSQEDPEVQFNWYVDGVEVHNAKTKPREEQFNSTYRVVSVLTVLHQDWLNGKEYKCKVSNKGLPSSIEKTISKAKGQPREPQVYTLPPSQEEMTKNQVSLTCLVKGFYPSDIAVEWESNGQPENNYKTTPPVLDSDGSFFLYSRLTVDKSRWQEGNVFSCSVMHEALHNHYTQKSLSLSLGGGGSGSAHPIPDSSPLLQFGGQVRQRYLYTDDACQTEAHLEIREDGTVGGAADQSPESLLQLKALKPGVIQILGVKTSRFLCQRPDGALYGSLHFDPEACSFRELLLEDGYNVYQSEAHGLPLHLPGCKSPHRDPAPRGPARFLPLPGLPPAPPEPPGILAPQPPDVGSSDPLSMVGSQGRSPSYAS

SEQ ID NO: 100 - protein, 473 aa, Artificial Sequence
  Fusion Protein
HGEGTFTSDLSKQLEEEAVRLFIEWLLATGPSSGEPPPEGGGGGGGSGGGGSGGGGSAESKYGPPCPPCPAPEFEGGPSVFLFPPKPKDTLMISRTPEVTCVVVDVSQEDPEVQFNWYVDGVEVHNAKTKPREEQFNSTYRVVSVLTVLHQDWLNGKEYKCKVSNKGLPSSIEKTISKAKGQPREPQVYTLPPSQEEMTKNQVSLTCLVKGFYPSDIAVEWESNGQPENNYKTTPPVLDSDGSFFLYSRLTVDKSRWQEGNVFSCSVMHEALHNHYTQKSLSLSLGGGGSGSAHPIPDSSPLLQFGGQVRQRYLYTDDACQTEAHLEIREDGTVGGAADQSPESLLQLKALKPGVIQILGVKTSRFLCQRPDGALYGSLHFDPEACSFRELLLEDGYNVYQSEAHGLPLHLPGCKSPHRDPAPRGPARFLPLPGLPPAPPEPPGILAPQPPDVGSSDPLSMVGSQGRSPSYAS

SEQ ID NO: 101 - protein, 473 aa, Artificial Sequence
  Fusion Protein
HAQGTFTSDLSKQLESRRAQEFIEWLLATGPESGAPPPSGGGGGGGSGGGGSGGGGSAESKYGPPCPPCPAPEFEGGPSVFLFPPKPKDTLMISRTPEVTCVVVDVSQEDPEVQFNWYVDGVEVHNAKTKPREEQFNSTYRVVSVLTVLHQDWLNGKEYKCKVSNKGLPSSIEKTISKAKGQPREPQVYTLPPSQEEMTKNQVSLTCLVKGFYPSDIAVEWESNGQPENNYKTTPPVLDSDGSFFLYSRLTVDKSRWQEGNVFSCSVMHEALHNHYTQKSLSLSLGGGGSGSAHPIPDSSPLLQFGGQVRQRYLYTDDACQTEAHLEIREDGTVGGAADQSPESLLQLKALKPGVIQILGVKTSRFLCQRPDGALYGSLHFDPEACSFRELLLEDGYNVYQSEAHGLPLHLPGCKSPHRDPAPRGPARFLPLPGLPPAPPEPPGILAPQPPDVGSSDPLSMVGSQGRSPSYAS

SEQ ID NO: 102 - protein, 473 aa, Artificial Sequence
  Fusion Protein
HSQGTFTSDLSKQLESRRARRFIEWLLATGPESGAPPPSGGGGGGGSGGGGSGGGGSAESKYGPPCPPCPAPEFEGGPSVFLFPPKPKDTLMISRTPEVTCVVVDVSQEDPEVQFNWYVDGVEVHNAKTKPREEQFNSTYRVVSVLTVLHQDWLNGKEYKCKVSNKGLPSSIEKTISKAKGQPREPQVYTLPPSQEEMTKNQVSLTCLVKGFYPSDIAVEWESNGQPENNYKTTPPVLDSDGSFFLYSRLTVDKSRWQEGNVFSCSVMHEALHNHYTQKSLSLSLGGGGSGSAHPIPDSSPLLQFGGQVRQRYLYTDDACQTEAHLEIREDGTVGGAADQSPESLLQLKALKPGVIQILGVKTSRFLCQRPDGALYGSLHFDPEACSFRELLLEDGYNVYQSEAHGLPLHLPGCKSPHRDPAPRGPARFLPLPGLPPAPPEPPGILAPQPPDVGSSDPLSMVGSQGRSPSYAS

SEQ ID NO: 103 - protein, 473 aa, Artificial Sequence
  Fusion Protein
HGEGTFTSDKSQLLEKRAAHLFIEWLIKGGHSKGKPPPKGGGGGGGSGGGGSGGGGSAESKYGPPCPPCPAPEFEGGPSVFLFPPKPKDTLMISRTPEVTCVVVDVSQEDPEVQFNWYVDGVEVHNAKTKPREEQFNSTYRVVSVLTVLHQDWLNGKEYKCKVSNKGLPSSIEKTISKAKGQPREPQVYTLPPSQEEMTKNQVSLTCLVKGFYPSDIAVEWESNGQPENNYKTTPPVLDSDGSFFLYSRLTVDKSRWQEGNVFSCSVMHEALHNHYTQKSLSLSLGGGGSGSAHPIPDSSPLLQFGGQVRQRYLYTDDACQTEAHLEIREDGTVGGAADQSPESLLQLKALKPGVIQILGVKTSRFLCQRPDGALYGSLHFDPEACSFRELLLEDGYNVYQSEAHGLPLHLPGCKSPHRDPAPRGPARFLPLPGLPPAPPEPPGILAPQPPDVGSSDPLSMVGSQGRSPSYAS

SEQ ID NO: 104 - protein, 473 aa, Artificial Sequence
  Fusion Protein
HGEGTFTSDKSQLLEKRLAHLFIEWLIKGGHSSGKPPPKGGGGGGGSGGGGSGGGGSAESKYGPPCPPCPAPEFEGGPSVFLFPPKPKDTLMISRTPEVTCVVVDVSQEDPEVQFNWYVDGVEVHNAKTKPREEQFNSTYRVVSVLTVLHQDWLNGKEYKCKVSNKGLPSSIEKTISKAKGQPREPQVYTLPPSQEEMTKNQVSLTCLVKGFYPSDIAVEWESNGQPENNYKTTPPVLDSDGSFFLYSRLTVDKSRWQEGNVFSCSVMHEALHNHYTQKSLSLSLGGGGSGSAHPIPDSSPLLQFGGQVRQRYLYTDDACQTEAHLEIREDGTVGGAADQSPESLLQLKALKPGVIQILGVKTSRFLCQRPDGALYGSLHFDPEACSFRELLLEDGYNVYQSEAHGLPLHLPGCKSPHRDPAPRGPARFLPLPGLPPAPPEPPGILAPQPPDVGSSDPLSMVGSQGRSPSYAS

SEQ ID NO: 105 - protein, 473 aa, Artificial Sequence
  Fusion Protein
HGEGTFTSDKSQLLEERLAHLFIEWLIKGGHSSIKPPPKGGGGGGGSGGGGSGGGGSAESKYGPPCPPCPAPEFEGGPSVFLFPPKPKDTLMISRTPEVTCVVVDVSQEDPEVQFNWYVDGVEVHNAKTKPREEQFNSTYRVVSVLTVLHQDWLNGKEYKCKVSNKGLPSSIEKTISKAKGQPREPQVYTLPPSQEEMTKNQVSLTCLVKGFYPSDIAVEWESNGQPENNYKTTPPVLDSDGSFFLYSRLTVDKSRWQEGNVFSCSVMHEALHNHYTQKSLSLSLGGGGSGSAHPIPDSSPLLQFGGQVRQRYLYTDDACQTEAHLEIREDGTVGGAADQSPESLLQLKALKPGVIQILGVKTSRFLCQRPDGALYGSLHFDPEACSFRELLLEDGYNVYQSEAHGLPLHLPGCKSPHRDPAPRGPARFLPLPGLPPAPPEPPGILAPQPPDVGSSDPLSMVGSQGRSPSYAS

SEQ ID NO: 106 - protein, 473 aa, Artificial Sequence
  Fusion Protein
HGEGTFTSDKSQLLEERLAHLFIEWLIAGGHSSGRPPPKGGGGGGGSGGGGSGGGGSAESKYGPPCPPCPAPEFEGGPSVFLFPPKPKDTLMISRTPEVTCVVVDVSQEDPEVQFNWYVDGVEVHNAKTKPREEQFNSTYRVVSVLTVLHQDWLNGKEYKCKVSNKGLPSSIEKTISKAKGQPREPQVYTLPPSQEEMTKNQVSLTCLVKGFYPSDIAVEWESNGQPENNYKTTPPVLDSDGSFFLYSRLTVDKSRWQEGNVFSCSVMHEALHNHYTQKSLSLSLGGGGSGSAHPIPDSSPLLQFGGQVRQRYLYTDDACQTEAHLEIREDGTVGGAADQSPESLLQLKALKPGVIQILGVKTSRFLCQRPDGALYGSLHFDPEACSFRELLLEDGYNVYQSEAHGLPLHLPGCKSPHRDPAPRGPARFLPLPGLPPAPPEPPGILAPQPPDVGSSDPLSMVGSQGRSPSYAS

SEQ ID NO: 107 - protein, 473 aa, Artificial Sequence
  Fusion Protein
YGEGTFTSDKSQLLEERLAHLFIEWLIAGGHSKIRPPPKGGGGGGGSGGGGSGGGGSAESKYGPPCPPCPAPEFEGGPSVFLFPPKPKDTLMISRTPEVTCVVVDVSQEDPEVQFNWYVDGVEVHNAKTKPREEQFNSTYRVVSVLTVLHQDWLNGKEYKCKVSNKGLPSSIEKTISKAKGQPREPQVYTLPPSQEEMTKNQVSLTCLVKGFYPSDIAVEWESNGQPENNYKTTPPVLDSDGSFFLYSRLTVDKSRWQEGNVFSCSVMHEALHNHYTQKSLSLSLGGGGSGSAHPIPDSSPLLQFGGQVRQRYLYTDDACQTEAHLEIREDGTVGGAADQSPESLLQLKALKPGVIQILGVKTSRFLCQRPDGALYGSLHFDPEACSFRELLLEDGYNVYQSEAHGLPLHLPGCKSPHRDPAPRGPARFLPLPGLPPAPPEPPGILAPQPPDVGSSDPLSMVGSQGRSPSYAS

SEQ ID NO: 108 - protein, 473 aa, Artificial Sequence
  Fusion Protein
YGEGTFTSDKSQLLEERLVHLFIEWLIAGGHSKIKPPPKGGGGGGGSGGGGSGGGGSAESKYGPPCPPCPAPEFEGGPSVFLFPPKPKDTLMISRTPEVTCVVVDVSQEDPEVQFNWYVDGVEVHNAKTKPREEQFNSTYRVVSVLTVLHQDWLNGKEYKCKVSNKGLPSSIEKTISKAKGQPREPQVYTLPPSQEEMTKNQVSLTCLVKGFYPSDIAVEWESNGQPENNYKTTPPVLDSDGSFFLYSRLTVDKSRWQEGNVFSCSVMHEALHNHYTQKSLSLSLGGGGSGSAHPIPDSSPLLQFGGQVRQRYLYTDDACQTEAHLEIREDGTVGGAADQSPESLLQLKALKPGVIQILGVKTSRFLCQRPDGALYGSLHFDPEACSFRELLLEDGYNVYQSEAHGLPLHLPGCKSPHRDPAPRGPARFLPLPGLPPAPPEPPGILAPQPPDVGSSDPLSMVGSQGRSPSYAS

SEQ ID NO: 109 - protein, 473 aa, Artificial Sequence
  Fusion Protein
YGEGTFTSDKSQLLEKELAHLFIEWLIAGGHKSGRPSPKGGGGGGGSGGGGSGGGGSAESKYGPPCPPCPAPEFEGGPSVFLFPPKPKDTLMISRTPEVTCVVVDVSQEDPEVQFNWYVDGVEVHNAKTKPREEQFNSTYRVVSVLTVLHQDWLNGKEYKCKVSNKGLPSSIEKTISKAKGQPREPQVYTLPPSQEEMTKNQVSLTCLVKGFYPSDIAVEWESNGQPENNYKTTPPVLDSDGSFFLYSRLTVDKSRWQEGNVFSCSVMHEALHNHYTQKSLSLSLGGGGSGSAHPIPDSSPLLQFGGQVRQRYLYTDDACQTEAHLEIREDGTVGGAADQSPESLLQLKALKPGVIQILGVKTSRFLCQRPDGALYGSLHFDPEACSFRELLLEDGYNVYQSEAHGLPLHLPGCKSPHRDPAPRGPARFLPLPGLPPAPPEPPGILAPQPPDVGSSDPLSMVGSQGRSPSYAS

SEQ ID NO: 110 - protein, 473 aa, Artificial Sequence
  Fusion Protein
HGEGTFTSDKSQLLEKRLAHLFIEWLLAGGPSSGKPPPKGGGGGGGSGGGGSGGGGSAESKYGPPCPPCPAPEFEGGPSVFLFPPKPKDTLMISRTPEVTCVVVDVSQEDPEVQFNWYVDGVEVHNAKTKPREEQFNSTYRVVSVLTVLHQDWLNGKEYKCKVSNKGLPSSIEKTISKAKGQPREPQVYTLPPSQEEMTKNQVSLTCLVKGFYPSDIAVEWESNGQPENNYKTTPPVLDSDGSFFLYSRLTVDKSRWQEGNVFSCSVMHEALHNHYTQKSLSLSLGGGGSGSAHPIPDSSPLLQFGGQVRQRYLYTDDACQTEAHLEIREDGTVGGAADQSPESLLQLKALKPGVIQILGVKTSRFLCQRPDGALYGSLHFDPEACSFRELLLEDGYNVYQSEAHGLPLHLPGCKSPHRDPAPRGPARFLPLPGLPPAPPEPPGILAPQPPDVGSSDPLSMVGSQGRSPSYAS

SEQ ID NO: 111 - protein, 473 aa, Artificial Sequence
  Fusion Protein
HGEGTFTSDKSQLLEKRAAHLFIEWLIAGGPSKGKPPPKGGGGGGGSGGGGSGGGGSAESKYGPPCPPCPAPEFEGGPSVFLFPPKPKDTLMISRTPEVTCVVVDVSQEDPEVQFNWYVDGVEVHNAKTKPREEQFNSTYRVVSVLTVLHQDWLNGKEYKCKVSNKGLPSSIEKTISKAKGQPREPQVYTLPPSQEEMTKNQVSLTCLVKGFYPSDIAVEWESNGQPENNYKTTPPVLDSDGSFFLYSRLTVDKSRWQEGNVFSCSVMHEALHNHYTQKSLSLSLGGGGSGSAHPIPDSSPLLQFGGQVRQRYLYTDDACQTEAHLEIREDGTVGGAADQSPESLLQLKALKPGVIQILGVKTSRFLCQRPDGALYGSLHFDPEACSFRELLLEDGYNVYQSEAHGLPLHLPGCKSPHRDPAPRGPARFLPLPGLPPAPPEPPGILAPQPPDVGSSDPLSMVGSQGRSPSYAS

SEQ ID NO: 112 - protein, 473 aa, Artificial Sequence
  Fusion protein
HGEGTFTSDKSQLLEKRLAHLFIEWLLAGGPSSGRPPPKGGGGGGGSGGGGSGGGGSAESKYGPPCPPCPAPEFEGGPSVFLFPPKPKDTLMISRTPEVTCVVVDVSQEDPEVQFNWYVDGVEVHNAKTKPREEQFNSTYRVVSVLTVLHQDWLNGKEYKCKVSNKGLPSSIEKTISKAKGQPREPQVYTLPPSQEEMTKNQVSLTCLVKGFYPSDIAVEWESNGQPENNYKTTPPVLDSDGSFFLYSRLTVDKSRWQEGNVFSCSVMHEALHNHYTQKSLSLSLGGGGSGSAHPIPDSSPLLQFGGQVRQRYLYTDDACQTEAHLEIREDGTVGGAADQSPESLLQLKALKPGVIQILGVKTSRFLCQRPDGALYGSLHFDPEACSFRELLLEDGYNVYQSEAHGLPLHLPGCKSPHRDPAPRGPARFLPLPGLPPAPPEPPGILAPQPPDVGSSDPLSMVGSQGRSPSYAS

SEQ ID NO: 113 - protein, 473 aa, Artificial Sequence
  Fusion Protein
YGEGTFTSDKSQLLEKRLAHLFIEWLIKGGHSSIRPPPKGGGGGGGSGGGGSGGGGSAESKYGPPCPPCPAPEFEGGPSVFLFPPKPKDTLMISRTPEVTCVVVDVSQEDPEVQFNWYVDGVEVHNAKTKPREEQFNSTYRVVSVLTVLHQDWLNGKEYKCKVSNKGLPSSIEKTISKAKGQPREPQVYTLPPSQEEMTKNQVSLTCLVKGFYPSDIAVEWESNGQPENNYKTTPPVLDSDGSFFLYSRLTVDKSRWQEGNVFSCSVMHEALHNHYTQKSLSLSLGGGGSGSAHPIPDSSPLLQFGGQVRQRYLYTDDACQTEAHLEIREDGTVGGAADQSPESLLQLKALKPGVIQILGVKTSRFLCQRPDGALYGSLHFDPEACSFRELLLEDGYNVYQSEAHGLPLHLPGCKSPHRDPAPRGPARFLPLPGLPPAPPEPPGILAPQPPDVGSSDPLSMVGSQGRSPSYAS

SEQ ID NO: 114 - protein, 474 aa, Artificial Sequence
  Fusion Protein
GHGEGTFTSDKSQLLEKRLVHLFIEWLIAGGHSSGKLPPKGGGGGGGSGGGGSGGGGSAESKYGPPCPPCPAPEFEGGPSVFLFPPKPKDTLMISRTPEVTCVVVDVSQEDPEVQFNWYVDGVEVHNAKTKPREEQFNSTYRVVSVLTVLHQDWLNGKEYKCKVSNKGLPSSIEKTISKAKGQPREPQVYTLPPSQEEMTKNQVSLTCLVKGFYPSDIAVEWESNGQPENNYKTTPPVLDSDGSFFLYSRLTVDKSRWQEGNVFSCSVMHEALHNHYTQKSLSLSLGGGGSGSAHPIPDSSPLLQFGGQVRQRYLYTDDACQTEAHLEIREDGTVGGAADQSPESLLQLKALKPGVIQILGVKTSRFLCQRPDGALYGSLHFDPEACSFRELLLEDGYNVYQSEAHGLPLHLPGCKSPHRDPAPRGPARFLPLPGLPPAPPEPPGILAPQPPDVGSSDPLSMVGSQGRSPSYAS

SEQ ID NO: 115 - protein, 473 aa, Artificial Sequence
  Fusion Protein
YGEGTFTSDKSQLLEKRLAHLFIEWLIKGGHSSIKPPPKGGGGGGGSGGGGSGGGGSAESKYGPPCPPCPAPEFEGGPSVFLFPPKPKDTLMISRTPEVTCVVVDVSQEDPEVQFNWYVDGVEVHNAKTKPREEQFNSTYRVVSVLTVLHQDWLNGKEYKCKVSNKGLPSSIEKTISKAKGQPREPQVYTLPPSQEEMTKNQVSLTCLVKGFYPSDIAVEWESNGQPENNYKTTPPVLDSDGSFFLYSRLTVDKSRWQEGNVFSCSVMHEALHNHYTQKSLSLSLGGGGSGSAHPIPDSSPLLQFGGQVRQRYLYTDDACQTEAHLEIREDGTVGGAADQSPESLLQLKALKPGVIQILGVKTSRFLCQRPDGALYGSLHFDPEACSFRELLLEDGYNVYQSEAHGLPLHLPGCKSPHRDPAPRGPARFLPLPGLPPAPPEPPGILAPQPPDVGSSDPLSMVGSQGRSPSYAS

SEQ ID NO: 116 - protein, 473 aa, Artificial Sequence
  Fusion Protein
HGEGTFTSDKSQLLEKRLAHLFIEWLIAGGPSKGKPPPKGGGGGGGSGGGGSGGGGSAESKYGPPCPPCPAPEFEGGPSVFLFPPKPKDTLMISRTPEVTCVVVDVSQEDPEVQFNWYVDGVEVHNAKTKPREEQFNSTYRVVSVLTVLHQDWLNGKEYKCKVSNKGLPSSIEKTISKAKGQPREPQVYTLPPSQEEMTKNQVSLTCLVKGFYPSDIAVEWESNGQPENNYKTTPPVLDSDGSFFLYSRLTVDKSRWQEGNVFSCSVMHEALHNHYTQKSLSLSLGGGGSGSAHPIPDSSPLLQFGGQVRQRYLYTDDACQTEAHLEIREDGTVGGAADQSPESLLQLKALKPGVIQILGVKTSRFLCQRPDGALYGSLHFDPEACSFRELLLEDGYNVYQSEAHGLPLHLPGCKSPHRDPAPRGPARFLPLPGLPPAPPEPPGILAPQPPDVGSSDPLSMVGSQGRSPSYAS

SEQ ID NO: 117 - protein, 473 aa, Artificial Sequence
  Fusion Protein
HGEGTFTSDKSQLLEKRAAHLFIEWLIKGGHSSIKPPPKGGGGGGGSGGGGSGGGGSAESKYGPPCPPCPAPEFEGGPSVFLFPPKPKDTLMISRTPEVTCVVVDVSQEDPEVQFNWYVDGVEVHNAKTKPREEQFNSTYRVVSVLTVLHQDWLNGKEYKCKVSNKGLPSSIEKTISKAKGQPREPQVYTLPPSQEEMTKNQVSLTCLVKGFYPSDIAVEWESNGQPENNYKTTPPVLDSDGSFFLYSRLTVDKSRWQEGNVFSCSVMHEALHNHYTQKSLSLSLGGGGSGSAHPIPDSSPLLQFGGQVRQRYLYTDDACQTEAHLEIREDGTVGGAADQSPESLLQLKALKPGVIQILGVKTSRFLCQRPDGALYGSLHFDPEACSFRELLLEDGYNVYQSEAHGLPLHLPGCKSPHRDPAPRGPARFLPLPGLPPAPPEPPGILAPQPPDVGSSDPLSMVGSQGRSPSYAS

SEQ ID NO: 118 - protein, 473 aa, Artificial Sequence
  Fusion Protein
HGEGTFTSDKSQLLEKRLAHLFIEWLIAGGHSKIKYPPKGGGGGGGSGGGGSGGGGSAESKYGPPCPPCPAPEFEGGPSVFLFPPKPKDTLMISRTPEVTCVVVDVSQEDPEVQFNWYVDGVEVHNAKTKPREEQFNSTYRVVSVLTVLHQDWLNGKEYKCKVSNKGLPSSIEKTISKAKGQPREPQVYTLPPSQEEMTKNQVSLTCLVKGFYPSDIAVEWESNGQPENNYKTTPPVLDSDGSFFLYSRLTVDKSRWQEGNVFSCSVMHEALHNHYTQKSLSLSLGGGGSGSAHPIPDSSPLLQFGGQVRQRYLYTDDACQTEAHLEIREDGTVGGAADQSPESLLQLKALKPGVIQILGVKTSRFLCQRPDGALYGSLHFDPEACSFRELLLEDGYNVYQSEAHGLPLHLPGCKSPHRDPAPRGPARFLPLPGLPPAPPEPPGILAPQPPDVGSSDPLSMVGSQGRSPSYAS

SEQ ID NO: 119 - protein, 473 aa, Artificial Sequence
  Fusion Protein
HGEGTFTSDKSQLLEKELAHLFIEWLIAGGHSSIKPPPKGGGGGGGSGGGGSGGGGSAESKYGPPCPPCPAPEFEGGPSVFLFPPKPKDTLMISRTPEVTCVVVDVSQEDPEVQFNWYVDGVEVHNAKTKPREEQFNSTYRVVSVLTVLHQDWLNGKEYKCKVSNKGLPSSIEKTISKAKGQPREPQVYTLPPSQEEMTKNQVSLTCLVKGFYPSDIAVEWESNGQPENNYKTTPPVLDSDGSFFLYSRLTVDKSRWQEGNVFSCSVMHEALHNHYTQKSLSLSLGGGGSGSAHPIPDSSPLLQFGGQVRQRYLYTDDACQTEAHLEIREDGTVGGAADQSPESLLQLKALKPGVIQILGVKTSRFLCQRPDGALYGSLHFDPEACSFRELLLEDGYNVYQSEAHGLPLHLPGCKSPHRDPAPRGPARFLPLPGLPPAPPEPPGILAPQPPDVGSSDPLSMVGSQGRSPSYAS

SEQ ID NO: 120 - protein, 473 aa, Artificial Sequence
  Fusion Protein
HGEGTFTSDKSQLLEKRLAHLFIEWLIAGGHKKGKYPPKGGGGGGGSGGGGSGGGGSAESKYGPPCPPCPAPEFEGGPSVFLFPPKPKDTLMISRTPEVTCVVVDVSQEDPEVQFNWYVDGVEVHNAKTKPREEQFNSTYRVVSVLTVLHQDWLNGKEYKCKVSNKGLPSSIEKTISKAKGQPREPQVYTLPPSQEEMTKNQVSLTCLVKGFYPSDIAVEWESNGQPENNYKTTPPVLDSDGSFFLYSRLTVDKSRWQEGNVFSCSVMHEALHNHYTQKSLSLSLGGGGSGSAHPIPDSSPLLQFGGQVRQRYLYTDDACQTEAHLEIREDGTVGGAADQSPESLLQLKALKPGVIQILGVKTSRFLCQRPDGALYGSLHFDPEACSFRELLLEDGYNVYQSEAHGLPLHLPGCKSPHRDPAPRGPARFLPLPGLPPAPPEPPGILAPQPPDVGSSDPLSMVGSQGRSPSYAS

SEQ ID NO: 121 - protein, 473 aa, Artificial Sequence
  Fusion Protein
HGEGTFTSDKSQLLEKRLAHLFIEWLIAGGPSSGRYPPKGGGGGGGSGGGGSGGGGSAESKYGPPCPPCPAPEFEGGPSVFLFPPKPKDTLMISRTPEVTCVVVDVSQEDPEVQFNWYVDGVEVHNAKTKPREEQFNSTYRVVSVLTVLHQDWLNGKEYKCKVSNKGLPSSIEKTISKAKGQPREPQVYTLPPSQEEMTKNQVSLTCLVKGFYPSDIAVEWESNGQPENNYKTTPPVLDSDGSFFLYSRLTVDKSRWQEGNVFSCSVMHEALHNHYTQKSLSLSLGGGGSGSAHPIPDSSPLLQFGGQVRQRYLYTDDACQTEAHLEIREDGTVGGAADQSPESLLQLKALKPGVIQILGVKTSRFLCQRPDGALYGSLHFDPEACSFRELLLEDGYNVYQSEAHGLPLHLPGCKSPHRDPAPRGPARFLPLPGLPPAPPEPPGILAPQPPDVGSSDPLSMVGSQGRSPSYAS

SEQ ID NO: 122 - protein, 473 aa, Artificial Sequence
  Fusion Protein
HGEGTFTSDKSQLLEKRLAHLFIEWLIAGGHSSIKPPPKGGGGGGGSGGGGSGGGGSAESKYGPPCPPCPAPEFEGGPSVFLFPPKPKDTLMISRTPEVTCVVVDVSQEDPEVQFNWYVDGVEVHNAKTKPREEQFNSTYRVVSVLTVLHQDWLNGKEYKCKVSNKGLPSSIEKTISKAKGQPREPQVYTLPPSQEEMTKNQVSLTCLVKGFYPSDIAVEWESNGQPENNYKTTPPVLDSDGSFFLYSRLTVDKSRWQEGNVFSCSVMHEALHNHYTQKSLSLSLGGGGSGSAHPIPDSSPLLQFGGQVRQRYLYTDDACQTEAHLEIREDGTVGGAADQSPESLLQLKALKPGVIQILGVKTSRFLCQRPDGALYGSLHFDPEACSFRELLLEDGYNVYQSEAHGLPLHLPGCKSPHRDPAPRGPARFLPLPGLPPAPPEPPGILAPQPPDVGSSDPLSMVGSQGRSPSYAS

SEQ ID NO: 123 - protein, 473 aa, Artificial Sequence
  Fusion Protein
HGEGTFTSDKSKLLEKRLAHLFIEWLIKGGHSSIKPPPKGGGGGGGSGGGGSGGGGSAESKYGPPCPPCPAPEFEGGPSVFLFPPKPKDTLMISRTPEVTCVVVDVSQEDPEVQFNWYVDGVEVHNAKTKPREEQFNSTYRVVSVLTVLHQDWLNGKEYKCKVSNKGLPSSIEKTISKAKGQPREPQVYTLPPSQEEMTKNQVSLTCLVKGFYPSDIAVEWESNGQPENNYKTTPPVLDSDGSFFLYSRLTVDKSRWQEGNVFSCSVMHEALHNHYTQKSLSLSLGGGGSGSAHPIPDSSPLLQFGGQVRQRYLYTDDACQTEAHLEIREDGTVGGAADQSPESLLQLKALKPGVIQILGVKTSRFLCQRPDGALYGSLHFDPEACSFRELLLEDGYNVYQSEAHGLPLHLPGCKSPHRDPAPRGPARFLPLPGLPPAPPEPPGILAPQPPDVGSSDPLSMVGSQGRSPSYAS

SEQ ID NO: 124 - protein, 473 aa, Artificial Sequence
  Fusion Protein
HGEGTFTSDKSKLLEKRLAHLFIEWLIAGGHSKGKPPPKGGGGGGGSGGGGSGGGGSAESKYGPPCPPCPAPEFEGGPSVFLFPPKPKDTLMISRTPEVTCVVVDVSQEDPEVQFNWYVDGVEVHNAKTKPREEQFNSTYRVVSVLTVLHQDWLNGKEYKCKVSNKGLPSSIEKTISKAKGQPREPQVYTLPPSQEEMTKNQVSLTCLVKGFYPSDIAVEWESNGQPENNYKTTPPVLDSDGSFFLYSRLTVDKSRWQEGNVFSCSVMHEALHNHYTQKSLSLSLGGGGSGSAHPIPDSSPLLQFGGQVRQRYLYTDDACQTEAHLEIREDGTVGGAADQSPESLLQLKALKPGVIQILGVKTSRFLCQRPDGALYGSLHFDPEACSFRELLLEDGYNVYQSEAHGLPLHLPGCKSPHRDPAPRGPARFLPLPGLPPAPPEPPGILAPQPPDVGSSDPLSMVGSQGRSPSYAS

SEQ ID NO: 125 - protein, 473 aa, Artificial Sequence
  Fusion Protein
HGEGTFTSDKSQLLEKEAAHLFIEWLIAGGHSKGKPPPKGGGGGGGSGGGGSGGGGSAESKYGPPCPPCPAPEFEGGPSVFLFPPKPKDTLMISRTPEVTCVVVDVSQEDPEVQFNWYVDGVEVHNAKTKPREEQFNSTYRVVSVLTVLHQDWLNGKEYKCKVSNKGLPSSIEKTISKAKGQPREPQVYTLPPSQEEMTKNQVSLTCLVKGFYPSDIAVEWESNGQPENNYKTTPPVLDSDGSFFLYSRLTVDKSRWQEGNVFSCSVMHEALHNHYTQKSLSLSLGGGGSGSAHPIPDSSPLLQFGGQVRQRYLYTDDACQTEAHLEIREDGTVGGAADQSPESLLQLKALKPGVIQILGVKTSRFLCQRPDGALYGSLHFDPEACSFRELLLEDGYNVYQSEAHGLPLHLPGCKSPHRDPAPRGPARFLPLPGLPPAPPEPPGILAPQPPDVGSSDPLSMVGSQGRSPSYAS

SEQ ID NO: 126 - protein, 473 aa, Artificial Sequence
  Fusion Protein
HGEGTFTSDKSKLLEKRAAHLFIEWLIAGGHSSIKPPPKGGGGGGGSGGGGSGGGGSAESKYGPPCPPCPAPEFEGGPSVFLFPPKPKDTLMISRTPEVTCVVVDVSQEDPEVQFNWYVDGVEVHNAKTKPREEQFNSTYRVVSVLTVLHQDWLNGKEYKCKVSNKGLPSSIEKTISKAKGQPREPQVYTLPPSQEEMTKNQVSLTCLVKGFYPSDIAVEWESNGQPENNYKTTPPVLDSDGSFFLYSRLTVDKSRWQEGNVFSCSVMHEALHNHYTQKSLSLSLGGGGSGSAHPIPDSSPLLQFGGQVRQRYLYTDDACQTEAHLEIREDGTVGGAADQSPESLLQLKALKPGVIQILGVKTSRFLCQRPDGALYGSLHFDPEACSFRELLLEDGYNVYQSEAHGLPLHLPGCKSPHRDPAPRGPARFLPLPGLPPAPPEPPGILAPQPPDVGSSDPLSMVGSQGRSPSYAS

SEQ ID NO: 127 - protein, 473 aa, Artificial Sequence
  Fusion Protein
HGEGTFTSDKSQLLEKRLAHLFIEWLIKGGHSSGRPPPKGGGGGGGSGGGGSGGGGSAESKYGPPCPPCPAPEFEGGPSVFLFPPKPKDTLMISRTPEVTCVVVDVSQEDPEVQFNWYVDGVEVHNAKTKPREEQFNSTYRVVSVLTVLHQDWLNGKEYKCKVSNKGLPSSIEKTISKAKGQPREPQVYTLPPSQEEMTKNQVSLTCLVKGFYPSDIAVEWESNGQPENNYKTTPPVLDSDGSFFLYSRLTVDKSRWQEGNVFSCSVMHEALHNHYTQKSLSLSLGGGGSGSAHPIPDSSPLLQFGGQVRQRYLYTDDACQTEAHLEIREDGTVGGAADQSPESLLQLKALKPGVIQILGVKTSRFLCQRPDGALYGSLHFDPEACSFRELLLEDGYNVYQSEAHGLPLHLPGCKSPHRDPAPRGPARFLPLPGLPPAPPEPPGILAPQPPDVGSSDPLSMVGSQGRSPSYAS

SEQ ID NO: 128 - protein, 473 aa, Artificial Sequence
  Fusion Protein
HGEGTFTSDKSQLLEKRLAHLFIEWLIKGGHSKGKYPPKGGGGGGGSGGGGSGGGGSAESKYGPPCPPCPAPEFEGGPSVFLFPPKPKDTLMISRTPEVTCVVVDVSQEDPEVQFNWYVDGVEVHNAKTKPREEQFNSTYRVVSVLTVLHQDWLNGKEYKCKVSNKGLPSSIEKTISKAKGQPREPQVYTLPPSQEEMTKNQVSLTCLVKGFYPSDIAVEWESNGQPENNYKTTPPVLDSDGSFFLYSRLTVDKSRWQEGNVFSCSVMHEALHNHYTQKSLSLSLGGGGSGSAHPIPDSSPLLQFGGQVRQRYLYTDDACQTEAHLEIREDGTVGGAADQSPESLLQLKALKPGVIQILGVKTSRFLCQRPDGALYGSLHFDPEACSFRELLLEDGYNVYQSEAHGLPLHLPGCKSPHRDPAPRGPARFLPLPGLPPAPPEPPGILAPQPPDVGSSDPLSMVGSQGRSPSYAS

SEQ ID NO: 129 - protein, 473 aa, Artificial Sequence
  Fusion Protein
HGEGTFTSDKSQLLEERLAHLFIEWLIAGGHSKQKPPPKGGGGGGGSGGGGSGGGGSAESKYGPPCPPCPAPEFEGGPSVFLFPPKPKDTLMISRTPEVTCVVVDVSQEDPEVQFNWYVDGVEVHNAKTKPREEQFNSTYRVVSVLTVLHQDWLNGKEYKCKVSNKGLPSSIEKTISKAKGQPREPQVYTLPPSQEEMTKNQVSLTCLVKGFYPSDIAVEWESNGQPENNYKTTPPVLDSDGSFFLYSRLTVDKSRWQEGNVFSCSVMHEALHNHYTQKSLSLSLGGGGSGSAHPIPDSSPLLQFGGQVRQRYLYTDDACQTEAHLEIREDGTVGGAADQSPESLLQLKALKPGVIQILGVKTSRFLCQRPDGALYGSLHFDPEACSFRELLLEDGYNVYQSEAHGLPLHLPGCKSPHRDPAPRGPARFLPLPGLPPAPPEPPGILAPQPPDVGSSDPLSMVGSQGRSPSYAS

SEQ ID NO: 130 - protein, 473 aa, Artificial Sequence
  Fusion Protein
HGEGTFTSDKSQLLEKELAHLFIEWLLAGGHSKGKPPPKGGGGGGGSGGGGSGGGGSAESKYGPPCPPCPAPEFEGGPSVFLFPPKPKDTLMISRTPEVTCVVVDVSQEDPEVQFNWYVDGVEVHNAKTKPREEQFNSTYRVVSVLTVLHQDWLNGKEYKCKVSNKGLPSSIEKTISKAKGQPREPQVYTLPPSQEEMTKNQVSLTCLVKGFYPSDIAVEWESNGQPENNYKTTPPVLDSDGSFFLYSRLTVDKSRWQEGNVFSCSVMHEALHNHYTQKSLSLSLGGGGSGSAHPIPDSSPLLQFGGQVRQRYLYTDDACQTEAHLEIREDGTVGGAADQSPESLLQLKALKPGVIQILGVKTSRFLCQRPDGALYGSLHFDPEACSFRELLLEDGYNVYQSEAHGLPLHLPGCKSPHRDPAPRGPARFLPLPGLPPAPPEPPGILAPQPPDVGSSDPLSMVGSQGRSPSYAS

SEQ ID NO: 131 - protein, 473 aa, Artificial Sequence
  Fusion Protein
HGEGTFTSDKSQLLEKELAHLFIEWLIAGGHSKQKPPPKGGGGGGGSGGGGSGGGGSAESKYGPPCPPCPAPEFEGGPSVFLFPPKPKDTLMISRTPEVTCVVVDVSQEDPEVQFNWYVDGVEVHNAKTKPREEQFNSTYRVVSVLTVLHQDWLNGKEYKCKVSNKGLPSSIEKTISKAKGQPREPQVYTLPPSQEEMTKNQVSLTCLVKGFYPSDIAVEWESNGQPENNYKTTPPVLDSDGSFFLYSRLTVDKSRWQEGNVFSCSVMHEALHNHYTQKSLSLSLGGGGSGSAHPIPDSSPLLQFGGQVRQRYLYTDDACQTEAHLEIREDGTVGGAADQSPESLLQLKALKPGVIQILGVKTSRFLCQRPDGALYGSLHFDPEACSFRELLLEDGYNVYQSEAHGLPLHLPGCKSPHRDPAPRGPARFLPLPGLPPAPPEPPGILAPQPPDVGSSDPLSMVGSQGRSPSYAS

SEQ ID NO: 132 - protein, 473 aa, Artificial Sequence
  Fusion Protein
HGEGTFTSDKSQLLEKRLAHLFIEWLLAGGHSSGKLSPKGGGGGGGSGGGGSGGGGSAESKYGPPCPPCPAPEFEGGPSVFLFPPKPKDTLMISRTPEVTCVVVDVSQEDPEVQFNWYVDGVEVHNAKTKPREEQFNSTYRVVSVLTVLHQDWLNGKEYKCKVSNKGLPSSIEKTISKAKGQPREPQVYTLPPSQEEMTKNQVSLTCLVKGFYPSDIAVEWESNGQPENNYKTTPPVLDSDGSFFLYSRLTVDKSRWQEGNVFSCSVMHEALHNHYTQKSLSLSLGGGGSGSAHPIPDSSPLLQFGGQVRQRYLYTDDACQTEAHLEIREDGTVGGAADQSPESLLQLKALKPGVIQILGVKTSRFLCQRPDGALYGSLHFDPEACSFRELLLEDGYNVYQSEAHGLPLHLPGCKSPHRDPAPRGPARFLPLPGLPPAPPEPPGILAPQPPDVGSSDPLSMVGSQGRSPSYAS

SEQ ID NO: 133 - protein, 473 aa, Artificial Sequence
  Fusion Protein
HGEGTFTSDKSQLLEKRLAHLFIEWLIKGGHSKQKPPPKGGGGGGGSGGGGSGGGGSAESKYGPPCPPCPAPEFEGGPSVFLFPPKPKDTLMISRTPEVTCVVVDVSQEDPEVQFNWYVDGVEVHNAKTKPREEQFNSTYRVVSVLTVLHQDWLNGKEYKCKVSNKGLPSSIEKTISKAKGQPREPQVYTLPPSQEEMTKNQVSLTCLVKGFYPSDIAVEWESNGQPENNYKTTPPVLDSDGSFFLYSRLTVDKSRWQEGNVFSCSVMHEALHNHYTQKSLSLSLGGGGSGSAHPIPDSSPLLQFGGQVRQRYLYTDDACQTEAHLEIREDGTVGGAADQSPESLLQLKALKPGVIQILGVKTSRFLCQRPDGALYGSLHFDPEACSFRELLLEDGYNVYQSEAHGLPLHLPGCKSPHRDPAPRGPARFLPLPGLPPAPPEPPGILAPQPPDVGSSDPLSMVGSQGRSPSYAS

SEQ ID NO: 134 - protein, 473 aa, Artificial Sequence
  Fusion Protein
HGEGTFTSDKSKLLEKRLAHLFIEWLIKGGHKSGKPPPKGGGGGGGSGGGGSGGGGSAESKYGPPCPPCPAPEFEGGPSVFLFPPKPKDTLMISRTPEVTCVVVDVSQEDPEVQFNWYVDGVEVHNAKTKPREEQFNSTYRVVSVLTVLHQDWLNGKEYKCKVSNKGLPSSIEKTISKAKGQPREPQVYTLPPSQEEMTKNQVSLTCLVKGFYPSDIAVEWESNGQPENNYKTTPPVLDSDGSFFLYSRLTVDKSRWQEGNVFSCSVMHEALHNHYTQKSLSLSLGGGGSGSAHPIPDSSPLLQFGGQVRQRYLYTDDACQTEAHLEIREDGTVGGAADQSPESLLQLKALKPGVIQILGVKTSRFLCQRPDGALYGSLHFDPEACSFRELLLEDGYNVYQSEAHGLPLHLPGCKSPHRDPAPRGPARFLPLPGLPPAPPEPPGILAPQPPDVGSSDPLSMVGSQGRSPSYAS

SEQ ID NO: 135 - protein, 473 aa, Artificial Sequence
  Fusion Protein
HGEGTFTSDKSQLLEERLVHLFIEWLIAGGHSSGKLPPKGGGGGGGSGGGGSGGGGSAESKYGPPCPPCPAPEFEGGPSVFLFPPKPKDTLMISRTPEVTCVVVDVSQEDPEVQFNWYVDGVEVHNAKTKPREEQFNSTYRVVSVLTVLHQDWLNGKEYKCKVSNKGLPSSIEKTISKAKGQPREPQVYTLPPSQEEMTKNQVSLTCLVKGFYPSDIAVEWESNGQPENNYKTTPPVLDSDGSFFLYSRLTVDKSRWQEGNVFSCSVMHEALHNHYTQKSLSLSLGGGGSGSAHPIPDSSPLLQFGGQVRQRYLYTDDACQTEAHLEIREDGTVGGAADQSPESLLQLKALKPGVIQILGVKTSRFLCQRPDGALYGSLHFDPEACSFRELLLEDGYNVYQSEAHGLPLHLPGCKSPHRDPAPRGPARFLPLPGLPPAPPEPPGILAPQPPDVGSSDPLSMVGSQGRSPSYAS

SEQ ID NO: 136 - protein, 473 aa, Artificial Sequence
  Fusion Protein
HGEGTFTSDKSKLLEKRLAHLFIEWLLAGGHSKGKPPPKGGGGGGGSGGGGSGGGGSAESKYGPPCPPCPAPEFEGGPSVFLFPPKPKDTLMISRTPEVTCVVVDVSQEDPEVQFNWYVDGVEVHNAKTKPREEQFNSTYRVVSVLTVLHQDWLNGKEYKCKVSNKGLPSSIEKTISKAKGQPREPQVYTLPPSQEEMTKNQVSLTCLVKGFYPSDIAVEWESNGQPENNYKTTPPVLDSDGSFFLYSRLTVDKSRWQEGNVFSCSVMHEALHNHYTQKSLSLSLGGGGSGSAHPIPDSSPLLQFGGQVRQRYLYTDDACQTEAHLEIREDGTVGGAADQSPESLLQLKALKPGVIQILGVKTSRFLCQRPDGALYGSLHFDPEACSFRELLLEDGYNVYQSEAHGLPLHLPGCKSPHRDPAPRGPARFLPLPGLPPAPPEPPGILAPQPPDVGSSDPLSMVGSQGRSPSYAS

SEQ ID NO: 137 - protein, 473 aa, Artificial Sequence
  Fusion Protein
HGEGTFTSDKSQLLEKRAAHLFIEWLLAGGHSSIKPPPKGGGGGGGSGGGGSGGGGSAESKYGPPCPPCPAPEFEGGPSVFLFPPKPKDTLMISRTPEVTCVVVDVSQEDPEVQFNWYVDGVEVHNAKTKPREEQFNSTYRVVSVLTVLHQDWLNGKEYKCKVSNKGLPSSIEKTISKAKGQPREPQVYTLPPSQEEMTKNQVSLTCLVKGFYPSDIAVEWESNGQPENNYKTTPPVLDSDGSFFLYSRLTVDKSRWQEGNVFSCSVMHEALHNHYTQKSLSLSLGGGGSGSAHPIPDSSPLLQFGGQVRQRYLYTDDACQTEAHLEIREDGTVGGAADQSPESLLQLKALKPGVIQILGVKTSRFLCQRPDGALYGSLHFDPEACSFRELLLEDGYNVYQSEAHGLPLHLPGCKSPHRDPAPRGPARFLPLPGLPPAPPEPPGILAPQPPDVGSSDPLSMVGSQGRSPSYAS

SEQ ID NO: 138 - protein, 473 aa, Artificial Sequence
  Fusion Protein
HGEGTFTSDKSQLLEKELAHLFIEWLIAGGHSSIRPPPKGGGGGGGSGGGGSGGGGSAESKYGPPCPPCPAPEFEGGPSVFLFPPKPKDTLMISRTPEVTCVVVDVSQEDPEVQFNWYVDGVEVHNAKTKPREEQFNSTYRVVSVLTVLHQDWLNGKEYKCKVSNKGLPSSIEKTISKAKGQPREPQVYTLPPSQEEMTKNQVSLTCLVKGFYPSDIAVEWESNGQPENNYKTTPPVLDSDGSFFLYSRLTVDKSRWQEGNVFSCSVMHEALHNHYTQKSLSLSLGGGGSGSAHPIPDSSPLLQFGGQVRQRYLYTDDACQTEAHLEIREDGTVGGAADQSPESLLQLKALKPGVIQILGVKTSRFLCQRPDGALYGSLHFDPEACSFRELLLEDGYNVYQSEAHGLPLHLPGCKSPHRDPAPRGPARFLPLPGLPPAPPEPPGILAPQPPDVGSSDPLSMVGSQGRSPSYAS

SEQ ID NO: 139 - protein, 473 aa, Artificial Sequence
  Fusion Protein
HGEGTFTSDKSQLLEKRAAHLFIEWLIAGGHSSGKLSPKGGGGGGGSGGGGSGGGGSAESKYGPPCPPCPAPEFEGGPSVFLFPPKPKDTLMISRTPEVTCVVVDVSQEDPEVQFNWYVDGVEVHNAKTKPREEQFNSTYRVVSVLTVLHQDWLNGKEYKCKVSNKGLPSSIEKTISKAKGQPREPQVYTLPPSQEEMTKNQVSLTCLVKGFYPSDIAVEWESNGQPENNYKTTPPVLDSDGSFFLYSRLTVDKSRWQEGNVFSCSVMHEALHNHYTQKSLSLSLGGGGSGSAHPIPDSSPLLQFGGQVRQRYLYTDDACQTEAHLEIREDGTVGGAADQSPESLLQLKALKPGVIQILGVKTSRFLCQRPDGALYGSLHFDPEACSFRELLLEDGYNVYQSEAHGLPLHLPGCKSPHRDPAPRGPARFLPLPGLPPAPPEPPGILAPQPPDVGSSDPLSMVGSQGRSPSYAS

SEQ ID NO: 140 - protein, 473 aa, Artificial Sequence
  Fusion Protein
HGEGTFTSDKSQLLEKRLAHLFIEWLIKGGHSKGKPPPKGGGGGGGSGGGGSGGGGSAESKYGPPCPPCPAPEFEGGPSVFLFPPKPKDTLMISRTPEVTCVVVDVSQEDPEVQFNWYVDGVEVHNAKTKPREEQFNSTYRVVSVLTVLHQDWLNGKEYKCKVSNKGLPSSIEKTISKAKGQPREPQVYTLPPSQEEMTKNQVSLTCLVKGFYPSDIAVEWESNGQPENNYKTTPPVLDSDGSFFLYSRLTVDKSRWQEGNVFSCSVMHEALHNHYTQKSLSLSLGGGGSGSAHPIPDSSPLLQFGGQVRQRYLYTDDACQTEAHLEIREDGTVGGAADQSPESLLQLKALKPGVIQILGVKTSRFLCQRPDGALYGSLHFDPEACSFRELLLEDGYNVYQSEAHGLPLHLPGCKSPHRDPAPRGPARFLPLPGLPPAPPEPPGILAPQPPDVGSSDPLSMVGSQGRSPSYAS

SEQ ID NO: 141 - protein, 473 aa, Artificial Sequence
  Fusion Protein
HGEGTFTSDKSKLLEKRAAHLFIEWLIAGGHSKGKPPPKGGGGGGGSGGGGSGGGGSAESKYGPPCPPCPAPEFEGGPSVFLFPPKPKDTLMISRTPEVTCVVVDVSQEDPEVQFNWYVDGVEVHNAKTKPREEQFNSTYRVVSVLTVLHQDWLNGKEYKCKVSNKGLPSSIEKTISKAKGQPREPQVYTLPPSQEEMTKNQVSLTCLVKGFYPSDIAVEWESNGQPENNYKTTPPVLDSDGSFFLYSRLTVDKSRWQEGNVFSCSVMHEALHNHYTQKSLSLSLGGGGSGSAHPIPDSSPLLQFGGQVRQRYLYTDDACQTEAHLEIREDGTVGGAADQSPESLLQLKALKPGVIQILGVKTSRFLCQRPDGALYGSLHFDPEACSFRELLLEDGYNVYQSEAHGLPLHLPGCKSPHRDPAPRGPARFLPLPGLPPAPPEPPGILAPQPPDVGSSDPLSMVGSQGRSPSYAS

SEQ ID NO: 142 - protein, 473 aa, Artificial Sequence
  Fusion Protein
HGEGTFTSDKSQLLEKRLAHLFIEWLIAGGHKSGKYSPKGGGGGGGSGGGGSGGGGSAESKYGPPCPPCPAPEFEGGPSVFLFPPKPKDTLMISRTPEVTCVVVDVSQEDPEVQFNWYVDGVEVHNAKTKPREEQFNSTYRVVSVLTVLHQDWLNGKEYKCKVSNKGLPSSIEKTISKAKGQPREPQVYTLPPSQEEMTKNQVSLTCLVKGFYPSDIAVEWESNGQPENNYKTTPPVLDSDGSFFLYSRLTVDKSRWQEGNVFSCSVMHEALHNHYTQKSLSLSLGGGGSGSAHPIPDSSPLLQFGGQVRQRYLYTDDACQTEAHLEIREDGTVGGAADQSPESLLQLKALKPGVIQILGVKTSRFLCQRPDGALYGSLHFDPEACSFRELLLEDGYNVYQSEAHGLPLHLPGCKSPHRDPAPRGPARFLPLPGLPPAPPEPPGILAPQPPDVGSSDPLSMVGSQGRSPSYAS

SEQ ID NO: 143 - protein, 473 aa, Artificial Sequence
  Fusion Protein
HGEGTFTSDKSQLLEKRLAHLFIEWLLKGGHSKGKPPPKGGGGGGGSGGGGSGGGGSAESKYGPPCPPCPAPEFEGGPSVFLFPPKPKDTLMISRTPEVTCVVVDVSQEDPEVQFNWYVDGVEVHNAKTKPREEQFNSTYRVVSVLTVLHQDWLNGKEYKCKVSNKGLPSSIEKTISKAKGQPREPQVYTLPPSQEEMTKNQVSLTCLVKGFYPSDIAVEWESNGQPENNYKTTPPVLDSDGSFFLYSRLTVDKSRWQEGNVFSCSVMHEALHNHYTQKSLSLSLGGGGSGSAHPIPDSSPLLQFGGQVRQRYLYTDDACQTEAHLEIREDGTVGGAADQSPESLLQLKALKPGVIQILGVKTSRFLCQRPDGALYGSLHFDPEACSFRELLLEDGYNVYQSEAHGLPLHLPGCKSPHRDPAPRGPARFLPLPGLPPAPPEPPGILAPQPPDVGSSDPLSMVGSQGRSPSYAS

SEQ ID NO: 144 - protein, 473 aa, Artificial Sequence
  Fusion Protein
HGEGTFTSDKSQLLEKRLAHLFIEWLIKGGPSSIKPPPKGGGGGGGSGGGGSGGGGSAESKYGPPCPPCPAPEFEGGPSVFLFPPKPKDTLMISRTPEVTCVVVDVSQEDPEVQFNWYVDGVEVHNAKTKPREEQFNSTYRVVSVLTVLHQDWLNGKEYKCKVSNKGLPSSIEKTISKAKGQPREPQVYTLPPSQEEMTKNQVSLTCLVKGFYPSDIAVEWESNGQPENNYKTTPPVLDSDGSFFLYSRLTVDKSRWQEGNVFSCSVMHEALHNHYTQKSLSLSLGGGGSGSAHPIPDSSPLLQFGGQVRQRYLYTDDACQTEAHLEIREDGTVGGAADQSPESLLQLKALKPGVIQILGVKTSRFLCQRPDGALYGSLHFDPEACSFRELLLEDGYNVYQSEAHGLPLHLPGCKSPHRDPAPRGPARFLPLPGLPPAPPEPPGILAPQPPDVGSSDPLSMVGSQGRSPSYAS

SEQ ID NO: 145 - protein, 473 aa, Artificial Sequence
  Fusion Protein
HGEGTFTSDKSQLLEKRLAHLFIEWLIKGGHSSIRPPPKGGGGGGGSGGGGSGGGGSAESKYGPPCPPCPAPEFEGGPSVFLFPPKPKDTLMISRTPEVTCVVVDVSQEDPEVQFNWYVDGVEVHNAKTKPREEQFNSTYRVVSVLTVLHQDWLNGKEYKCKVSNKGLPSSIEKTISKAKGQPREPQVYTLPPSQEEMTKNQVSLTCLVKGFYPSDIAVEWESNGQPENNYKTTPPVLDSDGSFFLYSRLTVDKSRWQEGNVFSCSVMHEALHNHYTQKSLSLSLGGGGSGSAHPIPDSSPLLQFGGQVRQRYLYTDDACQTEAHLEIREDGTVGGAADQSPESLLQLKALKPGVIQILGVKTSRFLCQRPDGALYGSLHFDPEACSFRELLLEDGYNVYQSEAHGLPLHLPGCKSPHRDPAPRGPARFLPLPGLPPAPPEPPGILAPQPPDVGSSDPLSMVGSQGRSPSYAS

SEQ ID NO: 146 - protein, 473 aa, Artificial Sequence
  Fusion Protein
HGEGTFTSDKSQLLEKRLAHLFIEWLLAGGHKKGKPPPKGGGGGGGSGGGGSGGGGSAESKYGPPCPPCPAPEFEGGPSVFLFPPKPKDTLMISRTPEVTCVVVDVSQEDPEVQFNWYVDGVEVHNAKTKPREEQFNSTYRVVSVLTVLHQDWLNGKEYKCKVSNKGLPSSIEKTISKAKGQPREPQVYTLPPSQEEMTKNQVSLTCLVKGFYPSDIAVEWESNGQPENNYKTTPPVLDSDGSFFLYSRLTVDKSRWQEGNVFSCSVMHEALHNHYTQKSLSLSLGGGGSGSAHPIPDSSPLLQFGGQVRQRYLYTDDACQTEAHLEIREDGTVGGAADQSPESLLQLKALKPGVIQILGVKTSRFLCQRPDGALYGSLHFDPEACSFRELLLEDGYNVYQSEAHGLPLHLPGCKSPHRDPAPRGPARFLPLPGLPPAPPEPPGILAPQPPDVGSSDPLSMVGSQGRSPSYAS

SEQ ID NO: 147 - protein, 473 aa, Artificial Sequence
  Fusion Protein
HGEGTFTSDKSQLLEKRLAHLFIEWLLKGGHSSGRPPPKGGGGGGGSGGGGSGGGGSAESKYGPPCPPCPAPEFEGGPSVFLFPPKPKDTLMISRTPEVTCVVVDVSQEDPEVQFNWYVDGVEVHNAKTKPREEQFNSTYRVVSVLTVLHQDWLNGKEYKCKVSNKGLPSSIEKTISKAKGQPREPQVYTLPPSQEEMTKNQVSLTCLVKGFYPSDIAVEWESNGQPENNYKTTPPVLDSDGSFFLYSRLTVDKSRWQEGNVFSCSVMHEALHNHYTQKSLSLSLGGGGSGSAHPIPDSSPLLQFGGQVRQRYLYTDDACQTEAHLEIREDGTVGGAADQSPESLLQLKALKPGVIQILGVKTSRFLCQRPDGALYGSLHFDPEACSFRELLLEDGYNVYQSEAHGLPLHLPGCKSPHRDPAPRGPARFLPLPGLPPAPPEPPGILAPQPPDVGSSDPLSMVGSQGRSPSYAS

SEQ ID NO: 148 - protein, 473 aa, Artificial Sequence
  Fusion Protein
HGEGTFTSDKSQLLEKRLAHLFIEWLIAGGPSSGKYSPKGGGGGGGSGGGGSGGGGSAESKYGPPCPPCPAPEFEGGPSVFLFPPKPKDTLMISRTPEVTCVVVDVSQEDPEVQFNWYVDGVEVHNAKTKPREEQFNSTYRVVSVLTVLHQDWLNGKEYKCKVSNKGLPSSIEKTISKAKGQPREPQVYTLPPSQEEMTKNQVSLTCLVKGFYPSDIAVEWESNGQPENNYKTTPPVLDSDGSFFLYSRLTVDKSRWQEGNVFSCSVMHEALHNHYTQKSLSLSLGGGGSGSAHPIPDSSPLLQFGGQVRQRYLYTDDACQTEAHLEIREDGTVGGAADQSPESLLQLKALKPGVIQILGVKTSRFLCQRPDGALYGSLHFDPEACSFRELLLEDGYNVYQSEAHGLPLHLPGCKSPHRDPAPRGPARFLPLPGLPPAPPEPPGILAPQPPDVGSSDPLSMVGSQGRSPSYAS

SEQ ID NO: 149 - protein, 473 aa, Artificial Sequence
  Fusion Protein
HGEGTFTSDKSQLLEKRAAHLFIEWLIAGGPSSGKLPPKGGGGGGGSGGGGSGGGGSAESKYGPPCPPCPAPEFEGGPSVFLFPPKPKDTLMISRTPEVTCVVVDVSQEDPEVQFNWYVDGVEVHNAKTKPREEQFNSTYRVVSVLTVLHQDWLNGKEYKCKVSNKGLPSSIEKTISKAKGQPREPQVYTLPPSQEEMTKNQVSLTCLVKGFYPSDIAVEWESNGQPENNYKTTPPVLDSDGSFFLYSRLTVDKSRWQEGNVFSCSVMHEALHNHYTQKSLSLSLGGGGSGSAHPIPDSSPLLQFGGQVRQRYLYTDDACQTEAHLEIREDGTVGGAADQSPESLLQLKALKPGVIQILGVKTSRFLCQRPDGALYGSLHFDPEACSFRELLLEDGYNVYQSEAHGLPLHLPGCKSPHRDPAPRGPARFLPLPGLPPAPPEPPGILAPQPPDVGSSDPLSMVGSQGRSPSYAS

SEQ ID NO: 150 - protein, 473 aa, Artificial Sequence
  Fusion Protein
HGEGTFTSDKSQLLEKELAHLFIEWLIAGGHSKGRPPPKGGGGGGGSGGGGSGGGGSAESKYGPPCPPCPAPEFEGGPSVFLFPPKPKDTLMISRTPEVTCVVVDVSQEDPEVQFNWYVDGVEVHNAKTKPREEQFNSTYRVVSVLTVLHQDWLNGKEYKCKVSNKGLPSSIEKTISKAKGQPREPQVYTLPPSQEEMTKNQVSLTCLVKGFYPSDIAVEWESNGQPENNYKTTPPVLDSDGSFFLYSRLTVDKSRWQEGNVFSCSVMHEALHNHYTQKSLSLSLGGGGSGSAHPIPDSSPLLQFGGQVRQRYLYTDDACQTEAHLEIREDGTVGGAADQSPESLLQLKALKPGVIQILGVKTSRFLCQRPDGALYGSLHFDPEACSFRELLLEDGYNVYQSEAHGLPLHLPGCKSPHRDPAPRGPARFLPLPGLPPAPPEPPGILAPQPPDVGSSDPLSMVGSQGRSPSYAS

SEQ ID NO: 151 - protein, 473 aa, Artificial Sequence
  Fusion Protein
HGEGTFTSDKSQLLEKRLAHLFIEWLIAGGHSSGRYSPKGGGGGGGSGGGGSGGGGSAESKYGPPCPPCPAPEFEGGPSVFLFPPKPKDTLMISRTPEVTCVVVDVSQEDPEVQFNWYVDGVEVHNAKTKPREEQFNSTYRVVSVLTVLHQDWLNGKEYKCKVSNKGLPSSIEKTISKAKGQPREPQVYTLPPSQEEMTKNQVSLTCLVKGFYPSDIAVEWESNGQPENNYKTTPPVLDSDGSFFLYSRLTVDKSRWQEGNVFSCSVMHEALHNHYTQKSLSLSLGGGGSGSAHPIPDSSPLLQFGGQVRQRYLYTDDACQTEAHLEIREDGTVGGAADQSPESLLQLKALKPGVIQILGVKTSRFLCQRPDGALYGSLHFDPEACSFRELLLEDGYNVYQSEAHGLPLHLPGCKSPHRDPAPRGPARFLPLPGLPPAPPEPPGILAPQPPDVGSSDPLSMVGSQGRSPSYAS

SEQ ID NO: 152 - protein, 473 aa, Artificial Sequence
  Fusion Protein
HGEGTFTSDKSQLLEKRLAHLFIEWLLAGGHSSIRPPPKGGGGGGGSGGGGSGGGGSAESKYGPPCPPCPAPEFEGGPSVFLFPPKPKDTLMISRTPEVTCVVVDVSQEDPEVQFNWYVDGVEVHNAKTKPREEQFNSTYRVVSVLTVLHQDWLNGKEYKCKVSNKGLPSSIEKTISKAKGQPREPQVYTLPPSQEEMTKNQVSLTCLVKGFYPSDIAVEWESNGQPENNYKTTPPVLDSDGSFFLYSRLTVDKSRWQEGNVFSCSVMHEALHNHYTQKSLSLSLGGGGSGSAHPIPDSSPLLQFGGQVRQRYLYTDDACQTEAHLEIREDGTVGGAADQSPESLLQLKALKPGVIQILGVKTSRFLCQRPDGALYGSLHFDPEACSFRELLLEDGYNVYQSEAHGLPLHLPGCKSPHRDPAPRGPARFLPLPGLPPAPPEPPGILAPQPPDVGSSDPLSMVGSQGRSPSYAS

SEQ ID NO: 153 - protein, 473 aa, Artificial Sequence
  Fusion Protein
HGEGTFTSDKSQLLEKRLAHLFIEWLLAGGHSSIKPPPKGGGGGGGSGGGGSGGGGSAESKYGPPCPPCPAPEFEGGPSVFLFPPKPKDTLMISRTPEVTCVVVDVSQEDPEVQFNWYVDGVEVHNAKTKPREEQFNSTYRVVSVLTVLHQDWLNGKEYKCKVSNKGLPSSIEKTISKAKGQPREPQVYTLPPSQEEMTKNQVSLTCLVKGFYPSDIAVEWESNGQPENNYKTTPPVLDSDGSFFLYSRLTVDKSRWQEGNVFSCSVMHEALHNHYTQKSLSLSLGGGGSGSAHPIPDSSPLLQFGGQVRQRYLYTDDACQTEAHLEIREDGTVGGAADQSPESLLQLKALKPGVIQILGVKTSRFLCQRPDGALYGSLHFDPEACSFRELLLEDGYNVYQSEAHGLPLHLPGCKSPHRDPAPRGPARFLPLPGLPPAPPEPPGILAPQPPDVGSSDPLSMVGSQGRSPSYAS

SEQ ID NO: 154 - protein, 473 aa, Artificial Sequence
  Fusion Protein
HGEGTFTSDKSQLLEKEAAHLFIEWLIAGGHSSIKPPPKGGGGGGGSGGGGSGGGGSAESKYGPPCPPCPAPEFEGGPSVFLFPPKPKDTLMISRTPEVTCVVVDVSQEDPEVQFNWYVDGVEVHNAKTKPREEQFNSTYRVVSVLTVLHQDWLNGKEYKCKVSNKGLPSSIEKTISKAKGQPREPQVYTLPPSQEEMTKNQVSLTCLVKGFYPSDIAVEWESNGQPENNYKTTPPVLDSDGSFFLYSRLTVDKSRWQEGNVFSCSVMHEALHNHYTQKSLSLSLGGGGSGSAHPIPDSSPLLQFGGQVRQRYLYTDDACQTEAHLEIREDGTVGGAADQSPESLLQLKALKPGVIQILGVKTSRFLCQRPDGALYGSLHFDPEACSFRELLLEDGYNVYQSEAHGLPLHLPGCKSPHRDPAPRGPARFLPLPGLPPAPPEPPGILAPQPPDVGSSDPLSMVGSQGRSPSYAS

SEQ ID NO: 155 - protein, 473 aa, Artificial Sequence
  Fusion Protein
HGEGTFTSDKSQLLEKRLAHLFIEWLIAGGHSKGRLPPKGGGGGGGSGGGGSGGGGSAESKYGPPCPPCPAPEFEGGPSVFLFPPKPKDTLMISRTPEVTCVVVDVSQEDPEVQFNWYVDGVEVHNAKTKPREEQFNSTYRVVSVLTVLHQDWLNGKEYKCKVSNKGLPSSIEKTISKAKGQPREPQVYTLPPSQEEMTKNQVSLTCLVKGFYPSDIAVEWESNGQPENNYKTTPPVLDSDGSFFLYSRLTVDKSRWQEGNVFSCSVMHEALHNHYTQKSLSLSLGGGGSGSAHPIPDSSPLLQFGGQVRQRYLYTDDACQTEAHLEIREDGTVGGAADQSPESLLQLKALKPGVIQILGVKTSRFLCQRPDGALYGSLHFDPEACSFRELLLEDGYNVYQSEAHGLPLHLPGCKSPHRDPAPRGPARFLPLPGLPPAPPEPPGILAPQPPDVGSSDPLSMVGSQGRSPSYAS

SEQ ID NO: 156 - protein, 473 aa, Artificial Sequence
  Fusion Protein
HGEGTFTSDKSQLLEKRLAHLFIEWLIAGGHSSGRLSPKGGGGGGGSGGGGSGGGGSAESKYGPPCPPCPAPEFEGGPSVFLFPPKPKDTLMISRTPEVTCVVVDVSQEDPEVQFNWYVDGVEVHNAKTKPREEQFNSTYRVVSVLTVLHQDWLNGKEYKCKVSNKGLPSSIEKTISKAKGQPREPQVYTLPPSQEEMTKNQVSLTCLVKGFYPSDIAVEWESNGQPENNYKTTPPVLDSDGSFFLYSRLTVDKSRWQEGNVFSCSVMHEALHNHYTQKSLSLSLGGGGSGSAHPIPDSSPLLQFGGQVRQRYLYTDDACQTEAHLEIREDGTVGGAADQSPESLLQLKALKPGVIQILGVKTSRFLCQRPDGALYGSLHFDPEACSFRELLLEDGYNVYQSEAHGLPLHLPGCKSPHRDPAPRGPARFLPLPGLPPAPPEPPGILAPQPPDVGSSDPLSMVGSQGRSPSYAS

SEQ ID NO: 157 - protein, 473 aa, Artificial Sequence
  Fusion Protein
HGEGTFTSDKSQLLEKRLAHLFIEWLIAGGPSKGRPPPKGGGGGGGSGGGGSGGGGSAESKYGPPCPPCPAPEFEGGPSVFLFPPKPKDTLMISRTPEVTCVVVDVSQEDPEVQFNWYVDGVEVHNAKTKPREEQFNSTYRVVSVLTVLHQDWLNGKEYKCKVSNKGLPSSIEKTISKAKGQPREPQVYTLPPSQEEMTKNQVSLTCLVKGFYPSDIAVEWESNGQPENNYKTTPPVLDSDGSFFLYSRLTVDKSRWQEGNVFSCSVMHEALHNHYTQKSLSLSLGGGGSGSAHPIPDSSPLLQFGGQVRQRYLYTDDACQTEAHLEIREDGTVGGAADQSPESLLQLKALKPGVIQILGVKTSRFLCQRPDGALYGSLHFDPEACSFRELLLEDGYNVYQSEAHGLPLHLPGCKSPHRDPAPRGPARFLPLPGLPPAPPEPPGILAPQPPDVGSSDPLSMVGSQGRSPSYAS

SEQ ID NO: 158 - protein, 473 aa, Artificial Sequence
  Fusion Protein
HGEGTFTSDKSQLLEKRLAHLFIEWLIKGGHSKGRPPPKGGGGGGGSGGGGSGGGGSAESKYGPPCPPCPAPEFEGGPSVFLFPPKPKDTLMISRTPEVTCVVVDVSQEDPEVQFNWYVDGVEVHNAKTKPREEQFNSTYRVVSVLTVLHQDWLNGKEYKCKVSNKGLPSSIEKTISKAKGQPREPQVYTLPPSQEEMTKNQVSLTCLVKGFYPSDIAVEWESNGQPENNYKTTPPVLDSDGSFFLYSRLTVDKSRWQEGNVFSCSVMHEALHNHYTQKSLSLSLGGGGSGSAHPIPDSSPLLQFGGQVRQRYLYTDDACQTEAHLEIREDGTVGGAADQSPESLLQLKALKPGVIQILGVKTSRFLCQRPDGALYGSLHFDPEACSFRELLLEDGYNVYQSEAHGLPLHLPGCKSPHRDPAPRGPARFLPLPGLPPAPPEPPGILAPQPPDVGSSDPLSMVGSQGRSPSYAS

SEQ ID NO: 159 - protein, 473 aa, Artificial Sequence
  Fusion Protein
HGEGTFTSDKSQLLEKRAAHLFIEWLIAGGHKKGKPPPKGGGGGGGSGGGGSGGGGSAESKYGPPCPPCPAPEFEGGPSVFLFPPKPKDTLMISRTPEVTCVVVDVSQEDPEVQFNWYVDGVEVHNAKTKPREEQFNSTYRVVSVLTVLHQDWLNGKEYKCKVSNKGLPSSIEKTISKAKGQPREPQVYTLPPSQEEMTKNQVSLTCLVKGFYPSDIAVEWESNGQPENNYKTTPPVLDSDGSFFLYSRLTVDKSRWQEGNVFSCSVMHEALHNHYTQKSLSLSLGGGGSGSAHPIPDSSPLLQFGGQVRQRYLYTDDACQTEAHLEIREDGTVGGAADQSPESLLQLKALKPGVIQILGVKTSRFLCQRPDGALYGSLHFDPEACSFRELLLEDGYNVYQSEAHGLPLHLPGCKSPHRDPAPRGPARFLPLPGLPPAPPEPPGILAPQPPDVGSSDPLSMVGSQGRSPSYAS

SEQ ID NO: 160 - protein, 473 aa, Artificial Sequence
  Fusion Protein
HGEGTFTSDKSQLLEKRAAHLFIEWLIAGGHSSGRYPPKGGGGGGGSGGGGSGGGGSAESKYGPPCPPCPAPEFEGGPSVFLFPPKPKDTLMISRTPEVTCVVVDVSQEDPEVQFNWYVDGVEVHNAKTKPREEQFNSTYRVVSVLTVLHQDWLNGKEYKCKVSNKGLPSSIEKTISKAKGQPREPQVYTLPPSQEEMTKNQVSLTCLVKGFYPSDIAVEWESNGQPENNYKTTPPVLDSDGSFFLYSRLTVDKSRWQEGNVFSCSVMHEALHNHYTQKSLSLSLGGGGSGSAHPIPDSSPLLQFGGQVRQRYLYTDDACQTEAHLEIREDGTVGGAADQSPESLLQLKALKPGVIQILGVKTSRFLCQRPDGALYGSLHFDPEACSFRELLLEDGYNVYQSEAHGLPLHLPGCKSPHRDPAPRGPARFLPLPGLPPAPPEPPGILAPQPPDVGSSDPLSMVGSQGRSPSYAS

SEQ ID NO: 161 - protein, 473 aa, Artificial Sequence
  Fusion Protein
HGEGTFTSDKSKQLAKRLVRLFIEWLIAGGHSSGKPPPKGGGGGGGSGGGGSGGGGSAESKYGPPCPPCPAPEFEGGPSVFLFPPKPKDTLMISRTPEVTCVVVDVSQEDPEVQFNWYVDGVEVHNAKTKPREEQFNSTYRVVSVLTVLHQDWLNGKEYKCKVSNKGLPSSIEKTISKAKGQPREPQVYTLPPSQEEMTKNQVSLTCLVKGFYPSDIAVEWESNGQPENNYKTTPPVLDSDGSFFLYSRLTVDKSRWQEGNVFSCSVMHEALHNHYTQKSLSLSLGGGGSGSAHPIPDSSPLLQFGGQVRQRYLYTDDACQTEAHLEIREDGTVGGAADQSPESLLQLKALKPGVIQILGVKTSRFLCQRPDGALYGSLHFDPEACSFRELLLEDGYNVYQSEAHGLPLHLPGCKSPHRDPAPRGPARFLPLPGLPPAPPEPPGILAPQPPDVGSSDPLSMVGSQGRSPSYAS

SEQ ID NO: 162 - protein, 473 aa, Artificial Sequence
  Fusion Protein
HGEGTFTSDKSKQLAKRLAHLFIEWLIAGGHSSGKPPPKGGGGGGGSGGGGSGGGGSAESKYGPPCPPCPAPEFEGGPSVFLFPPKPKDTLMISRTPEVTCVVVDVSQEDPEVQFNWYVDGVEVHNAKTKPREEQFNSTYRVVSVLTVLHQDWLNGKEYKCKVSNKGLPSSIEKTISKAKGQPREPQVYTLPPSQEEMTKNQVSLTCLVKGFYPSDIAVEWESNGQPENNYKTTPPVLDSDGSFFLYSRLTVDKSRWQEGNVFSCSVMHEALHNHYTQKSLSLSLGGGGSGSAHPIPDSSPLLQFGGQVRQRYLYTDDACQTEAHLEIREDGTVGGAADQSPESLLQLKALKPGVIQILGVKTSRFLCQRPDGALYGSLHFDPEACSFRELLLEDGYNVYQSEAHGLPLHLPGCKSPHRDPAPRGPARFLPLPGLPPAPPEPPGILAPQPPDVGSSDPLSMVGSQGRSPSYAS

SEQ ID NO: 163 - protein, 471 aa, Artificial Sequence
  Fusion Protein
HGEGTFTSDKSKQLAEEAVQLFIEWLLAGGPSKEIISGGGGGGGSGGGGSGGGGSAESKYGPPCPPCPAPEFEGGPSVFLFPPKPKDTLMISRTPEVTCVVVDVSQEDPEVQFNWYVDGVEVHNAKTKPREEQFNSTYRVVSVLTVLHQDWLNGKEYKCKVSNKGLPSSIEKTISKAKGQPREPQVYTLPPSQEEMTKNQVSLTCLVKGFYPSDIAVEWESNGQPENNYKTTPPVLDSDGSFFLYSRLTVDKSRWQEGNVFSCSVMHEALHNHYTQKSLSLSLGGGGSGSAHPIPDSSPLLQFGGQVRQRYLYTDDACQTEAHLEIREDGTVGGAADQSPESLLQLKALKPGVIQILGVKTSRFLCQRPDGALYGSLHFDPEACSFRELLLEDGYNVYQSEAHGLPLHLPGCKSPHRDPAPRGPARFLPLPGLPPAPPEPPGILAPQPPDVGSSDPLSMVGSQGRSPSYAS

SEQ ID NO: 164 - protein, 473 aa, Artificial Sequence
  Fusion Protein
HSEGTFTSDKSKQLAKRLVRLFIEWLIKGGHSSGKPPPKGGGGGGGSGGGGSGGGGSAESKYGPPCPPCPAPEFEGGPSVFLFPPKPKDTLMISRTPEVTCVVVDVSQEDPEVQFNWYVDGVEVHNAKTKPREEQFNSTYRVVSVLTVLHQDWLNGKEYKCKVSNKGLPSSIEKTISKAKGQPREPQVYTLPPSQEEMTKNQVSLTCLVKGFYPSDIAVEWESNGQPENNYKTTPPVLDSDGSFFLYSRLTVDKSRWQEGNVFSCSVMHEALHNHYTQKSLSLSLGGGGSGSAHPIPDSSPLLQFGGQVRQRYLYTDDACQTEAHLEIREDGTVGGAADQSPESLLQLKALKPGVIQILGVKTSRFLCQRPDGALYGSLHFDPEACSFRELLLEDGYNVYQSEAHGLPLHLPGCKSPHRDPAPRGPARFLPLPGLPPAPPEPPGILAPQPPDVGSSDPLSMVGSQGRSPSYAS

SEQ ID NO: 165 - protein, 473 aa, Artificial Sequence
  Fusion Protein
HGEGTFTSDLSKQLAKRLVRLFIEWLIKGGHSSGKPPPKGGGGGGGSGGGGSGGGGSAESKYGPPCPPCPAPEFEGGPSVFLFPPKPKDTLMISRTPEVTCVVVDVSQEDPEVQFNWYVDGVEVHNAKTKPREEQFNSTYRVVSVLTVLHQDWLNGKEYKCKVSNKGLPSSIEKTISKAKGQPREPQVYTLPPSQEEMTKNQVSLTCLVKGFYPSDIAVEWESNGQPENNYKTTPPVLDSDGSFFLYSRLTVDKSRWQEGNVFSCSVMHEALHNHYTQKSLSLSLGGGGSGSAHPIPDSSPLLQFGGQVRQRYLYTDDACQTEAHLEIREDGTVGGAADQSPESLLQLKALKPGVIQILGVKTSRFLCQRPDGALYGSLHFDPEACSFRELLLEDGYNVYQSEAHGLPLHLPGCKSPHRDPAPRGPARFLPLPGLPPAPPEPPGILAPQPPDVGSSDPLSMVGSQGRSPSYAS

SEQ ID NO: 166 - protein, 473 aa, Artificial Sequence
  Fusion Protein
HGEGTFTSDKSKQLAKRLVREFIEWLIKGGHSSGKPPPKGGGGGGGSGGGGSGGGGSAESKYGPPCPPCPAPEFEGGPSVFLFPPKPKDTLMISRTPEVTCVVVDVSQEDPEVQFNWYVDGVEVHNAKTKPREEQFNSTYRVVSVLTVLHQDWLNGKEYKCKVSNKGLPSSIEKTISKAKGQPREPQVYTLPPSQEEMTKNQVSLTCLVKGFYPSDIAVEWESNGQPENNYKTTPPVLDSDGSFFLYSRLTVDKSRWQEGNVFSCSVMHEALHNHYTQKSLSLSLGGGGSGSAHPIPDSSPLLQFGGQVRQRYLYTDDACQTEAHLEIREDGTVGGAADQSPESLLQLKALKPGVIQILGVKTSRFLCQRPDGALYGSLHFDPEACSFRELLLEDGYNVYQSEAHGLPLHLPGCKSPHRDPAPRGPARFLPLPGLPPAPPEPPGILAPQPPDVGSSDPLSMVGSQGRSPSYAS

SEQ ID NO: 167 - protein, 473 aa, Artificial Sequence
  Fusion Protein
HGEGTFTSDKSKQLAKRLVRHFIEWLIKGGHSSGKPPPKGGGGGGGSGGGGSGGGGSAESKYGPPCPPCPAPEFEGGPSVFLFPPKPKDTLMISRTPEVTCVVVDVSQEDPEVQFNWYVDGVEVHNAKTKPREEQFNSTYRVVSVLTVLHQDWLNGKEYKCKVSNKGLPSSIEKTISKAKGQPREPQVYTLPPSQEEMTKNQVSLTCLVKGFYPSDIAVEWESNGQPENNYKTTPPVLDSDGSFFLYSRLTVDKSRWQEGNVFSCSVMHEALHNHYTQKSLSLSLGGGGSGSAHPIPDSSPLLQFGGQVRQRYLYTDDACQTEAHLEIREDGTVGGAADQSPESLLQLKALKPGVIQILGVKTSRFLCQRPDGALYGSLHFDPEACSFRELLLEDGYNVYQSEAHGLPLHLPGCKSPHRDPAPRGPARFLPLPGLPPAPPEPPGILAPQPPDVGSSDPLSMVGSQGRSPSYAS

SEQ ID NO: 168 - protein, 473 aa, Artificial Sequence
  Fusion Protein
HGEGTFTSDLSKQLAKRLVREFIEWLIKGGHSSGKPPPKGGGGGGGSGGGGSGGGGSAESKYGPPCPPCPAPEFEGGPSVFLFPPKPKDTLMISRTPEVTCVVVDVSQEDPEVQFNWYVDGVEVHNAKTKPREEQFNSTYRVVSVLTVLHQDWLNGKEYKCKVSNKGLPSSIEKTISKAKGQPREPQVYTLPPSQEEMTKNQVSLTCLVKGFYPSDIAVEWESNGQPENNYKTTPPVLDSDGSFFLYSRLTVDKSRWQEGNVFSCSVMHEALHNHYTQKSLSLSLGGGGSGSAHPIPDSSPLLQFGGQVRQRYLYTDDACQTEAHLEIREDGTVGGAADQSPESLLQLKALKPGVIQILGVKTSRFLCQRPDGALYGSLHFDPEACSFRELLLEDGYNVYQSEAHGLPLHLPGCKSPHRDPAPRGPARFLPLPGLPPAPPEPPGILAPQPPDVGSSDPLSMVGSQGRSPSYAS

SEQ ID NO: 169 - protein, 473 aa, Artificial Sequence
  Fusion Protein
HGEGTFTSDLSKQLAKRLVREFIEWLIEGGHSSGKPPPKGGGGGGGSGGGGSGGGGSAESKYGPPCPPCPAPEFEGGPSVFLFPPKPKDTLMISRTPEVTCVVVDVSQEDPEVQFNWYVDGVEVHNAKTKPREEQFNSTYRVVSVLTVLHQDWLNGKEYKCKVSNKGLPSSIEKTISKAKGQPREPQVYTLPPSQEEMTKNQVSLTCLVKGFYPSDIAVEWESNGQPENNYKTTPPVLDSDGSFFLYSRLTVDKSRWQEGNVFSCSVMHEALHNHYTQKSLSLSLGGGGSGSAHPIPDSSPLLQFGGQVRQRYLYTDDACQTEAHLEIREDGTVGGAADQSPESLLQLKALKPGVIQILGVKTSRFLCQRPDGALYGSLHFDPEACSFRELLLEDGYNVYQSEAHGLPLHLPGCKSPHRDPAPRGPARFLPLPGLPPAPPEPPGILAPQPPDVGSSDPLSMVGSQGRSPSYAS

SEQ ID NO: 170 - protein, 473 aa, Artificial Sequence
  Fusion Protein
HGEGTFTSDKSKQLAKRLVREFIEWLIEGGHSSGKPPPKGGGGGGGSGGGGSGGGGSAESKYGPPCPPCPAPEFEGGPSVFLFPPKPKDTLMISRTPEVTCVVVDVSQEDPEVQFNWYVDGVEVHNAKTKPREEQFNSTYRVVSVLTVLHQDWLNGKEYKCKVSNKGLPSSIEKTISKAKGQPREPQVYTLPPSQEEMTKNQVSLTCLVKGFYPSDIAVEWESNGQPENNYKTTPPVLDSDGSFFLYSRLTVDKSRWQEGNVFSCSVMHEALHNHYTQKSLSLSLGGGGSGSAHPIPDSSPLLQFGGQVRQRYLYTDDACQTEAHLEIREDGTVGGAADQSPESLLQLKALKPGVIQILGVKTSRFLCQRPDGALYGSLHFDPEACSFRELLLEDGYNVYQSEAHGLPLHLPGCKSPHRDPAPRGPARFLPLPGLPPAPPEPPGILAPQPPDVGSSDPLSMVGSQGRSPSYAS

SEQ ID NO: 171 - protein, 473 aa, Artificial Sequence
  Fusion Protein
HGEGTFTSDKSKQLAKRLVRLFIEWLIKGGPSSGAPPPSGGGGGGGSGGGGSGGGGSAESKYGPPCPPCPAPEFEGGPSVFLFPPKPKDTLMISRTPEVTCVVVDVSQEDPEVQFNWYVDGVEVHNAKTKPREEQFNSTYRVVSVLTVLHQDWLNGKEYKCKVSNKGLPSSIEKTISKAKGQPREPQVYTLPPSQEEMTKNQVSLTCLVKGFYPSDIAVEWESNGQPENNYKTTPPVLDSDGSFFLYSRLTVDKSRWQEGNVFSCSVMHEALHNHYTQKSLSLSLGGGGSGSAHPIPDSSPLLQFGGQVRQRYLYTDDACQTEAHLEIREDGTVGGAADQSPESLLQLKALKPGVIQILGVKTSRFLCQRPDGALYGSLHFDPEACSFRELLLEDGYNVYQSEAHGLPLHLPGCKSPHRDPAPRGPARFLPLPGLPPAPPEPPGILAPQPPDVGSSDPLSMVGSQGRSPSYAS

SEQ ID NO: 172 - protein, 473 aa, Artificial Sequence
  Fusion Protein
HGEGTFTSDKSKQLAKRLVRLFIEWLIKGGHSSGKPPPSGGGGGGGSGGGGSGGGGSAESKYGPPCPPCPAPEFEGGPSVFLFPPKPKDTLMISRTPEVTCVVVDVSQEDPEVQFNWYVDGVEVHNAKTKPREEQFNSTYRVVSVLTVLHQDWLNGKEYKCKVSNKGLPSSIEKTISKAKGQPREPQVYTLPPSQEEMTKNQVSLTCLVKGFYPSDIAVEWESNGQPENNYKTTPPVLDSDGSFFLYSRLTVDKSRWQEGNVFSCSVMHEALHNHYTQKSLSLSLGGGGSGSAHPIPDSSPLLQFGGQVRQRYLYTDDACQTEAHLEIREDGTVGGAADQSPESLLQLKALKPGVIQILGVKTSRFLCQRPDGALYGSLHFDPEACSFRELLLEDGYNVYQSEAHGLPLHLPGCKSPHRDPAPRGPARFLPLPGLPPAPPEPPGILAPQPPDVGSSDPLSMVGSQGRSPSYAS

SEQ ID NO: 173 - protein, 473 aa, Artificial Sequence
  Fusion Protein
HGEGTFTSDKSKQLAKRLVRLFVQWLIKGGHSSGKPPPKGGGGGGGSGGGGSGGGGSAESKYGPPCPPCPAPEFEGGPSVFLFPPKPKDTLMISRTPEVTCVVVDVSQEDPEVQFNWYVDGVEVHNAKTKPREEQFNSTYRVVSVLTVLHQDWLNGKEYKCKVSNKGLPSSIEKTISKAKGQPREPQVYTLPPSQEEMTKNQVSLTCLVKGFYPSDIAVEWESNGQPENNYKTTPPVLDSDGSFFLYSRLTVDKSRWQEGNVFSCSVMHEALHNHYTQKSLSLSLGGGGSGSAHPIPDSSPLLQFGGQVRQRYLYTDDACQTEAHLEIREDGTVGGAADQSPESLLQLKALKPGVIQILGVKTSRFLCQRPDGALYGSLHFDPEACSFRELLLEDGYNVYQSEAHGLPLHLPGCKSPHRDPAPRGPARFLPLPGLPPAPPEPPGILAPQPPDVGSSDPLSMVGSQGRSPSYAS

SEQ ID NO: 174 - protein, 473 aa, Artificial Sequence
  Fusion Protein
HGEGTFTSDLSKQLAKRLVREFIEWLIEGGPSSGAPPPSGGGGGGGSGGGGSGGGGSAESKYGPPCPPCPAPEFEGGPSVFLFPPKPKDTLMISRTPEVTCVVVDVSQEDPEVQFNWYVDGVEVHNAKTKPREEQFNSTYRVVSVLTVLHQDWLNGKEYKCKVSNKGLPSSIEKTISKAKGQPREPQVYTLPPSQEEMTKNQVSLTCLVKGFYPSDIAVEWESNGQPENNYKTTPPVLDSDGSFFLYSRLTVDKSRWQEGNVFSCSVMHEALHNHYTQKSLSLSLGGGGSGSAHPIPDSSPLLQFGGQVRQRYLYTDDACQTEAHLEIREDGTVGGAADQSPESLLQLKALKPGVIQILGVKTSRFLCQRPDGALYGSLHFDPEACSFRELLLEDGYNVYQSEAHGLPLHLPGCKSPHRDPAPRGPARFLPLPGLPPAPPEPPGILAPQPPDVGSSDPLSMVGSQGRSPSYAS

SEQ ID NO: 175 - protein, 471 aa, Artificial Sequence
  Fusion Protein
HGEGTFTSDKSKQLAKEAVQLFIEWLLAGGPKKIRYSGGGGGGGSGGGGSGGGGSAESKYGPPCPPCPAPEFEGGPSVFLFPPKPKDTLMISRTPEVTCVVVDVSQEDPEVQFNWYVDGVEVHNAKTKPREEQFNSTYRVVSVLTVLHQDWLNGKEYKCKVSNKGLPSSIEKTISKAKGQPREPQVYTLPPSQEEMTKNQVSLTCLVKGFYPSDIAVEWESNGQPENNYKTTPPVLDSDGSFFLYSRLTVDKSRWQEGNVFSCSVMHEALHNHYTQKSLSLSLGGGGSGSAHPIPDSSPLLQFGGQVRQRYLYTDDACQTEAHLEIREDGTVGGAADQSPESLLQLKALKPGVIQILGVKTSRFLCQRPDGALYGSLHFDPEACSFRELLLEDGYNVYQSEAHGLPLHLPGCKSPHRDPAPRGPARFLPLPGLPPAPPEPPGILAPQPPDVGSSDPLSMVGSQGRSPSYAS

SEQ ID NO: 176 - protein, 471 aa, Artificial Sequence
  Fusion Protein
HGEGTFTSDKSKQLAERAVQLFIEWLLAGGPKKIRYSGGGGGGGSGGGGSGGGGSAESKYGPPCPPCPAPEFEGGPSVFLFPPKPKDTLMISRTPEVTCVVVDVSQEDPEVQFNWYVDGVEVHNAKTKPREEQFNSTYRVVSVLTVLHQDWLNGKEYKCKVSNKGLPSSIEKTISKAKGQPREPQVYTLPPSQEEMTKNQVSLTCLVKGFYPSDIAVEWESNGQPENNYKTTPPVLDSDGSFFLYSRLTVDKSRWQEGNVFSCSVMHEALHNHYTQKSLSLSLGGGGSGSAHPIPDSSPLLQFGGQVRQRYLYTDDACQTEAHLEIREDGTVGGAADQSPESLLQLKALKPGVIQILGVKTSRFLCQRPDGALYGSLHFDPEACSFRELLLEDGYNVYQSEAHGLPLHLPGCKSPHRDPAPRGPARFLPLPGLPPAPPEPPGILAPQPPDVGSSDPLSMVGSQGRSPSYAS

SEQ ID NO: 177 - protein, 471 aa, Artificial Sequence
  Fusion Protein
HGEGTFTSDKSKQLAKRAVQLFIEWLLAGGPKKIRYSGGGGGGGSGGGGSGGGGSAESKYGPPCPPCPAPEFEGGPSVFLFPPKPKDTLMISRTPEVTCVVVDVSQEDPEVQFNWYVDGVEVHNAKTKPREEQFNSTYRVVSVLTVLHQDWLNGKEYKCKVSNKGLPSSIEKTISKAKGQPREPQVYTLPPSQEEMTKNQVSLTCLVKGFYPSDIAVEWESNGQPENNYKTTPPVLDSDGSFFLYSRLTVDKSRWQEGNVFSCSVMHEALHNHYTQKSLSLSLGGGGSGSAHPIPDSSPLLQFGGQVRQRYLYTDDACQTEAHLEIREDGTVGGAADQSPESLLQLKALKPGVIQILGVKTSRFLCQRPDGALYGSLHFDPEACSFRELLLEDGYNVYQSEAHGLPLHLPGCKSPHRDPAPRGPARFLPLPGLPPAPPEPPGILAPQPPDVGSSDPLSMVGSQGRSPSYAS

SEQ ID NO: 178 - protein, 471 aa, Artificial Sequence
  Fusion Protein
HGEGTFTSDKSKQLAKRLVQLFIEWLLAGGPKKIRYSGGGGGGGSGGGGSGGGGSAESKYGPPCPPCPAPEFEGGPSVFLFPPKPKDTLMISRTPEVTCVVVDVSQEDPEVQFNWYVDGVEVHNAKTKPREEQFNSTYRVVSVLTVLHQDWLNGKEYKCKVSNKGLPSSIEKTISKAKGQPREPQVYTLPPSQEEMTKNQVSLTCLVKGFYPSDIAVEWESNGQPENNYKTTPPVLDSDGSFFLYSRLTVDKSRWQEGNVFSCSVMHEALHNHYTQKSLSLSLGGGGSGSAHPIPDSSPLLQFGGQVRQRYLYTDDACQTEAHLEIREDGTVGGAADQSPESLLQLKALKPGVIQILGVKTSRFLCQRPDGALYGSLHFDPEACSFRELLLEDGYNVYQSEAHGLPLHLPGCKSPHRDPAPRGPARFLPLPGLPPAPPEPPGILAPQPPDVGSSDPLSMVGSQGRSPSYAS

SEQ ID NO: 179 - protein, 471 aa, Artificial Sequence
  Fusion Protein
HGEGTFTSDKSKQLAKELVQLFIEWLLAGGPKKIRYSGGGGGGGSGGGGSGGGGSAESKYGPPCPPCPAPEFEGGPSVFLFPPKPKDTLMISRTPEVTCVVVDVSQEDPEVQFNWYVDGVEVHNAKTKPREEQFNSTYRVVSVLTVLHQDWLNGKEYKCKVSNKGLPSSIEKTISKAKGQPREPQVYTLPPSQEEMTKNQVSLTCLVKGFYPSDIAVEWESNGQPENNYKTTPPVLDSDGSFFLYSRLTVDKSRWQEGNVFSCSVMHEALHNHYTQKSLSLSLGGGGSGSAHPIPDSSPLLQFGGQVRQRYLYTDDACQTEAHLEIREDGTVGGAADQSPESLLQLKALKPGVIQILGVKTSRFLCQRPDGALYGSLHFDPEACSFRELLLEDGYNVYQSEAHGLPLHLPGCKSPHRDPAPRGPARFLPLPGLPPAPPEPPGILAPQPPDVGSSDPLSMVGSQGRSPSYAS

SEQ ID NO: 180 - protein, 471 aa, Artificial Sequence
  Fusion Protein
HGEGTFTSDKSKQLAERLVQLFIEWLLAGGPKKIRYSGGGGGGGSGGGGSGGGGSAESKYGPPCPPCPAPEFEGGPSVFLFPPKPKDTLMISRTPEVTCVVVDVSQEDPEVQFNWYVDGVEVHNAKTKPREEQFNSTYRVVSVLTVLHQDWLNGKEYKCKVSNKGLPSSIEKTISKAKGQPREPQVYTLPPSQEEMTKNQVSLTCLVKGFYPSDIAVEWESNGQPENNYKTTPPVLDSDGSFFLYSRLTVDKSRWQEGNVFSCSVMHEALHNHYTQKSLSLSLGGGGSGSAHPIPDSSPLLQFGGQVRQRYLYTDDACQTEAHLEIREDGTVGGAADQSPESLLQLKALKPGVIQILGVKTSRFLCQRPDGALYGSLHFDPEACSFRELLLEDGYNVYQSEAHGLPLHLPGCKSPHRDPAPRGPARFLPLPGLPPAPPEPPGILAPQPPDVGSSDPLSMVGSQGRSPSYAS

SEQ ID NO: 181 - protein, 473 aa, Artificial Sequence
  Fusion Protein
HGEGTFTSDKSKQLAKRLAQEFIEWLIKGGHSSGKPPPKGGGGGGGSGGGGSGGGGSAESKYGPPCPPCPAPEFEGGPSVFLFPPKPKDTLMISRTPEVTCVVVDVSQEDPEVQFNWYVDGVEVHNAKTKPREEQFNSTYRVVSVLTVLHQDWLNGKEYKCKVSNKGLPSSIEKTISKAKGQPREPQVYTLPPSQEEMTKNQVSLTCLVKGFYPSDIAVEWESNGQPENNYKTTPPVLDSDGSFFLYSRLTVDKSRWQEGNVFSCSVMHEALHNHYTQKSLSLSLGGGGSGSAHPIPDSSPLLQFGGQVRQRYLYTDDACQTEAHLEIREDGTVGGAADQSPESLLQLKALKPGVIQILGVKTSRFLCQRPDGALYGSLHFDPEACSFRELLLEDGYNVYQSEAHGLPLHLPGCKSPHRDPAPRGPARFLPLPGLPPAPPEPPGILAPQPPDVGSSDPLSMVGSQGRSPSYAS

SEQ ID NO: 182 - protein, 473 aa, Artificial Sequence
  Fusion Protein
HGEGTFTSDKSKQLAERLVRLFIEWLIAGGHSSGKPPPKGGGGGGGSGGGGSGGGGSAESKYGPPCPPCPAPEFEGGPSVFLFPPKPKDTLMISRTPEVTCVVVDVSQEDPEVQFNWYVDGVEVHNAKTKPREEQFNSTYRVVSVLTVLHQDWLNGKEYKCKVSNKGLPSSIEKTISKAKGQPREPQVYTLPPSQEEMTKNQVSLTCLVKGFYPSDIAVEWESNGQPENNYKTTPPVLDSDGSFFLYSRLTVDKSRWQEGNVFSCSVMHEALHNHYTQKSLSLSLGGGGSGSAHPIPDSSPLLQFGGQVRQRYLYTDDACQTEAHLEIREDGTVGGAADQSPESLLQLKALKPGVIQILGVKTSRFLCQRPDGALYGSLHFDPEACSFRELLLEDGYNVYQSEAHGLPLHLPGCKSPHRDPAPRGPARFLPLPGLPPAPPEPPGILAPQPPDVGSSDPLSMVGSQGRSPSYAS

SEQ ID NO: 183 - protein, 473 aa, Artificial Sequence
  Fusion Protein
HGEGTFTSDKSKQLAERLVREFIEWLIAGGHSSGKPPPKGGGGGGGSGGGGSGGGGSAESKYGPPCPPCPAPEFEGGPSVFLFPPKPKDTLMISRTPEVTCVVVDVSQEDPEVQFNWYVDGVEVHNAKTKPREEQFNSTYRVVSVLTVLHQDWLNGKEYKCKVSNKGLPSSIEKTISKAKGQPREPQVYTLPPSQEEMTKNQVSLTCLVKGFYPSDIAVEWESNGQPENNYKTTPPVLDSDGSFFLYSRLTVDKSRWQEGNVFSCSVMHEALHNHYTQKSLSLSLGGGGSGSAHPIPDSSPLLQFGGQVRQRYLYTDDACQTEAHLEIREDGTVGGAADQSPESLLQLKALKPGVIQILGVKTSRFLCQRPDGALYGSLHFDPEACSFRELLLEDGYNVYQSEAHGLPLHLPGCKSPHRDPAPRGPARFLPLPGLPPAPPEPPGILAPQPPDVGSSDPLSMVGSQGRSPSYAS

SEQ ID NO: 184 - protein, 473 aa, Artificial Sequence
  Fusion Protein
HGEGTFTSDKSKQLAERLVKLFIEWLIAGGHSSGKPPPKGGGGGGGSGGGGSGGGGSAESKYGPPCPPCPAPEFEGGPSVFLFPPKPKDTLMISRTPEVTCVVVDVSQEDPEVQFNWYVDGVEVHNAKTKPREEQFNSTYRVVSVLTVLHQDWLNGKEYKCKVSNKGLPSSIEKTISKAKGQPREPQVYTLPPSQEEMTKNQVSLTCLVKGFYPSDIAVEWESNGQPENNYKTTPPVLDSDGSFFLYSRLTVDKSRWQEGNVFSCSVMHEALHNHYTQKSLSLSLGGGGSGSAHPIPDSSPLLQFGGQVRQRYLYTDDACQTEAHLEIREDGTVGGAADQSPESLLQLKALKPGVIQILGVKTSRFLCQRPDGALYGSLHFDPEACSFRELLLEDGYNVYQSEAHGLPLHLPGCKSPHRDPAPRGPARFLPLPGLPPAPPEPPGILAPQPPDVGSSDPLSMVGSQGRSPSYAS

SEQ ID NO: 185 - protein, 473 aa, Artificial Sequence
  Fusion Protein
HGEGTFTSDKSKQLAERLAREFIEWLIAGGHSSGKPPPKGGGGGGGSGGGGSGGGGSAESKYGPPCPPCPAPEFEGGPSVFLFPPKPKDTLMISRTPEVTCVVVDVSQEDPEVQFNWYVDGVEVHNAKTKPREEQFNSTYRVVSVLTVLHQDWLNGKEYKCKVSNKGLPSSIEKTISKAKGQPREPQVYTLPPSQEEMTKNQVSLTCLVKGFYPSDIAVEWESNGQPENNYKTTPPVLDSDGSFFLYSRLTVDKSRWQEGNVFSCSVMHEALHNHYTQKSLSLSLGGGGSGSAHPIPDSSPLLQFGGQVRQRYLYTDDACQTEAHLEIREDGTVGGAADQSPESLLQLKALKPGVIQILGVKTSRFLCQRPDGALYGSLHFDPEACSFRELLLEDGYNVYQSEAHGLPLHLPGCKSPHRDPAPRGPARFLPLPGLPPAPPEPPGILAPQPPDVGSSDPLSMVGSQGRSPSYAS

SEQ ID NO: 186 - protein, 473 aa, Artificial Sequence
  Fusion Protein
HGEGTFTSDKSKQLAERLAKLFIEWLIAGGHSSGKPPPKGGGGGGGSGGGGSGGGGSAESKYGPPCPPCPAPEFEGGPSVFLFPPKPKDTLMISRTPEVTCVVVDVSQEDPEVQFNWYVDGVEVHNAKTKPREEQFNSTYRVVSVLTVLHQDWLNGKEYKCKVSNKGLPSSIEKTISKAKGQPREPQVYTLPPSQEEMTKNQVSLTCLVKGFYPSDIAVEWESNGQPENNYKTTPPVLDSDGSFFLYSRLTVDKSRWQEGNVFSCSVMHEALHNHYTQKSLSLSLGGGGSGSAHPIPDSSPLLQFGGQVRQRYLYTDDACQTEAHLEIREDGTVGGAADQSPESLLQLKALKPGVIQILGVKTSRFLCQRPDGALYGSLHFDPEACSFRELLLEDGYNVYQSEAHGLPLHLPGCKSPHRDPAPRGPARFLPLPGLPPAPPEPPGILAPQPPDVGSSDPLSMVGSQGRSPSYAS

SEQ ID NO: 187 - protein, 473 aa, Artificial Sequence
  Fusion Protein
HGEGTFTSDLSKQLAERLVRLFIEWLIKGGHSSGKPPPKGGGGGGGSGGGGSGGGGSAESKYGPPCPPCPAPEFEGGPSVFLFPPKPKDTLMISRTPEVTCVVVDVSQEDPEVQFNWYVDGVEVHNAKTKPREEQFNSTYRVVSVLTVLHQDWLNGKEYKCKVSNKGLPSSIEKTISKAKGQPREPQVYTLPPSQEEMTKNQVSLTCLVKGFYPSDIAVEWESNGQPENNYKTTPPVLDSDGSFFLYSRLTVDKSRWQEGNVFSCSVMHEALHNHYTQKSLSLSLGGGGSGSAHPIPDSSPLLQFGGQVRQRYLYTDDACQTEAHLEIREDGTVGGAADQSPESLLQLKALKPGVIQILGVKTSRFLCQRPDGALYGSLHFDPEACSFRELLLEDGYNVYQSEAHGLPLHLPGCKSPHRDPAPRGPARFLPLPGLPPAPPEPPGILAPQPPDVGSSDPLSMVGSQGRSPSYAS

SEQ ID NO: 188 - protein, 473 aa, Artificial Sequence
  Fusion Protein
HGEGTFTSDLSIQLAKRLAQLFIEWLIKGGHSSGKPPPKGGGGGGGSGGGGSGGGGSAESKYGPPCPPCPAPEFEGGPSVFLFPPKPKDTLMISRTPEVTCVVVDVSQEDPEVQFNWYVDGVEVHNAKTKPREEQFNSTYRVVSVLTVLHQDWLNGKEYKCKVSNKGLPSSIEKTISKAKGQPREPQVYTLPPSQEEMTKNQVSLTCLVKGFYPSDIAVEWESNGQPENNYKTTPPVLDSDGSFFLYSRLTVDKSRWQEGNVFSCSVMHEALHNHYTQKSLSLSLGGGGSGSAHPIPDSSPLLQFGGQVRQRYLYTDDACQTEAHLEIREDGTVGGAADQSPESLLQLKALKPGVIQILGVKTSRFLCQRPDGALYGSLHFDPEACSFRELLLEDGYNVYQSEAHGLPLHLPGCKSPHRDPAPRGPARFLPLPGLPPAPPEPPGILAPQPPDVGSSDPLSMVGSQGRSPSYAS

SEQ ID NO: 189 - protein, 473 aa, Artificial Sequence
  Fusion Protein
HGEGTFTSDKSKQLEKELVRLFYEWLKKGGHSSIKPPPKGGGGGGGSGGGGSGGGGSAESKYGPPCPPCPAPEFEGGPSVFLFPPKPKDTLMISRTPEVTCVVVDVSQEDPEVQFNWYVDGVEVHNAKTKPREEQFNSTYRVVSVLTVLHQDWLNGKEYKCKVSNKGLPSSIEKTISKAKGQPREPQVYTLPPSQEEMTKNQVSLTCLVKGFYPSDIAVEWESNGQPENNYKTTPPVLDSDGSFFLYSRLTVDKSRWQEGNVFSCSVMHEALHNHYTQKSLSLSLGGGGSGSAHPIPDSSPLLQFGGQVRQRYLYTDDACQTEAHLEIREDGTVGGAADQSPESLLQLKALKPGVIQILGVKTSRFLCQRPDGALYGSLHFDPEACSFRELLLEDGYNVYQSEAHGLPLHLPGCKSPHRDPAPRGPARFLPLPGLPPAPPEPPGILAPQPPDVGSSDPLSMVGSQGRSPSYAS

SEQ ID NO: 190 - protein, 473 aa, Artificial Sequence
  Fusion Protein
HGEGTFTSDKSKQLEKELVRLFYEWLKAGGHSKQKPPPKGGGGGGGSGGGGSGGGGSAESKYGPPCPPCPAPEFEGGPSVFLFPPKPKDTLMISRTPEVTCVVVDVSQEDPEVQFNWYVDGVEVHNAKTKPREEQFNSTYRVVSVLTVLHQDWLNGKEYKCKVSNKGLPSSIEKTISKAKGQPREPQVYTLPPSQEEMTKNQVSLTCLVKGFYPSDIAVEWESNGQPENNYKTTPPVLDSDGSFFLYSRLTVDKSRWQEGNVFSCSVMHEALHNHYTQKSLSLSLGGGGSGSAHPIPDSSPLLQFGGQVRQRYLYTDDACQTEAHLEIREDGTVGGAADQSPESLLQLKALKPGVIQILGVKTSRFLCQRPDGALYGSLHFDPEACSFRELLLEDGYNVYQSEAHGLPLHLPGCKSPHRDPAPRGPARFLPLPGLPPAPPEPPGILAPQPPDVGSSDPLSMVGSQGRSPSYAS

SEQ ID NO: 191 - protein, 473 aa, Artificial Sequence
  Fusion Protein
HGEGTFTSDKSKQLEKELVRLFYEWLKAGGHSKIKPPPKGGGGGGGSGGGGSGGGGSAESKYGPPCPPCPAPEFEGGPSVFLFPPKPKDTLMISRTPEVTCVVVDVSQEDPEVQFNWYVDGVEVHNAKTKPREEQFNSTYRVVSVLTVLHQDWLNGKEYKCKVSNKGLPSSIEKTISKAKGQPREPQVYTLPPSQEEMTKNQVSLTCLVKGFYPSDIAVEWESNGQPENNYKTTPPVLDSDGSFFLYSRLTVDKSRWQEGNVFSCSVMHEALHNHYTQKSLSLSLGGGGSGSAHPIPDSSPLLQFGGQVRQRYLYTDDACQTEAHLEIREDGTVGGAADQSPESLLQLKALKPGVIQILGVKTSRFLCQRPDGALYGSLHFDPEACSFRELLLEDGYNVYQSEAHGLPLHLPGCKSPHRDPAPRGPARFLPLPGLPPAPPEPPGILAPQPPDVGSSDPLSMVGSQGRSPSYAS

SEQ ID NO: 192 - protein, 473 aa, Artificial Sequence
  Fusion Protein
HGEGTFTSDLSKQLEERLARLFYEWLIAGGHSSQKPPPKGGGGGGGSGGGGSGGGGSAESKYGPPCPPCPAPEFEGGPSVFLFPPKPKDTLMISRTPEVTCVVVDVSQEDPEVQFNWYVDGVEVHNAKTKPREEQFNSTYRVVSVLTVLHQDWLNGKEYKCKVSNKGLPSSIEKTISKAKGQPREPQVYTLPPSQEEMTKNQVSLTCLVKGFYPSDIAVEWESNGQPENNYKTTPPVLDSDGSFFLYSRLTVDKSRWQEGNVFSCSVMHEALHNHYTQKSLSLSLGGGGSGSAHPIPDSSPLLQFGGQVRQRYLYTDDACQTEAHLEIREDGTVGGAADQSPESLLQLKALKPGVIQILGVKTSRFLCQRPDGALYGSLHFDPEACSFRELLLEDGYNVYQSEAHGLPLHLPGCKSPHRDPAPRGPARFLPLPGLPPAPPEPPGILAPQPPDVGSSDPLSMVGSQGRSPSYAS

SEQ ID NO: 193 - protein, 473 aa, Artificial Sequence
  Fusion Protein
HGEGTFTSDLSKQLEKELVRLFYEWLINGGHSSQKPPPKGGGGGGGSGGGGSGGGGSAESKYGPPCPPCPAPEFEGGPSVFLFPPKPKDTLMISRTPEVTCVVVDVSQEDPEVQFNWYVDGVEVHNAKTKPREEQFNSTYRVVSVLTVLHQDWLNGKEYKCKVSNKGLPSSIEKTISKAKGQPREPQVYTLPPSQEEMTKNQVSLTCLVKGFYPSDIAVEWESNGQPENNYKTTPPVLDSDGSFFLYSRLTVDKSRWQEGNVFSCSVMHEALHNHYTQKSLSLSLGGGGSGSAHPIPDSSPLLQFGGQVRQRYLYTDDACQTEAHLEIREDGTVGGAADQSPESLLQLKALKPGVIQILGVKTSRFLCQRPDGALYGSLHFDPEACSFRELLLEDGYNVYQSEAHGLPLHLPGCKSPHRDPAPRGPARFLPLPGLPPAPPEPPGILAPQPPDVGSSDPLSMVGSQGRSPSYAS

SEQ ID NO: 194 - protein, 473 aa, Artificial Sequence
  Fusion Protein
HGEGTFTSDLSKQLEKELVRLFYEWLINGGHKSGKPPPKGGGGGGGSGGGGSGGGGSAESKYGPPCPPCPAPEFEGGPSVFLFPPKPKDTLMISRTPEVTCVVVDVSQEDPEVQFNWYVDGVEVHNAKTKPREEQFNSTYRVVSVLTVLHQDWLNGKEYKCKVSNKGLPSSIEKTISKAKGQPREPQVYTLPPSQEEMTKNQVSLTCLVKGFYPSDIAVEWESNGQPENNYKTTPPVLDSDGSFFLYSRLTVDKSRWQEGNVFSCSVMHEALHNHYTQKSLSLSLGGGGSGSAHPIPDSSPLLQFGGQVRQRYLYTDDACQTEAHLEIREDGTVGGAADQSPESLLQLKALKPGVIQILGVKTSRFLCQRPDGALYGSLHFDPEACSFRELLLEDGYNVYQSEAHGLPLHLPGCKSPHRDPAPRGPARFLPLPGLPPAPPEPPGILAPQPPDVGSSDPLSMVGSQGRSPSYAS

SEQ ID NO: 195 - protein, 473 aa, Artificial Sequence
  Fusion Protein
HGEGTFTSDLSKQLEKELVRLFYEWLINGGHSKGKPPPKGGGGGGGSGGGGSGGGGSAESKYGPPCPPCPAPEFEGGPSVFLFPPKPKDTLMISRTPEVTCVVVDVSQEDPEVQFNWYVDGVEVHNAKTKPREEQFNSTYRVVSVLTVLHQDWLNGKEYKCKVSNKGLPSSIEKTISKAKGQPREPQVYTLPPSQEEMTKNQVSLTCLVKGFYPSDIAVEWESNGQPENNYKTTPPVLDSDGSFFLYSRLTVDKSRWQEGNVFSCSVMHEALHNHYTQKSLSLSLGGGGSGSAHPIPDSSPLLQFGGQVRQRYLYTDDACQTEAHLEIREDGTVGGAADQSPESLLQLKALKPGVIQILGVKTSRFLCQRPDGALYGSLHFDPEACSFRELLLEDGYNVYQSEAHGLPLHLPGCKSPHRDPAPRGPARFLPLPGLPPAPPEPPGILAPQPPDVGSSDPLSMVGSQGRSPSYAS

SEQ ID NO: 196 - protein, 473 aa, Artificial Sequence
  Fusion Protein
HGEGTFTSDLSKQLEKELVRLFYEWLINGGPSSGKPPPKGGGGGGGSGGGGSGGGGSAESKYGPPCPPCPAPEFEGGPSVFLFPPKPKDTLMISRTPEVTCVVVDVSQEDPEVQFNWYVDGVEVHNAKTKPREEQFNSTYRVVSVLTVLHQDWLNGKEYKCKVSNKGLPSSIEKTISKAKGQPREPQVYTLPPSQEEMTKNQVSLTCLVKGFYPSDIAVEWESNGQPENNYKTTPPVLDSDGSFFLYSRLTVDKSRWQEGNVFSCSVMHEALHNHYTQKSLSLSLGGGGSGSAHPIPDSSPLLQFGGQVRQRYLYTDDACQTEAHLEIREDGTVGGAADQSPESLLQLKALKPGVIQILGVKTSRFLCQRPDGALYGSLHFDPEACSFRELLLEDGYNVYQSEAHGLPLHLPGCKSPHRDPAPRGPARFLPLPGLPPAPPEPPGILAPQPPDVGSSDPLSMVGSQGRSPSYAS

SEQ ID NO: 197 - protein, 473 aa, Artificial Sequence
  Fusion Protein
HGEGTFTSDLSKQLEKELVRLFYEWLINGGHSSGKPPPKGGGGGGGSGGGGSGGGGSAESKYGPPCPPCPAPEFEGGPSVFLFPPKPKDTLMISRTPEVTCVVVDVSQEDPEVQFNWYVDGVEVHNAKTKPREEQFNSTYRVVSVLTVLHQDWLNGKEYKCKVSNKGLPSSIEKTISKAKGQPREPQVYTLPPSQEEMTKNQVSLTCLVKGFYPSDIAVEWESNGQPENNYKTTPPVLDSDGSFFLYSRLTVDKSRWQEGNVFSCSVMHEALHNHYTQKSLSLSLGGGGSGSAHPIPDSSPLLQFGGQVRQRYLYTDDACQTEAHLEIREDGTVGGAADQSPESLLQLKALKPGVIQILGVKTSRFLCQRPDGALYGSLHFDPEACSFRELLLEDGYNVYQSEAHGLPLHLPGCKSPHRDPAPRGPARFLPLPGLPPAPPEPPGILAPQPPDVGSSDPLSMVGSQGRSPSYAS

SEQ ID NO: 198 - protein, 473 aa, Artificial Sequence
  Fusion Protein
HGEGTFTSDLSKQLEKELVRLFYEWLIAGGHSSQRPPPKGGGGGGGSGGGGSGGGGSAESKYGPPCPPCPAPEFEGGPSVFLFPPKPKDTLMISRTPEVTCVVVDVSQEDPEVQFNWYVDGVEVHNAKTKPREEQFNSTYRVVSVLTVLHQDWLNGKEYKCKVSNKGLPSSIEKTISKAKGQPREPQVYTLPPSQEEMTKNQVSLTCLVKGFYPSDIAVEWESNGQPENNYKTTPPVLDSDGSFFLYSRLTVDKSRWQEGNVFSCSVMHEALHNHYTQKSLSLSLGGGGSGSAHPIPDSSPLLQFGGQVRQRYLYTDDACQTEAHLEIREDGTVGGAADQSPESLLQLKALKPGVIQILGVKTSRFLCQRPDGALYGSLHFDPEACSFRELLLEDGYNVYQSEAHGLPLHLPGCKSPHRDPAPRGPARFLPLPGLPPAPPEPPGILAPQPPDVGSSDPLSMVGSQGRSPSYAS

SEQ ID NO: 199 - protein, 473 aa, Artificial Sequence
  Fusion Protein
HGEGTFTSDLSKQLEKELVRLFYEWLKAGGHSSGKPPPKGGGGGGGSGGGGSGGGGSAESKYGPPCPPCPAPEFEGGPSVFLFPPKPKDTLMISRTPEVTCVVVDVSQEDPEVQFNWYVDGVEVHNAKTKPREEQFNSTYRVVSVLTVLHQDWLNGKEYKCKVSNKGLPSSIEKTISKAKGQPREPQVYTLPPSQEEMTKNQVSLTCLVKGFYPSDIAVEWESNGQPENNYKTTPPVLDSDGSFFLYSRLTVDKSRWQEGNVFSCSVMHEALHNHYTQKSLSLSLGGGGSGSAHPIPDSSPLLQFGGQVRQRYLYTDDACQTEAHLEIREDGTVGGAADQSPESLLQLKALKPGVIQILGVKTSRFLCQRPDGALYGSLHFDPEACSFRELLLEDGYNVYQSEAHGLPLHLPGCKSPHRDPAPRGPARFLPLPGLPPAPPEPPGILAPQPPDVGSSDPLSMVGSQGRSPSYAS

SEQ ID NO: 200 - protein, 473 aa, Artificial Sequence
  Fusion Protein
HGEGTFTSDLSKQLEKELVRLFYEWLIKGGHSSGRPPPKGGGGGGGSGGGGSGGGGSAESKYGPPCPPCPAPEFEGGPSVFLFPPKPKDTLMISRTPEVTCVVVDVSQEDPEVQFNWYVDGVEVHNAKTKPREEQFNSTYRVVSVLTVLHQDWLNGKEYKCKVSNKGLPSSIEKTISKAKGQPREPQVYTLPPSQEEMTKNQVSLTCLVKGFYPSDIAVEWESNGQPENNYKTTPPVLDSDGSFFLYSRLTVDKSRWQEGNVFSCSVMHEALHNHYTQKSLSLSLGGGGSGSAHPIPDSSPLLQFGGQVRQRYLYTDDACQTEAHLEIREDGTVGGAADQSPESLLQLKALKPGVIQILGVKTSRFLCQRPDGALYGSLHFDPEACSFRELLLEDGYNVYQSEAHGLPLHLPGCKSPHRDPAPRGPARFLPLPGLPPAPPEPPGILAPQPPDVGSSDPLSMVGSQGRSPSYAS

SEQ ID NO: 201 - protein, 473 aa, Artificial Sequence
  Fusion Protein
HGEGTFTSDLSKQLEKELVRLFYEWLIKGGHSSQKPPPKGGGGGGGSGGGGSGGGGSAESKYGPPCPPCPAPEFEGGPSVFLFPPKPKDTLMISRTPEVTCVVVDVSQEDPEVQFNWYVDGVEVHNAKTKPREEQFNSTYRVVSVLTVLHQDWLNGKEYKCKVSNKGLPSSIEKTISKAKGQPREPQVYTLPPSQEEMTKNQVSLTCLVKGFYPSDIAVEWESNGQPENNYKTTPPVLDSDGSFFLYSRLTVDKSRWQEGNVFSCSVMHEALHNHYTQKSLSLSLGGGGSGSAHPIPDSSPLLQFGGQVRQRYLYTDDACQTEAHLEIREDGTVGGAADQSPESLLQLKALKPGVIQILGVKTSRFLCQRPDGALYGSLHFDPEACSFRELLLEDGYNVYQSEAHGLPLHLPGCKSPHRDPAPRGPARFLPLPGLPPAPPEPPGILAPQPPDVGSSDPLSMVGSQGRSPSYAS

SEQ ID NO: 202 - protein, 473 aa, Artificial Sequence
  Fusion Protein
HGEGTFTSDLSKQLEKELVRLFYEWLIKGGHSSIKPPPKGGGGGGGSGGGGSGGGGSAESKYGPPCPPCPAPEFEGGPSVFLFPPKPKDTLMISRTPEVTCVVVDVSQEDPEVQFNWYVDGVEVHNAKTKPREEQFNSTYRVVSVLTVLHQDWLNGKEYKCKVSNKGLPSSIEKTISKAKGQPREPQVYTLPPSQEEMTKNQVSLTCLVKGFYPSDIAVEWESNGQPENNYKTTPPVLDSDGSFFLYSRLTVDKSRWQEGNVFSCSVMHEALHNHYTQKSLSLSLGGGGSGSAHPIPDSSPLLQFGGQVRQRYLYTDDACQTEAHLEIREDGTVGGAADQSPESLLQLKALKPGVIQILGVKTSRFLCQRPDGALYGSLHFDPEACSFRELLLEDGYNVYQSEAHGLPLHLPGCKSPHRDPAPRGPARFLPLPGLPPAPPEPPGILAPQPPDVGSSDPLSMVGSQGRSPSYAS

SEQ ID NO: 203 - protein, 473 aa, Artificial Sequence
  Fusion Protein
HGEGTFTSDLSKQLEKELVRLFYEWLIKGGHKSGKPPPKGGGGGGGSGGGGSGGGGSAESKYGPPCPPCPAPEFEGGPSVFLFPPKPKDTLMISRTPEVTCVVVDVSQEDPEVQFNWYVDGVEVHNAKTKPREEQFNSTYRVVSVLTVLHQDWLNGKEYKCKVSNKGLPSSIEKTISKAKGQPREPQVYTLPPSQEEMTKNQVSLTCLVKGFYPSDIAVEWESNGQPENNYKTTPPVLDSDGSFFLYSRLTVDKSRWQEGNVFSCSVMHEALHNHYTQKSLSLSLGGGGSGSAHPIPDSSPLLQFGGQVRQRYLYTDDACQTEAHLEIREDGTVGGAADQSPESLLQLKALKPGVIQILGVKTSRFLCQRPDGALYGSLHFDPEACSFRELLLEDGYNVYQSEAHGLPLHLPGCKSPHRDPAPRGPARFLPLPGLPPAPPEPPGILAPQPPDVGSSDPLSMVGSQGRSPSYAS

SEQ ID NO: 204 - protein, 473 aa, Artificial Sequence
  Fusion Protein
HGEGTFTSDLSKQLEKELVRLFYEWLIKGGHSKGKPPPKGGGGGGGSGGGGSGGGGSAESKYGPPCPPCPAPEFEGGPSVFLFPPKPKDTLMISRTPEVTCVVVDVSQEDPEVQFNWYVDGVEVHNAKTKPREEQFNSTYRVVSVLTVLHQDWLNGKEYKCKVSNKGLPSSIEKTISKAKGQPREPQVYTLPPSQEEMTKNQVSLTCLVKGFYPSDIAVEWESNGQPENNYKTTPPVLDSDGSFFLYSRLTVDKSRWQEGNVFSCSVMHEALHNHYTQKSLSLSLGGGGSGSAHPIPDSSPLLQFGGQVRQRYLYTDDACQTEAHLEIREDGTVGGAADQSPESLLQLKALKPGVIQILGVKTSRFLCQRPDGALYGSLHFDPEACSFRELLLEDGYNVYQSEAHGLPLHLPGCKSPHRDPAPRGPARFLPLPGLPPAPPEPPGILAPQPPDVGSSDPLSMVGSQGRSPSYAS

SEQ ID NO: 205 - protein, 473 aa, Artificial Sequence
  Fusion Protein
HGEGTFTSDLSKQLEKELVRLFYEWLIAGGHKSQKPPPKGGGGGGGSGGGGSGGGGSAESKYGPPCPPCPAPEFEGGPSVFLFPPKPKDTLMISRTPEVTCVVVDVSQEDPEVQFNWYVDGVEVHNAKTKPREEQFNSTYRVVSVLTVLHQDWLNGKEYKCKVSNKGLPSSIEKTISKAKGQPREPQVYTLPPSQEEMTKNQVSLTCLVKGFYPSDIAVEWESNGQPENNYKTTPPVLDSDGSFFLYSRLTVDKSRWQEGNVFSCSVMHEALHNHYTQKSLSLSLGGGGSGSAHPIPDSSPLLQFGGQVRQRYLYTDDACQTEAHLEIREDGTVGGAADQSPESLLQLKALKPGVIQILGVKTSRFLCQRPDGALYGSLHFDPEACSFRELLLEDGYNVYQSEAHGLPLHLPGCKSPHRDPAPRGPARFLPLPGLPPAPPEPPGILAPQPPDVGSSDPLSMVGSQGRSPSYAS

SEQ ID NO: 206 - protein, 473 aa, Artificial Sequence
  Fusion Protein
HGEGTFTSDLSKQLEKRLVRLFYEWLLNGGHSSQKPPPKGGGGGGGSGGGGSGGGGSAESKYGPPCPPCPAPEFEGGPSVFLFPPKPKDTLMISRTPEVTCVVVDVSQEDPEVQFNWYVDGVEVHNAKTKPREEQFNSTYRVVSVLTVLHQDWLNGKEYKCKVSNKGLPSSIEKTISKAKGQPREPQVYTLPPSQEEMTKNQVSLTCLVKGFYPSDIAVEWESNGQPENNYKTTPPVLDSDGSFFLYSRLTVDKSRWQEGNVFSCSVMHEALHNHYTQKSLSLSLGGGGSGSAHPIPDSSPLLQFGGQVRQRYLYTDDACQTEAHLEIREDGTVGGAADQSPESLLQLKALKPGVIQILGVKTSRFLCQRPDGALYGSLHFDPEACSFRELLLEDGYNVYQSEAHGLPLHLPGCKSPHRDPAPRGPARFLPLPGLPPAPPEPPGILAPQPPDVGSSDPLSMVGSQGRSPSYAS

SEQ ID NO: 207 - protein, 473 aa, Artificial Sequence
  Fusion Protein
HGEGTFTSDLSKQLEKRLVRLFYEWLKNGGHSSGKPPPKGGGGGGGSGGGGSGGGGSAESKYGPPCPPCPAPEFEGGPSVFLFPPKPKDTLMISRTPEVTCVVVDVSQEDPEVQFNWYVDGVEVHNAKTKPREEQFNSTYRVVSVLTVLHQDWLNGKEYKCKVSNKGLPSSIEKTISKAKGQPREPQVYTLPPSQEEMTKNQVSLTCLVKGFYPSDIAVEWESNGQPENNYKTTPPVLDSDGSFFLYSRLTVDKSRWQEGNVFSCSVMHEALHNHYTQKSLSLSLGGGGSGSAHPIPDSSPLLQFGGQVRQRYLYTDDACQTEAHLEIREDGTVGGAADQSPESLLQLKALKPGVIQILGVKTSRFLCQRPDGALYGSLHFDPEACSFRELLLEDGYNVYQSEAHGLPLHLPGCKSPHRDPAPRGPARFLPLPGLPPAPPEPPGILAPQPPDVGSSDPLSMVGSQGRSPSYAS

SEQ ID NO: 208 - protein, 473 aa, Artificial Sequence
  Fusion Protein
GHGEGTFTSDKSKQLEEEAVRLFIEWLKAGGPKKIRYSGGGGGGGSGGGGSGGGGSAESKYGPPCPPCPAPEFEGGPSVFLFPPKPKDTLMISRTPEVTCVVVDVSQEDPEVQFNWYVDGVEVHNAKTKPREEQFNSTYRVVSVLTVLHQDWLNGKEYKCKVSNKGLPSSIEKTISKAKGQPREPQVYTLPPSQEEMTKNQVSLTCLVKGFYPSDIAVEWESNGQPENNYKTTPPVLDSDGSFFLYSRLTVDKSRWQEGNVFSCSVMHEALHNHYTQKSLSLSLGGGGSGSAHPIPDSSPLLQFGGQVRQRYLYTDDACQTEAHLEIREDGTVGGAADQSPESLLQLKALKPGVIQILGVKTSRFLCQRPDGALYGSLHFDPEACSFRELLLEDGYNVYQSEAHGLPLHLCGNKSPHRDPAPRGPARFLPLPGLPPAPPEPPGILAPQPPDVGSSDPLSMVYPSQGRSPSYAS

SEQ ID NO: 209 - protein, 472 aa, Artificial Sequence
  Fusion Protein
GHGEGTFTSDKSKQLEEEAVRLFIEWLKAGGPKKIRYSGGGGGGGSGGGGSGGGGSAESKYGPPCPPCPAPEFEGGPSVFLFPPKPKDTLMISRTPEVTCVVVDVSQEDPEVQFNWYVDGVEVHNAKTKPREEQFNSTYRVVSVLTVLHQDWLNGKEYKCKVSNKGLPSSIEKTISKAKGQPREPQVYTLPPSQEEMTKNQVSLTCLVKGFYPSDIAVEWESNGQPENNYKTTPPVLDSDGSFFLYSRLTVDKSRWQEGNVFSCSVMHEALHNHYTQKSLSLSLGGGGSGSAHPIPDSSPLLQFGGQVRQRYLYTDDACQTEAHLEIREDGTVGGAADQSPESLLQLKALKPGVIQILGVKTSRFLCQRPDGALYGSLHFDPEACSFRELLLEDGYNVYQSEAHGLPLHLCGNKSPHRDPAPRGPARFLPLPGLPPAPPEPPGILAPQPPDVGSSDPLSMVGSQGRSPSYAS

SEQ ID NO: 210 - protein, 472 aa, Artificial Sequence
  Fusion Protein
GHGEGTFTSDKSKQLEEEAVQLFIEWLKAGGPKKIRYSGGGGGGGSGGGGSGGGGSAESKYGPPCPPCPAPEFEGGPSVFLFPPKPKDTLMISRTPEVTCVVVDVSQEDPEVQFNWYVDGVEVHNAKTKPREEQFNSTYRVVSVLTVLHQDWLNGKEYKCKVSNKGLPSSIEKTISKAKGQPREPQVYTLPPSQEEMTKNQVSLTCLVKGFYPSDIAVEWESNGQPENNYKTTPPVLDSDGSFFLYSRLTVDKSRWQEGNVFSCSVMHEALHNHYTQKSLSLSLGGGGSGSAHPIPDSSPLLQFGGQVRQRYLYTDDACQTEAHLEIREDGTVGGAADQSPESLLQLKALKPGVIQILGVKTSRFLCQRPDGALYGSLHFDPEACSFRELLLEDGYNVYQSEAHGLPLHLPGCKSPHRDPAPRGPARFLPLPGLPPAPPEPPGILAPQPPDVGSSDPLSMVGSQGRSPSYAS

SEQ ID NO: 211 - protein, 472 aa, Artificial Sequence
  Fusion Protein
GHGEGTFTSDLSKQLEEEAVRLFIEWLKAGGPKKIRYSGGGGGGGSGGGGSGGGGSAESKYGPPCPPCPAPEFEGGPSVFLFPPKPKDTLMISRTPEVTCVVVDVSQEDPEVQFNWYVDGVEVHNAKTKPREEQFNSTYRVVSVLTVLHQDWLNGKEYKCKVSNKGLPSSIEKTISKAKGQPREPQVYTLPPSQEEMTKNQVSLTCLVKGFYPSDIAVEWESNGQPENNYKTTPPVLDSDGSFFLYSRLTVDKSRWQEGNVFSCSVMHEALHNHYTQKSLSLSLGGGGSGSAHPIPDSSPLLQFGGQVRQRYLYTDDACQTEAHLEIREDGTVGGAADQSPESLLQLKALKPGVIQILGVKTSRFLCQRPDGALYGSLHFDPEACSFRELLLEDGYNVYQSEAHGLPLHLPGCKSPHRDPAPRGPARFLPLPGLPPAPPEPPGILAPQPPDVGSSDPLSMVGSQGRSPSYAS

SEQ ID NO: 212 - protein, 472 aa, Artificial Sequence
  Fusion Protein
GHGEGTFTSDLSKQLEEEAVQLFIEWLKAGGPKKIRYSGGGGGGGSGGGGSGGGGSAESKYGPPCPPCPAPEFEGGPSVFLFPPKPKDTLMISRTPEVTCVVVDVSQEDPEVQFNWYVDGVEVHNAKTKPREEQFNSTYRVVSVLTVLHQDWLNGKEYKCKVSNKGLPSSIEKTISKAKGQPREPQVYTLPPSQEEMTKNQVSLTCLVKGFYPSDIAVEWESNGQPENNYKTTPPVLDSDGSFFLYSRLTVDKSRWQEGNVFSCSVMHEALHNHYTQKSLSLSLGGGGSGSAHPIPDSSPLLQFGGQVRQRYLYTDDACQTEAHLEIREDGTVGGAADQSPESLLQLKALKPGVIQILGVKTSRFLCQRPDGALYGSLHFDPEACSFRELLLEDGYNVYQSEAHGLPLHLPGCKSPHRDPAPRGPARFLPLPGLPPAPPEPPGILAPQPPDVGSSDPLSMVGSQGRSPSYAS

SEQ ID NO: 213 - protein, 472 aa, Artificial Sequence
  Fusion Protein
GHGEGTFTSDLSKQLEEERVRLFIEWLKAGGPKKIRYSGGGGGGGSGGGGSGGGGSAESKYGPPCPPCPAPEFEGGPSVFLFPPKPKDTLMISRTPEVTCVVVDVSQEDPEVQFNWYVDGVEVHNAKTKPREEQFNSTYRVVSVLTVLHQDWLNGKEYKCKVSNKGLPSSIEKTISKAKGQPREPQVYTLPPSQEEMTKNQVSLTCLVKGFYPSDIAVEWESNGQPENNYKTTPPVLDSDGSFFLYSRLTVDKSRWQEGNVFSCSVMHEALHNHYTQKSLSLSLGGGGSGSAHPIPDSSPLLQFGGQVRQRYLYTDDACQTEAHLEIREDGTVGGAADQSPESLLQLKALKPGVIQILGVKTSRFLCQRPDGALYGSLHFDPEACSFRELLLEDGYNVYQSEAHGLPLHLPGCKSPHRDPAPRGPARFLPLPGLPPAPPEPPGILAPQPPDVGSSDPLSMVGSQGRSPSYAS

SEQ ID NO: 214 - protein, 473 aa, Artificial Sequence
  Fusion Protein
HGEGTFTSDLSKQLEEERVQEFIEWLKAGGPSSGAPPPSGGGGGGGSGGGGSGGGGSAESKYGPPCPPCPAPEFEGGPSVFLFPPKPKDTLMISRTPEVTCVVVDVSQEDPEVQFNWYVDGVEVHNAKTKPREEQFNSTYRVVSVLTVLHQDWLNGKEYKCKVSNKGLPSSIEKTISKAKGQPREPQVYTLPPSQEEMTKNQVSLTCLVKGFYPSDIAVEWESNGQPENNYKTTPPVLDSDGSFFLYSRLTVDKSRWQEGNVFSCSVMHEALHNHYTQKSLSLSLGGGGSGSAHPIPDSSPLLQFGGQVRQRYLYTDDACQTEAHLEIREDGTVGGAADQSPESLLQLKALKPGVIQILGVKTSRFLCQRPDGALYGSLHFDPEACSFRELLLEDGYNVYQSEAHGLPLHLPGCKSPHRDPAPRGPARFLPLPGLPPAPPEPPGILAPQPPDVGSSDPLSMVGSQGRSPSYAS

SEQ ID NO: 215 - protein, 831 aa, Artificial Sequence
  Fusion Protein
HGEGTFTSDLSKQLEEERVQLFIEWLKATGPSSGAPPPSGGGGGGGSGGGGSGGGGSADAHKSEVAHRFKDLGEENFKALVLIAFAQYLQQCPFEDHVKLVNEVTEFAKTCVADESAENCDKSLHTLFGDKLCTVATLRETYGEMADCCAKQEPERNECFLQHKDDNPNLPRLVRPEVDVMCTAFHDNEETFLKKYLYEIARRHPYFYAPELLFFAKRYKAAFTECCQAADKAACLLPKLDELRDEGKASSAKQRLKCASLQKFGERAFKAWAVARLSQRFPKAEFAEVSKLVTDLTKVHTECCHGDLLECADDRADLAKYICENQDSISSKLKECCEKPLLEKSHCIAEVENDEMPADLPSLAADFVESKDVCKNYAEAKDVFLGMFLYEYARRHPDYSVVLLLRLAKTYETTLEKCCAAADPHECYAKVFDEFKPLVEEPQNLIKQNCELFEQLGEYKFQNALLVRYTKKVPQVSTPTLVEVSRNLGKVGSKCCKHPEAKRMPCAEDYLSVVLNQLCVLHEKTPVSDRVTKCCTESLVNRRPCFSALEVDETYVPKEFNAETFTFHADICTLSEKERQIKKQTALVELVKHKPKATKEQLKAVMDDFAAFVEKCCKADDKETCFAEEGKKLVAASQAALGLGGGSGSAHPIPDSSPLLQFGGQVRQRYLYTDDACQTEAHLEIREDGTVGGAADQSPESLLQLKALKPGVIQILGVKTSRFLCQRPDGALYGSLHFDPEACSFRELLLEDGYNVYQSEAHGLPLHLPGCKSPHRDPAPRGPARFLPLPGLPPAPPEPPGILAPQPPDVGSSDPLSMVYPSQGRSPSYAS

SEQ ID NO: 216 - protein, 830 aa, Artificial Sequence
  Fusion Protein
GHGEGTFTSDKSKQLEEEAVRLFIEWLKAGGPKKIRYSGGGGGGGSGGGGSGGGGSADAHKSEVAHRFKDLGEENFKALVLIAFAQYLQQCPFEDHVKLVNEVTEFAKTCVADESAENCDKSLHTLFGDKLCTVATLRETYGEMADCCAKQEPERNECFLQHKDDNPNLPRLVRPEVDVMCTAFHDNEETFLKKYLYEIARRHPYFYAPELLFFAKRYKAAFTECCQAADKAACLLPKLDELRDEGKASSAKQRLKCASLQKFGERAFKAWAVARLSQRFPKAEFAEVSKLVTDLTKVHTECCHGDLLECADDRADLAKYICENQDSISSKLKECCEKPLLEKSHCIAEVENDEMPADLPSLAADFVESKDVCKNYAEAKDVFLGMFLYEYARRHPDYSVVLLLRLAKTYETTLEKCCAAADPHECYAKVFDEFKPLVEEPQNLIKQNCELFEQLGEYKFQNALLVRYTKKVPQVSTPTLVEVSRNLGKVGSKCCKHPEAKRMPCAEDYLSVVLNQLCVLHEKTPVSDRVTKCCTESLVNRRPCFSALEVDETYVPKEFNAETFTFHADICTLSEKERQIKKQTALVELVKHKPKATKEQLKAVMDDFAAFVEKCCKADDKETCFAEEGKKLVAASQAALGLGGGSGSAHPIPDSSPLLQFGGQVRQRYLYTDDACQTEAHLEIREDGTVGGAADQSPESLLQLKALKPGVIQILGVKTSRFLCQRPDGALYGSLHFDPEACSFRELLLEDGYNVYQSEAHGLPLHLPGCKSPHRDPAPRGPARFLPLPGLPPAPPEPPGILAPQPPDVGSSDPLSMVYPSQGRSPSYAS

SEQ ID NO: 217 - protein, 475 aa, Artificial Sequence
  Fusion Protein
YSEGTFTSDLSILCEKRAVHEFIEWLIAGGPSSGKPPPKPGCGSGGGGGSGGGGSGGGGGADKTHTCPPCPAPEAAGGPSVFLFPPKPKDTLMISRTPEVTCVVVDVSHEDPEVKFNWYVDGVEVHNAKTKPREEQYNSTYRVVSVLTVLHQDWLNGKEYKCKVSNKALPAPIEKTISKAKGQPREPQVYTLPPSRDELTKNQVSLTCLVKGFYPSDIAVEWESNGQPENNYKTTPPVLDSDGSFFLYSKLTVDKSRWQQGNVFSCSVMHEALHNHYTQKSLSLSPGGGGSGSAHPIPDSSPLLQFGGQVRQRYLYTDDACQTEAHLEIREDGTVGGAADQSPESLLQLKALKPGVIQILGVKTSRFLCQRPDGALYGSLHFDPEACSFRELLLEDGYNVYQSEAHGLPLHLPGCKSPHRDPAPRGPARFLPLPGLPPAPPEPPGILAPQPPDVGSSDPLSMVYPSQGRSPSYAS

SEQ ID NO: 218 - protein, 445 aa, Artificial Sequence
  Fusion Protein
GHGEGTFTSDKSKQLEEEAVRLFIEWLKAGGDKTHTCPPCPAPEAAGGPSVFLFPPKPKDTLMISRTPEVTCVVVDVSHEDPEVKFNWYVDGVEVHNAKTKPREEQYNSTYRVVSVLTVLHQDWLNGKEYKCKVSNKALPAPIEKTISKAKGQPREPQVYTLPPSRDELTKNQVSLTCLVKGFYPSDIAVEWESNGQPENNYKTTPPVLDSDGSFFLYSKLTVDKSRWQQGNVFSCSVMHEALHNHYTQKSLSLSPGGGGSGSAHPIPDSSPLLQFGGQVRQRYLYTDDACQTEAHLEIREDGTVGGAADQSPESLLQLKALKPGVIQILGVKTSRFLCQRPDGALYGSLHFDPEACSFRELLLEDGYNVYQSEAHGLPLHLPGCKSPHRDPAPRGPARFLPLPGLPPAPPEPPGILAPQPPDVGSSDPLSMVYPSQGRSPSYAS

SEQ ID NO: 219 - protein, 464 aa, Artificial Sequence
  Fusion Protein
GHGEGTFTSDKSKQLEEEAVRLFIEWLKAGGGGGGGGGSGGGGSGGGGSADKTHTCPPCPAPEAAGGPSVFLFPPKPKDTLMISRTPEVTCVVVDVSHEDPEVKFNWYVDGVEVHNAKTKPREEQYNSTYRVVSVLTVLHQDWLNGKEYKCKVSNKALPAPIEKTISKAKGQPREPQVYTLPPSRDELTKNQVSLTCLVKGFYPSDIAVEWESNGQPENNYKTTPPVLDSDGSFFLYSKLTVDKSRWQQGNVFSCSVMHEALHNHYTQKSLSLSPGGGGSGSAHPIPDSSPLLQFGGQVRQRYLYTDDACQTEAHLEIREDGTVGGAADQSPESLLQLKALKPGVIQILGVKTSRFLCQRPDGALYGSLHFDPEACSFRELLLEDGYNVYQSEAHGLPLHLPGCKSPHRDPAPRGPARFLPLPGLPPAPPEPPGILAPQPPDVGSSDPLSMVYPSQGRSPSYAS

SEQ ID NO: 220 - protein, 460 aa, Artificial Sequence
  Fusion Protein
GHGEGTFTSDKSKQLEEEAVRLFIEWLKAGGPAPAPAPAPAPAGGGDKTHTCPPCPAPEAAGGPSVFLFPPKPKDTLMISRTPEVTCVVVDVSHEDPEVKFNWYVDGVEVHNAKTKPREEQYNSTYRVVSVLTVLHQDWLNGKEYKCKVSNKALPAPIEKTISKAKGQPREPQVYTLPPSRDELTKNQVSLTCLVKGFYPSDIAVEWESNGQPENNYKTTPPVLDSDGSFFLYSKLTVDKSRWQQGNVFSCSVMHEALHNHYTQKSLSLSPGGGGSGSAHPIPDSSPLLQFGGQVRQRYLYTDDACQTEAHLEIREDGTVGGAADQSPESLLQLKALKPGVIQILGVKTSRFLCQRPDGALYGSLHFDPEACSFRELLLEDGYNVYQSEAHGLPLHLPGCKSPHRDPAPRGPARFLPLPGLPPAPPEPPGILAPQPPDVGSSDPLSMVYPSQGRSPSYAS

SEQ ID NO: 221 - protein, 466 aa, Artificial Sequence
  Fusion Protein
GHGEGTFTSDKSKQLEEEAVRLFIEWLKAGPAPAPAEAAAKEAAAKPAPAPADKTHTCPPCPAPEAAGGPSVFLFPPKPKDTLMISRTPEVTCVVVDVSHEDPEVKFNWYVDGVEVHNAKTKPREEQYNSTYRVVSVLTVLHQDWLNGKEYKCKVSNKALPAPIEKTISKAKGQPREPQVYTLPPSRDELTKNQVSLTCLVKGFYPSDIAVEWESNGQPENNYKTTPPVLDSDGSFFLYSKLTVDKSRWQQGNVFSCSVMHEALHNHYTQKSLSLSPGGGGSGSAHPIPDSSPLLQFGGQVRQRYLYTDDACQTEAHLEIREDGTVGGAADQSPESLLQLKALKPGVIQILGVKTSRFLCQRPDGALYGSLHFDPEACSFRELLLEDGYNVYQSEAHGLPLHLPGCKSPHRDPAPRGPARFLPLPGLPPAPPEPPGILAPQPPDVGSSDPLSMVYPSQGRSPSYAS

SEQ ID NO: 222 - protein, 464 aa, Artificial Sequence
  Fusion Protein
GHGEGTFTSDKSKQLEEEAVRLFIEWLKAGGAEAAAKEAAAKEAAAKGGGDKTHTCPPCPAPEAAGGPSVFLFPPKPKDTLMISRTPEVTCVVVDVSHEDPEVKFNWYVDGVEVHNAKTKPREEQYNSTYRVVSVLTVLHQDWLNGKEYKCKVSNKALPAPIEKTISKAKGQPREPQVYTLPPSRDELTKNQVSLTCLVKGFYPSDIAVEWESNGQPENNYKTTPPVLDSDGSFFLYSKLTVDKSRWQQGNVFSCSVMHEALHNHYTQKSLSLSPGGGGSGSAHPIPDSSPLLQFGGQVRQRYLYTDDACQTEAHLEIREDGTVGGAADQSPESLLQLKALKPGVIQILGVKTSRFLCQRPDGALYGSLHFDPEACSFRELLLEDGYNVYQSEAHGLPLHLPGCKSPHRDPAPRGPARFLPLPGLPPAPPEPPGILAPQPPDVGSSDPLSMVYPSQGRSPSYAS

SEQ ID NO: 223 - protein, 489 aa, Artificial Sequence
  Fusion Protein
GHGEGTFTSDKSKQLEEEAVRLFIEWLKAGGAEAAAKEAAAKEAAAKEAAKALEAEAAKEAAKEAAKEAAKAGGGDKTHTCPPCPAPEAAGGPSVFLFPPKPKDTLMISRTPEVTCVVVDVSHEDPEVKFNWYVDGVEVHNAKTKPREEQYNSTYRVVSVLTVLHQDWLNGKEYKCKVSNKALPAPIEKTISKAKGQPREPQVYTLPPSRDELTKNQVSLTCLVKGFYPSDIAVEWESNGQPENNYKTTPPVLDSDGSFFLYSKLTVDKSRWQQGNVFSCSVMHEALHNHYTQKSLSLSPGGGGSGSAHPIPDSSPLLQFGGQVRQRYLYTDDACQTEAHLEIREDGTVGGAADQSPESLLQLKALKPGVIQILGVKTSRFLCQRPDGALYGSLHFDPEACSFRELLLEDGYNVYQSEAHGLPLHLPGCKSPHRDPAPRGPARFLPLPGLPPAPPEPPGILAPQPPDVGSSDPLSMVYPSQGRSPSYAS

SEQ ID NO: 224 - protein, 452 aa, Artificial Sequence
  Fusion Protein
GHGEGTFTSDKSKQLEEEAVRLFIEWLKAGGPKKIRYSDKTHTCPPCPAPEAAGGPSVFLFPPKPKDTLMISRTPEVTCVVVDVSHEDPEVKFNWYVDGVEVHNAKTKPREEQYNSTYRVVSVLTVLHQDWLNGKEYKCKVSNKALPAPIEKTISKAKGQPREPQVYTLPPSRDELTKNQVSLTCLVKGFYPSDIAVEWESNGQPENNYKTTPPVLDSDGSFFLYSKLTVDKSRWQQGNVFSCSVMHEALHNHYTQKSLSLSPGGGGSGSAHPIPDSSPLLQFGGQVRQRYLYTDDACQTEAHLEIREDGTVGGAADQSPESLLQLKALKPGVIQILGVKTSRFLCQRPDGALYGSLHFDPEACSFRELLLEDGYNVYQSEAHGLPLHLPGCKSPHRDPAPRGPARFLPLPGLPPAPPEPPGILAPQPPDVGSSDPLSMVYPSQGRSPSYAS

SEQ ID NO: 225 - protein, 467 aa, Artificial Sequence
  Fusion Protein
GHGEGTFTSDKSKQLEEEAVRLFIEWLKAGGPKKIRYSPAPAPAPAPAPAGGGDKTHTCPPCPAPEAAGGPSVFLFPPKPKDTLMISRTPEVTCVVVDVSHEDPEVKFNWYVDGVEVHNAKTKPREEQYNSTYRVVSVLTVLHQDWLNGKEYKCKVSNKALPAPIEKTISKAKGQPREPQVYTLPPSRDELTKNQVSLTCLVKGFYPSDIAVEWESNGQPENNYKTTPPVLDSDGSFFLYSKLTVDKSRWQQGNVFSCSVMHEALHNHYTQKSLSLSPGGGGSGSAHPIPDSSPLLQFGGQVRQRYLYTDDACQTEAHLEIREDGTVGGAADQSPESLLQLKALKPGVIQILGVKTSRFLCQRPDGALYGSLHFDPEACSFRELLLEDGYNVYQSEAHGLPLHLPGCKSPHRDPAPRGPARFLPLPGLPPAPPEPPGILAPQPPDVGSSDPLSMVYPSQGRSPSYAS

SEQ ID NO: 226 - protein, 474 aa, Artificial Sequence
  Fusion Protein
GHGEGTFTSDKSKQLEEEAVRLFIEWLKAGGPKKIRYSPAPAPAEAAAKEAAAKPAPAPADKTHTCPPCPAPEAAGGPSVFLFPPKPKDTLMISRTPEVTCVVVDVSHEDPEVKFNWYVDGVEVHNAKTKPREEQYNSTYRVVSVLTVLHQDWLNGKEYKCKVSNKALPAPIEKTISKAKGQPREPQVYTLPPSRDELTKNQVSLTCLVKGFYPSDIAVEWESNGQPENNYKTTPPVLDSDGSFFLYSKLTVDKSRWQQGNVFSCSVMHEALHNHYTQKSLSLSPGGGGSGSAHPIPDSSPLLQFGGQVRQRYLYTDDACQTEAHLEIREDGTVGGAADQSPESLLQLKALKPGVIQILGVKTSRFLCQRPDGALYGSLHFDPEACSFRELLLEDGYNVYQSEAHGLPLHLPGCKSPHRDPAPRGPARFLPLPGLPPAPPEPPGILAPQPPDVGSSDPLSMVYPSQGRSPSYAS

SEQ ID NO: 227 - protein, 471 aa, Artificial Sequence
  Fusion Protein
GHGEGTFTSDKSKQLEEEAVRLFIEWLKAGGPKKIRYSAEAAAKEAAAKEAAAKGGGDKTHTCPPCPAPEAAGGPSVFLFPPKPKDTLMISRTPEVTCVVVDVSHEDPEVKFNWYVDGVEVHNAKTKPREEQYNSTYRVVSVLTVLHQDWLNGKEYKCKVSNKALPAPIEKTISKAKGQPREPQVYTLPPSRDELTKNQVSLTCLVKGFYPSDIAVEWESNGQPENNYKTTPPVLDSDGSFFLYSKLTVDKSRWQQGNVFSCSVMHEALHNHYTQKSLSLSPGGGGSGSAHPIPDSSPLLQFGGQVRQRYLYTDDACQTEAHLEIREDGTVGGAADQSPESLLQLKALKPGVIQILGVKTSRFLCQRPDGALYGSLHFDPEACSFRELLLEDGYNVYQSEAHGLPLHLPGCKSPHRDPAPRGPARFLPLPGLPPAPPEPPGILAPQPPDVGSSDPLSMVYPSQGRSPSYAS

SEQ ID NO: 228 - protein, 496 aa, Artificial Sequence
  Fusion Protein
GHGEGTFTSDKSKQLEEEAVRLFIEWLKAGGPKKIRYSAEAAAKEAAAKEAAAKEAAKALEAEAAKEAAKEAAKEAAKAGGGDKTHTCPPCPAPEAAGGPSVFLFPPKPKDTLMISRTPEVTCVVVDVSHEDPEVKFNWYVDGVEVHNAKTKPREEQYNSTYRVVSVLTVLHQDWLNGKEYKCKVSNKALPAPIEKTISKAKGQPREPQVYTLPPSRDELTKNQVSLTCLVKGFYPSDIAVEWESNGQPENNYKTTPPVLDSDGSFFLYSKLTVDKSRWQQGNVFSCSVMHEALHNHYTQKSLSLSPGGGGSGSAHPIPDSSPLLQFGGQVRQRYLYTDDACQTEAHLEIREDGTVGGAADQSPESLLQLKALKPGVIQILGVKTSRFLCQRPDGALYGSLHFDPEACSFRELLLEDGYNVYQSEAHGLPLHLPGCKSPHRDPAPRGPARFLPLPGLPPAPPEPPGILAPQPPDVGSSDPLSMVYPSQGRSPSYAS

SEQ ID NO: 229 - protein, 472 aa, Artificial Sequence
  Fusion Protein
HGEGTFTSDKSKQLEKRLVRLFYEWLIAGGHSSGKPPPKGGGGGGGSGGGGSGGGGSADKTHTCPPCPAPEAAGGPSVFLFPPKPKDTLMISRTPEVTCVVVDVSHEDPEVKFNWYVDGVEVHNAKTKPREEQYNSTYRVVSVLTVLHQDWLNGKEYKCKVSNKALPAPIEKTISKAKGQPREPQVYTLPPSRDELTKNQVSLTCLVKGFYPSDIAVEWESNGQPENNYKTTPPVLDSDGSFFLYSKLTVDKSRWQQGNVFSCSVMHEALHNHYTQKSLSLSPGGGGSGSAHPIPDSSPLLQFGGQVRQRYLYTDDACQTEAHLEIREDGTVGGAADQSPESLLQLKALKPGVIQILGVKTSRFLCQRPDGALYGSLHFDPEACSFRELLLEDGYNVYQSEAHGLPLHLPGCKSPHRDPAPRGPARFLPLPGLPPAPPEPPGILAPQPPDVGSSDPLSMVYPSQGRSPSYAS

SEQ ID NO: 230 - protein, 460 aa, Artificial Sequence
  Fusion Protein
HGEGTFTSDLSKQMEEEAVRLFIEWLKNGGPSSGAPPPSGGGGSGGGGSGGGGSDKTHTCPPCPAPEAAGGPSVFLFPPKPKDTLMISRTPEVTCVVVDVSHEDPEVKFNWYVDGVEVHNAKTKPREEQYNSTYRVVSVLTVLHQDWLNGKEYKCKVSNKALPAPIEKTISKAKGQPREPQVYTLPPSREEMTKNQVSLTCLVKGFYPSDIAVEWESNGQPENNYKTTPPVLDSDGSFFLYSKLTVDKSRWQQGNVFSCSVMHEALHNHYTQKSLSLSPGKGSDSSPLLQFGGQVRQRYLYTDDACQTEAHLEIREDGTVGGAADQSPESLLQLKALKPGVIQILGVKTSRFLCQRPDGTLYGSLHFDPEACSFRELLLEDGYNVYQSEAHGLPLHLPCNRSPHRDPASRGPARFLPLPGLPPALPEPPGILAPQPPDVGSSDPLAMVGGSQARSPSYAS

SEQ ID NO: 231 - protein, 7 aa, Artificial Sequence
  Linker
GGGSGSA

SEQ ID NO: 232 - protein, 19 aa, Artificial Sequence
  Linker
GGGGGGGSGGGGSGGGGSA

SEQ ID NO: 233 - protein, 11 aa, Artificial Sequence
  Linker
GGGSGGSGGSA

SEQ ID NO: 234 - protein, 15 aa, Artificial Sequence
  Linker
GGGSGGGGSGGGGSA

SEQ ID NO: 235 - protein, 15 aa, Artificial Sequence
  Linker
GGGGSGGGGSGGGGS

SEQ ID NO: 236 - protein, 15 aa, Artificial Sequence
  Linker
PAPAPAPAPAPAGGG

SEQ ID NO: 237 - protein, 19 aa, Artificial Sequence
  Linker
AEAAAKEAAAKEAAAKGGG

SEQ ID NO: 238 - protein, 19 aa, Artificial Sequence
  Linker
GGKKGKKGKKGGSGKKGSA

SEQ ID NO: 239 - protein, 21 aa, Artificial Sequence
  Linker
GGKKKKGGKKKKGGKKKKGSA

SEQ ID NO: 240 - protein, 22 aa, Artificial Sequence
  Linker
PAPAPAEAAAKEAAAKPAPAPA

SEQ ID NO: 241 - protein, 24 aa, Artificial Sequence
  Linker
GGKKKKKGGKKKKKGGKKKKKGSA

SEQ ID NO: 242 - protein, 44 aa, Artificial Sequence
  Linker
AEAAAKEAAAKEAAAKEAAKALEAEAAKEAAKEAAKEAAKAGGG

SEQ ID NO: 243 - protein, 4 aa, Artificial Sequence
  Linker
PAPA

SEQ ID NO: 244 - protein, 6 aa, Artificial Sequence
  Linker
PAPAPA

SEQ ID NO: 245 - protein, 9 aa, Artificial Sequence
  Linker
PAPAPAGGG

SEQ ID NO: 246 - protein, 21 aa, Artificial Sequence
  Signal Sequence
MYRMQLLSCIALLSLALVTNS

SEQ ID NO: 247 - protein, 28 aa, Artificial Sequence
  His-Tag
DIQTGGSHAHGHGHAHGHGGSGENLYFQ

SEQ ID NO: 248 - protein, 20 aa, Artificial Sequence
  His-Tag
MGHHHHHHHHGGGENLYFQG

SEQ ID NO: 249 - protein, 108 aa, Artificial Sequence
  His-Tag
MGHHHHHHGSLQDSEVNQEAKPEVKPEVKPETHINLKVSDGSSEIFFKIKKTTPLRRLMEAFAKRQGKEMDSLRFLYDGIRIQADQAPEDLDMEDNDIIEAHREQIGG

SEQ ID NO: 250 - protein, 209 aa, Homo sapiens [sequence omitted]

SEQ ID NO: 251 - protein, 181 aa, Homo sapiens
HPIPDSSPLLQFGGQVRQRYLYTDDAQQTEAHLEIREDGTVGGAADQSPESLLQLKALKPGVIQILGVKTSRFLCQRPDGALYGSLHFDPEACSFRELLLEDGYNVYQSEAHGLPLHLPGNKSPHRDPAPRGPARFLPLPGLPPAPPEPPGILAPQPPDVGSSDPLSMVGPSQGRSPSYAS

SEQ ID NO: 252 - protein, 182 aa, Artificial Sequence
  G-FGF21
GHPIPDSSPLLQFGGQVRQRYLYTDDAQQTEAHLEIREDGTVGGAADQSPESLLQLKALKPGVIQILGVKTSRFLCQRPDGALYGSLHFDPEACSFRELLLEDGYNVYQSEAHGLPLHLPGNKSPHRDPAPRGPARFLPLPGLPPAPPEPPGILAPQPPDVGSSDPLSMVGPSQGRSPSYAS

SEQ ID NO: 253 - protein, 180 aa, Artificial Sequence
  FGF21 Variant
HPIPDSSPLLQFGGQVRQRYLYTDDACQTEAHLEIREDGTVGGAADQSPESLLQLKALKPGVIQILGVKTSRFLCQRPDGALYGSLHFDPEACSFRELLLEDGYNVYQSEAHGLPLHLPGCKSPHRDPAPRGPARFLPLPGLPPAPPEPPGILAPQPPDVGSSDPLSMVGSQGRSPSYAS

SEQ ID NO: 254 - protein, 181 aa, Artificial Sequence
  FGF21 Variant
HPIPDSSPLLQFGGQVRQRYLYTDDACQTEAHLEIREDGTVGGAADQSPESLLQLKALKPGVIQILGVKTSRFLCQRPDGALYGSLHFDPEACSFRELLLEDGYNVYQSEAHGLPLHLPGCKSPHRDPAPRGPARFLPLPGLPPAPPEPPGILAPQPPDVGSSDPLSMVYPSQGRSPSYAS

SEQ ID NO: 255 - protein, 180 aa, Artificial Sequence
  FGF21 Variant
HPIPDSSPLLQFGGQVRQRYLYTDDACQTEAHLEIREDGTVGGAADQSPESLLQLKALKPGVIQILGVKTSRFLCQRPDGALYGSLHFDPEACSFRELLLEDGYNVYQSEAHGLPLHLCGNKSPHRDPAPRGPARFLPLPGLPPAPPEPPGILAPQPPDVGSSDPLSMVGSQGRSPSYAS

SEQ ID NO: 256 - protein, 181 aa, Artificial Sequence
  FGF21 Variant
HPIPDSSPLLQFGGQVRQRYLYTDDACQTEAHLEIREDGTVGGAADQSPESLLQLKALKPGVIQILGVKTSRFLCQRPDGALYGSLHFDPEACSFRELLLEDGYNVYQSEAHGLPLHLCGNKSPHRDPAPRGPARFLPLPGLPPAPPEPPGILAPQPPDVGSSDPLSMVYPSQGRSPSYAS

SEQ ID NO: 257 - protein, 225 aa, Artificial Sequence
  IgG1Fc-LALA
DKTHTCPPCPAPEAAGGPSVFLFPPKPKDTLMISRTPEVTCVVVDVSHEDPEVKFNWYVDGVEVHNAKTKPREEQYNSTYRVVSVLTVLHQDWLNGKEYKCKVSNKALPAPIEKTISKAKGQPREPQVYTLPPSRDELTKNQVSLTCLVKGFYPSDIAVEWESNGQPENNYKTTPPVLDSDGSFFLYSKLTVDKSRWQQGNVFSCSVMHEALHNHYTQKSLSLSP

SEQ ID NO: 258 - protein, 228 aa, Artificial Sequence
  IgG4Fc
ESKYGPPCPPCPAPEFEGGPSVFLFPPKPKDTLMISRTPEVTCVVVDVSQEDPEVQFNWYVDGVEVHNAKTKPREEQFNSTYRVVSVLTVLHQDWLNGKEYKCKVSNKGLPSSIEKTISKAKGQPREPQVYTLPPSQEEMTKNQVSLTCLVKGFYPSDIAVEWESNGQPENNYKTTPPVLDSDGSFFLYSRLTVDKSRWQEGNVFSCSVMHEALHNHYTQKSLSLSLG

SEQ ID NO: 259 - protein, 226 aa, Artificial Sequence
  IgG1NNAS
DKTHTCPPCPAPELLGGPSVFLFPPKPKDTLMISRTPEVTCVVVDVSHEDPEVKFNWYVDGVEVHNAKTKPREEQYNNASRVVSVLTVLHQDWLNGKEYKCKVSNKALPAPIEKTISKAKGQPREPQVYTLPPSRDELTKNQVSLTCLVKGFYPSDIAVEWESNGQPENNYKTTPPVLDSDGSFFLYSKLTVDKSRWQQGNVFSCSVMHEALHNHYTQKSLSLSPG

SEQ ID NO: 260 - protein, 30 aa, Homo sapiens
HAEGTFTSDVSSYLEGQAAKEFIAWLVKGR

SEQ ID NO: 261 - protein, 39 aa, Artificial Sequence
  GLP Peptide
HGEGTFTSDLSKQLEEERVQLFIEWLKATGPSSGAPPPS

SEQ ID NO: 262 - protein, 38 aa, Artificial Sequence
  GLP Peptide
GHGEGTFTSDKSKQLEEEAVRLFIEWLKAGGPKKIRYS

SEQ ID NO: 263 - protein, 44 aa, Artificial Sequence
  GLP Peptide
HGEGTFTSDLSIQLDEEAVRLFIEWLLATGPVSGAPPSKKKKKK

SEQ ID NO: 264 - protein, 39 aa, Artificial Sequence
  GLP Peptide
HGEGTFTSDLSKQLEEEAVRLFIEWLKAGGPSSGAPPPS

SEQ ID NO: 265 - protein, 39 aa, Artificial Sequence
  GLP Peptide
HGEGTFTSDLSKQLEEEAVRLFIEWLKATGPSSGAPPPS

SEQ ID NO: 266 - protein, 39 aa, Artificial Sequence
  GLP Peptide
HGEGTFTSDLSKQLEEEAVQLFIEWLKATGPSSGAPPPS

SEQ ID NO: 267 - protein, 39 aa, Artificial Sequence
  GLP Peptide
HGEGTFTSDLSKQLEEEAVQEFIEWLKAGGPSSGAPPPS

SEQ ID NO: 268 - protein, 39 aa, Artificial Sequence
  GLP Peptide
HGEGTFTSDLSKQLEEERVQEFIEWLKAGGPSSGAPPPS

SEQ ID NO: 269 - protein, 39 aa, Artificial Sequence
  GLP Peptide
HGEGTFTSDLSIQLEEEAVRLFIEWLLATGPVSGAPPPS

SEQ ID NO: 270 - protein, 39 aa, Artificial Sequence
  GLP Peptide
HGEGTFTSDLSIQLEEEAVRLFIEWLLATGPESGAPPPS

SEQ ID NO: 271 - protein, 39 aa, Artificial Sequence
  GLP Peptide
HGEGTFTSDLSIQLEEERVQEFIEWLLAGGPSSGAPPPS

SEQ ID NO: 272 - protein, 39 aa, Artificial Sequence
  GLP Peptide
HGEGTFTSDLSIQLEEEAVQEFIEWLLATGPSSGAPPPS

SEQ ID NO: 273 - protein, 39 aa, Artificial Sequence
  GLP Peptide
HGEGTFTSDLSILLDEEAVREFIEWLLATGPVSGAPPPS

SEQ ID NO: 274 - protein, 39 aa, Artificial Sequence
  GLP Peptide
YGEGTFTSDKSKQLEKRLAHLFIEWLIAGGHSSGKPPPK

SEQ ID NO: 275 - protein, 39 aa, Artificial Sequence
  GLP Peptide
YGEGTFTSDKSKQLEKRLAHLFIEWLIKGGHSSGKPPPK

SEQ ID NO: 276 - protein, 39 aa, Artificial Sequence
  GLP Peptide
HTEGTFTSDKSKQLEKRLVRLFIEWLIKGGHSSGKPPPK

SEQ ID NO: 277 - protein, 39 aa, Artificial Sequence
  GLP Peptide
HGEGTFTSDKSKQLAKRLVRLFIEWLIKGGHSSGKPPPK

SEQ ID NO: 278 - protein, 38 aa, Artificial Sequence; identical to SEQ ID NO: 262
  GLP Peptide

SEQ ID NO: 279 - protein, 38 aa, Artificial Sequence
  GLP Peptide
GHGEGTFTSDKSKQLEEERVQLFIEWLKAGGPKKIRYS

SEQ ID NO: 280 - protein, 37 aa, Artificial Sequence
  GLP Peptide
HGEGTFTSDKSKQLEEERVQLFIEWLKAGGPKKIRYS

SEQ ID NO: 281 - protein, 38 aa, Artificial Sequence
  GLP Peptide
GHGEGTFTSDLSKQLEEEAVRLFIEWLKAGGPKKIRYS

SEQ ID NO: 282 - protein, 38 aa, Artificial Sequence
  GLP Peptide
GHGEGTFTSDLSKQLEEERVRLFIEWLKAGGPKKIRYS

SEQ ID NO: 283 - protein, 37 aa, Artificial Sequence
  GLP Peptide
HGEGTFTSDLSKQLEEERVRLFIEWLKAGGPKKIRYS

SEQ ID NO: 284 - protein, 38 aa, Artificial Sequence
  GLP Peptide
GHGEGTFTSDLSKQLEEERVQLFIEWLKAGGPKKIRYS

SEQ ID NO: 285 - protein, 37 aa, Artificial Sequence
  GLP Peptide
HGEGTFTSDLSKQLEEEAVRLFIEWLKAGGPKKIRYS

SEQ ID NO: 286 - protein, 38 aa, Artificial Sequence
  GLP Peptide
GHGEGTFTSDLSKQLEEEAVQLFIEWLKAGGPKKIRYS

SEQ ID NO: 287 - protein, 37 aa, Artificial Sequence
  GLP Peptide
HGEGTFTSDLSKQLEEEAVQLFIEWLKAGGPKKIRYS

SEQ ID NO: 288 - protein, 37 aa, Artificial Sequence
  GLP Peptide
HGEGTFTSDKSKQLEEEAVRLFIEWLKAGGPKKIRYS

SEQ ID NO: 289 - protein, 37 aa, Artificial Sequence
  GLP Peptide
HGEGTFTSDKSKQLEEEAVQLFIEWLKAGGPKKIRYS

SEQ ID NO: 290 - protein, 38 aa, Artificial Sequence
  GLP Peptide
GHGEGTFTSDKSKQLEEEAVRLFIEWLKAGGPKKQRLS

SEQ ID NO: 291 - protein, 40 aa, Artificial Sequence
  GLP Peptide
GHGEGTFTSDLSKQLEEEAVQLFIEWLKAGGPSSGAPPPS

SEQ ID NO: 292 - protein, 40 aa, Artificial Sequence
  GLP Peptide
GHGEGTFTSDLSKQLEEEAVRLFIEWLKAGGPSSGAPPPS

SEQ ID NO: 293 - protein, 40 aa, Artificial Sequence
  GLP Peptide
GHGEGTFTSDKSKQLEEEAVRLFIEWLKAGGPSSGAPPPS

SEQ ID NO: 294 - protein, 40 aa, Artificial Sequence
  GLP Peptide
GHGEGTFTSDLSKQLEEERVQLFIEWLKAGGPSSGAPPPS

SEQ ID NO: 295 - protein, 39 aa, Artificial Sequence
  GLP Peptide
YGEGTFTSDKSQLLEKRLAHLFIEWLIAGGHSSGKPPPK

SEQ ID NO: 296 - protein, 39 aa, Artificial Sequence
  GLP Peptide
HGEGTFTSDKSKQLEKRLVFLFIEWLIAGGHSSGKPPPK

SEQ ID NO: 297 - protein, 38 aa, Artificial Sequence
  GLP Peptide
GHGEGTFTSDKSKQLEEEAVQLFIEWLKAGGPKKIRYS

SEQ ID NO: 298 - protein, 38 aa, Artificial Sequence
  GLP Peptide
GHGEGTFTSDKSKQLEEERVRLFIEWLKAGGPKKIRYS

SEQ ID NO: 299 - protein, 37 aa, Artificial Sequence
  GLP Peptide
HGEGTFTSDKSKQLEEERVRLFIEWLKAGGPKKIRYS

SEQ ID NO: 300 - protein, 39 aa, Artificial Sequence
  GLP Peptide
HGEGTFTSDKSKQLEEEAVRLFIEWLKAGGPSSGAPPPS

SEQ ID NO: 301 - protein, 32 aa, Artificial Sequence
  GLP Peptide
GHGEGTFTSDKSKQLEEEAVRLFIEWLKAGGP

SEQ ID NO: 302 - protein, 40 aa, Artificial Sequence
  GLP Peptide
AHGEGTFTSDKSIQLEKEAVRLFIEWLLAGGHPSGKPPPK

SEQ ID NO: 303 - protein, 40 aa, Artificial Sequence
  GLP Peptide
AHGEGTFTSDLSILLDEEAVQEFIEWLLATGPSSGAPPPS

SEQ ID NO: 304 - protein, 40 aa, Artificial Sequence
  GLP Peptide
AHGEGTFTSDLSILLDEEAVQEFIEWLLATGPVSGAPPPS

SEQ ID NO: 305 - protein, 40 aa, Artificial Sequence
  GLP Peptide
AHGEGTFTSDLSILLDEEAVQLFIEWLLATGPSSGAPPPS

SEQ ID NO: 306 - protein, 40 aa, Artificial Sequence
  GLP Peptide
AHGEGTFTSDLSILLDEEAVQLFIEWLLATGPVSGAPPPS

SEQ ID NO: 307 - protein, 40 aa, Artificial Sequence
  GLP Peptide
AHGEGTFTSDLSILLDEEAVREFIEWLLATGPSSGAPPPS

SEQ ID NO: 308 - protein, 40 aa, Artificial Sequence
  GLP Peptide
AHGEGTFTSDLSILLDEEAVREFIEWLLATGPVSGAPPPS

SEQ ID NO: 309 - protein, 40 aa, Artificial Sequence
  GLP Peptide
AHGEGTFTSDLSILLEEEAVQLFIEWLLATGPVSGAPPPS

SEQ ID NO: 310 - protein, 40 aa, Artificial Sequence
  GLP Peptide
AHGEGTFTSDLSILLEEEAVREFIEWLLATGPSSGAPPPS

SEQ ID NO: 311 - protein, 40 aa, Artificial Sequence
  GLP Peptide
AHGEGTFTSDLSILLEEEAVREFIEWLLATGPVSGAPPPS

SEQ ID NO: 312 - protein, 40 aa, Artificial Sequence
  GLP Peptide
AHGEGTFTSDLSILLEEEAVRLFIEWLLATGPVSGAPPPS

SEQ ID NO: 313 - protein, 40 aa, Artificial Sequence
  GLP Peptide
AHGEGTFTSDLSIQLDEEAVQEFIEWLLATGPSSGAPPPS

SEQ ID NO: 314 - protein, 40 aa, Artificial Sequence
  GLP Peptide
AHGEGTFTSDLSIQLDEEAVQEFIEWLLATGPVSGAPPPS

SEQ ID NO: 315 - protein, 40 aa, Artificial Sequence
  GLP Peptide
AHGEGTFTSDLSIQLDEEAVQLFIEWLLATGPSSGAPPPS

SEQ ID NO: 316 - protein, 40 aa, Artificial Sequence
  GLP Peptide
AHGEGTFTSDLSIQLDEEAVQLFIEWLLATGPVSGAPPPS

SEQ ID NO: 317 - protein, 40 aa, Artificial Sequence
  GLP Peptide
AHGEGTFTSDLSIQLEEEAVQEFIEWLLATGPVSGAPPPS

SEQ ID NO: 318 - protein, 40 aa, Artificial Sequence
  GLP Peptide
AHGEGTFTSDLSIQLEEEAVQLFIEWLLATGPSSGAPPPS

SEQ ID NO: 319 - protein, 40 aa, Artificial Sequence
  GLP Peptide
AHGEGTFTSDLSIQLEEEAVQLFIEWLLATGPVSGAPPPS

SEQ ID NO: 320 - protein, 40 aa, Artificial Sequence
  GLP Peptide
AHGEGTFTSDLSIQLEEEAVREFIEWLLATGPVSGAPPPS

SEQ ID NO: 321 - protein, 40 aa, Artificial Sequence
  GLP Peptide
AHGEGTFTSDLSIQLEEEAVRLFIEWLLATGPSSGAPPPS

SEQ ID NO: 322 - protein, 39 aa, Artificial Sequence
  GLP Peptide
FGEGTFTSDKSKQLEKRLVRLFIEWLIAGGHSSGKPPPK

SEQ ID NO: 323 - protein, 40 aa, Artificial Sequence
  GLP Peptide
GHGEGTFTSDKSIQLEEEAVRLFIEWLLAGGHPSGKPPPK

SEQ ID NO: 324 - protein, 38 aa, Artificial Sequence
  GLP Peptide
GHGEGTFTSDKSKQLEEEAERLFIEWLKAGGPKKIRYS

SEQ ID NO: 325 - protein, 38 aa, Artificial Sequence
  GLP Peptide
GHGEGTFTSDKSKQLEEEAGRLFIEWLKAGGPKKIRYS

SEQ ID NO: 326 - protein, 38 aa, Artificial Sequence
  GLP Peptide
GHGEGTFTSDKSKQLEEEAHRLFIEWLKAGGPKKIRYS

SEQ ID NO: 327 - protein, 38 aa, Artificial Sequence
  GLP Peptide
GHGEGTFTSDKSKQLEEEAKRLFIEWLKAGGPKKIRYS

SEQ ID NO: 328 - protein, 38 aa, Artificial Sequence
  GLP Peptide
GHGEGTFTSDKSKQLEEEAQRLFIEWLKAGGPKKIRYS

SEQ ID NO: 329 - protein, 38 aa, Artificial Sequence
  GLP Peptide
GHGEGTFTSDKSKQLEEEASRLFIEWLKAGGPKKIRYS

SEQ ID NO: 330 - protein, 38 aa, Artificial Sequence
  GLP Peptide
GHGEGTFTSDKSKQLEEEATRLFIEWLKAGGPKKIRYS

SEQ ID NO: 331 - protein, 30 aa, Artificial Sequence
  GLP Peptide
GHGEGTFTSDKSKQLEEEAVRLFIEWLKAG

SEQ ID NO: 332 - protein, 31 aa, Artificial Sequence
  GLP Peptide
GHGEGTFTSDKSKQLEEEAVRLFIEWLKAGG

SEQ ID NO: 333 - protein, 40 aa, Artificial Sequence
  GLP Peptide
GHGEGTFTSDKSKQLEEEAVRLFIEWLKAGGHPSGKPPPK

SEQ ID NO: 334 - protein, 40 aa, Artificial Sequence
  GLP Peptide
GHGEGTFTSDKSQLLEKRLVHLFIEWLIAGGHSSGKLPPK

SEQ ID NO: 335 - protein, 40 aa, Artificial Sequence
  GLP Peptide
GHGEGTFTSDLSIQLDEEAVQEFIEWLLATGPVSGAPPPS

SEQ ID NO: 336 - protein, 40 aa, Artificial Sequence
  GLP Peptide
GHGEGTFTSDLSIQLDEEAVQLFIEWLLATGPVSGAPPPS

SEQ ID NO: 337 - protein, 40 aa, Artificial Sequence
  GLP Peptide
GHGEGTFTSDLSIQLDEEAVREFIEWLLATGPSSGAPPPS

SEQ ID NO: 338 - protein, 40 aa, Artificial Sequence
  GLP Peptide
GHGEGTFTSDLSIQLEEEAVQLFIEWLLATGPSSGAPPPS

SEQ ID NO: 339 - protein, 40 aa, Artificial Sequence
  GLP Peptide
GHGEGTFTSDLSIQLEEEAVRLFIEWLLAGGPSKGKPPPK

SEQ ID NO: 340 - protein, 40 aa, Artificial Sequence
  GLP Peptide
GHGEGTFTSDLSIQLEEEAVRLFIEWLLAGGPSSGAPPPS

SEQ ID NO: 341 - protein, 40 aa, Artificial Sequence
  GLP Peptide
GHGEGTFTSDLSIQLEEEAVRLFIEWLLAGGPSSGKPKPK

SEQ ID NO: 342 - protein, 40 aa, Artificial Sequence
  GLP Peptide
GHGEGTFTSDLSIQLEEEAVRLFIEWLLAGGPSSGKPPPK

SEQ ID NO: 343 - protein, 40 aa, Artificial Sequence
  GLP Peptide
GHGEGTFTSDLSIQLEEEAVRLFIEWLLAKGKSKGKPKPK

SEQ ID NO: 344 - protein, 40 aa, Artificial Sequence
  GLP Peptide
GHGEGTFTSDLSIQLEEEAVRLFIEWLLATGPSSGAPPPS

SEQ ID NO: 345 - protein, 40 aa, Artificial Sequence
  GLP Peptide
GHGEGTFTSDLSKQMEEEAVRLFIEWLKNGGPSSGAPPPS

SEQ ID NO: 346 - protein, 40 aa, Artificial Sequence
  GLP Peptide
GYGEGTFTSDKSQLLEERLVHLFIEWLIAGGHSSIKPPPK

SEQ ID NO: 347 - protein, 39 aa, Artificial Sequence
  GLP Peptide
HAQGTFTSDLSKQLESRRAQEFIEWLLATGPESGAPPPS

SEQ ID NO: 348 - protein, 39 aa, Artificial Sequence
  GLP Peptide
HGEGTFTSDKSILLAKRLVRLFIEWLIAGGHSSGKPPPK

SEQ ID NO: 349 - protein, 39 aa, Artificial Sequence
  GLP Peptide
HGEGTFTSDKSKLLEKRAAHLFIEWLIAGGHSKGKPPPK

SEQ ID NO: 350 - protein, 39 aa, Artificial Sequence
  GLP Peptide
HGEGTFTSDKSKLLEKRAAHLFIEWLIAGGHSSIKPPPK

SEQ ID NO: 351 - protein, 39 aa, Artificial Sequence
  GLP Peptide
HGEGTFTSDKSKLLEKRLAHLFIEWLIAGGHSKGKPPPK

SEQ ID NO: 352 - protein, 39 aa, Artificial Sequence
  GLP Peptide
HGEGTFTSDKSKLLEKRLAHLFIEWLIKGGHKSGKPPPK

SEQ ID NO: 353 - protein, 39 aa, Artificial Sequence
  GLP Peptide
HGEGTFTSDKSKLLEKRLAHLFIEWLIKGGHSKGKPPPK

SEQ ID NO: 354 - protein, 39 aa, Artificial Sequence
  GLP Peptide
HGEGTFTSDKSKLLEKRLAHLFIEWLIKGGHSSIKPPPK

SEQ ID NO: 355 - protein, 39 aa, Artificial Sequence
  GLP Peptide
HGEGTFTSDKSKLLEKRLAHLFIEWLLAGGHSKGKPPPK

SEQ ID NO: 356 - protein, 37 aa, Artificial Sequence
  GLP Peptide
HGEGTFTSDKSKQLAEEAVQLFIEWLLAGGPKKIRYS

SEQ ID NO: 357 - protein, 37 aa, Artificial Sequence
  GLP Peptide
HGEGTFTSDKSKQLAEEAVQLFIEWLLAGGPSKEIIS

SEQ ID NO: 358 - protein, 37 aa, Artificial Sequence
  GLP Peptide
HGEGTFTSDKSKQLAERAVQLFIEWLLAGGPKKIRYS

SEQ ID NO: 359 - protein, 39 aa, Artificial Sequence
  GLP Peptide
HGEGTFTSDKSKQLAERLAKLFIEWLIAGGHSSGKPPPK

SEQ ID NO: 360 - protein, 39 aa, Artificial Sequence
  GLP Peptide
HGEGTFTSDKSKQLAERLAREFIEWLIAGGHSSGKPPPK

SEQ ID NO: 361 - protein, 39 aa, Artificial Sequence
  GLP Peptide
HGEGTFTSDKSKQLAERLVKLFIEWLIAGGHSSGKPPPK

SEQ ID NO: 362 - protein, 37 aa, Artificial Sequence
  GLP Peptide
HGEGTFTSDKSKQLAERLVQLFIEWLLAGGPKKIRYS

SEQ ID NO: 363 - protein, 39 aa, Artificial Sequence
  GLP Peptide
HGEGTFTSDKSKQLAERLVREFIEWLIAGGHSSGKPPPK

SEQ ID NO: 364 - protein, 39 aa, Artificial Sequence
  GLP Peptide
HGEGTFTSDKSKQLAERLVRLFIEWLIAGGHSSGKPPPK

SEQ ID NO: 365 - protein, 37 aa, Artificial Sequence
  GLP Peptide
HGEGTFTSDKSKQLAKEAVQLFIEWLLAGGPKKIRYS

SEQ ID NO: 366 - protein, 37 aa, Artificial Sequence
  GLP Peptide
HGEGTFTSDKSKQLAKELVQLFIEWLLAGGPKKIRYS

SEQ ID NO: 367 - protein, 37 aa, Artificial Sequence
  GLP Peptide
HGEGTFTSDKSKQLAKRAVQLFIEWLLAGGPKKIRYS

SEQ ID NO: 368 - protein, 39 aa, Artificial Sequence
  GLP Peptide
HGEGTFTSDKSKQLAKRLAHLFIEWLIAGGHSSGKPPPK

SEQ ID NO: 369 - protein, 39 aa, Artificial Sequence
  GLP Peptide
HGEGTFTSDKSKQLAKRLAQEFIEWLIKGGHSSGKPPPK

SEQ ID NO: 370 - protein, 37 aa, Artificial Sequence
  GLP Peptide
HGEGTFTSDKSKQLAKRLVQLFIEWLLAGGPKKIRYS

SEQ ID NO: 371 - protein, 39 aa, Artificial Sequence
  GLP Peptide
HGEGTFTSDKSKQLAKRLVREFIEWLIEGGHSSGKPPPK

SEQ ID NO: 372 - protein, 39 aa, Artificial Sequence
  GLP Peptide
HGEGTFTSDKSKQLAKRLVREFIEWLIKGGHSSGKPPPK

SEQ ID NO: 373 - protein, 39 aa, Artificial Sequence
  GLP Peptide
HGEGTFTSDKSKQLAKRLVRHFIEWLIKGGHSSGKPPPK

SEQ ID NO: 374 - protein, 39 aa, Artificial Sequence
  GLP Peptide
HGEGTFTSDKSKQLAKRLVRLFIEWLIAGGHSSGKPPPK

SEQ ID NO: 375 - protein, 39 aa, Artificial Sequence
  GLP Peptide
HGEGTFTSDKSKQLAKRLVRLFIEWLIKGGHSSGKPPPS

SEQ ID NO: 376 - protein, 39 aa, Artificial Sequence
  GLP Peptide
HGEGTFTSDKSKQLAKRLVRLFIEWLIKGGPSSGAPPPS

SEQ ID NO: 377 - protein, 39 aa, Artificial Sequence
  GLP Peptide
HGEGTFTSDKSKQLAKRLVRLFVQWLIKGGHSSGKPPPK

SEQ ID NO: 378 - protein, 39 aa, Artificial Sequence
  GLP Peptide
HGEGTFTSDKSKQLDEQRAKEFIEWLKAGGHPSGKPPPK

SEQ ID NO: 379 - protein, 39 aa, Artificial Sequence
  GLP Peptide
HGEGTFTSDKSKQLEEELARLFYEWLIAGGHSKGKPPPK

SEQ ID NO: 380 - protein, 39 aa, Artificial Sequence
  GLP Peptide
HGEGTFTSDKSKQLEEELVRLFYEWLIKGGHSSIKPPPK

SEQ ID NO: 381 - protein, 39 aa, Artificial Sequence
  GLP Peptide
HGEGTFTSDKSKQLEEELVRLFYEWLINGGHSKGKPPPK

SEQ ID NO: 382 - protein, 39 aa, Artificial Sequence
  GLP Peptide
HGEGTFTSDKSKQLEEELVRLFYEWLINGGHSSIKPPPK

SEQ ID NO: 383 - protein, 39 aa, Artificial Sequence
  GLP Peptide
HGEGTFTSDKSKQLEEELVRLFYEWLLAGGHSSIKPPPK

SEQ ID NO: 384 - protein, 39 aa, Artificial Sequence
  GLP Peptide
HGEGTFTSDKSKQLEERLARLFYEWLIAGGHSKIKPPPK

SEQ ID NO: 385 - protein, 39 aa, Artificial Sequence
  GLP Peptide
HGEGTFTSDKSKQLEERLARLFYEWLINGGHSSIKPPPK

SEQ ID NO: 386 - protein, 39 aa, Artificial Sequence
  GLP Peptide
HGEGTFTSDKSKQLEERLARLFYEWLKAGGHSKGKPPPK

SEQ ID NO: 387 - protein, 39 aa, Artificial Sequence
  GLP Peptide
HGEGTFTSDKSKQLEERLARLFYEWLKAGGHSSIKPPPK

SEQ ID NO: 388 - protein, 39 aa, Artificial Sequence
  GLP Peptide
HGEGTFTSDKSKQLEKEAVRLFYEWLKAGGHSKGKPPPK

SEQ ID NO: 389 - protein, 39 aa, Artificial Sequence
  GLP Peptide
HGEGTFTSDKSKQLEKELVRLFYEWLINGGHSKIKPPPK

SEQ ID NO: 390 - protein, 39 aa, Artificial Sequence
  GLP Peptide
HGEGTFTSDKSKQLEKELVRLFYEWLINGGHSSIRPPPK

SEQ ID NO: 391 - protein, 39 aa, Artificial Sequence
  GLP Peptide
HGEGTFTSDKSKQLEKELVRLFYEWLINGGPSKGKPPPK

SEQ ID NO: 392 - protein, 39 aa, Artificial Sequence
  GLP Peptide
HGEGTFTSDKSKQLEKELVRLFYEWLINGGPSSIKPPPK

SEQ ID NO: 393 - protein, 39 aa, Artificial Sequence
  GLP Peptide
HGEGTFTSDKSKQLEKELVRLFYEWLKAGGHSKIKPPPK

SEQ ID NO: 394 - protein, 39 aa, Artificial Sequence
  GLP Peptide
HGEGTFTSDKSKQLEKELVRLFYEWLKAGGHSKQKPPPK

SEQ ID NO: 395 - protein, 39 aa, Artificial Sequence
  GLP Peptide
HGEGTFTSDKSKQLEKELVRLFYEWLKKGGHSSIKPPPK

SEQ ID NO: 396 - protein, 39 aa, Artificial Sequence
  GLP Peptide
HGEGTFTSDKSKQLEKELVRLFYEWLKNGGHSKGKPPPK

SEQ ID NO: 397 - protein, 39 aa, Artificial Sequence
  GLP Peptide
HGEGTFTSDKSKQLEKELVRLFYEWLKNGGHSSIKPPPK

SEQ ID NO: 398 - protein, 39 aa, Artificial Sequence
  GLP Peptide
HGEGTFTSDKSKQLEKELVRLFYEWLLAGGHSKIKPPPK

SEQ ID NO: 399 - protein, 39 aa, Artificial Sequence
  GLP Peptide
HGEGTFTSDKSKQLEKRAVRLFFEWLKAGGHSSIKPPPK

SEQ ID NO: 400 - protein, 39 aa, Artificial Sequence
  GLP Peptide
HGEGTFTSDKSKQLEKRAVRLFYEWLKAGGHSKIKPPPK

SEQ ID NO: 401 - protein, 39 aa, Artificial Sequence
  GLP Peptide
HGEGTFTSDKSKQLEKRLARLFFEWLIAGGHSKIKPPPK

SEQ ID NO: 402 - protein, 39 aa, Artificial Sequence
  GLP Peptide
HGEGTFTSDKSKQLEKRLARLFFEWLKAGGHSKGKPPPK

SEQ ID NO: 403 - protein, 39 aa, Artificial Sequence
  GLP Peptide
HGEGTFTSDKSKQLEKRLARLFFEWLKAGGHSSIKPPPK

SEQ ID NO: 404 - protein, 39 aa, Artificial Sequence
  GLP Peptide
HGEGTFTSDKSKQLEKRLARLFYEWLIAGGHSKIRPPPK

SEQ ID NO: 405 - protein, 39 aa, Artificial Sequence
  GLP Peptide
HGEGTFTSDKSKQLEKRLARLFYEWLIAGGPSKIKPPPK

SEQ ID NO: 406 - protein, 39 aa, Artificial Sequence
  GLP Peptide
HGEGTFTSDKSKQLEKRLARLFYEWLKAGGHKKGKPPPK

SEQ ID NO: 407 - protein, 39 aa, Artificial Sequence
  GLP Peptide
HGEGTFTSDKSKQLEKRLARLFYEWLKAGGHSKGKPPPK

SEQ ID NO: 408 - protein, 39 aa, Artificial Sequence
  GLP Peptide
HGEGTFTSDKSKQLEKRLARLFYEWLKAGGHSKIKPPPK

SEQ ID NO: 409 - protein, 39 aa, Artificial Sequence
  GLP Peptide
HGEGTFTSDKSKQLEKRLARLFYEWLKAGGHSSIKPPPK

SEQ ID NO: 410 - protein, 39 aa, Artificial Sequence
  GLP Peptide
HGEGTFTSDKSKQLEKRLARLFYEWLKAGGHSSIRPPPK

SEQ ID NO: 411 - protein, 39 aa, Artificial Sequence
  GLP Peptide
HGEGTFTSDKSKQLEKRLARLFYEWLKAGGPSKGKPPPK

SEQ ID NO: 412 - protein, 39 aa, Artificial Sequence
  GLP Peptide
HGEGTFTSDKSKQLEKRLARLFYEWLKAGGPSSIKPPPK

SEQ ID NO: 413 - protein, 39 aa, Artificial Sequence
  GLP Peptide
HGEGTFTSDKSKQLEKRLARLFYEWLLAGGHSKIKPPPK

SEQ ID NO: 414 - protein, 39 aa, Artificial Sequence
  GLP Peptide
HGEGTFTSDKSKQLEKRLFRLFIEWLIAGGHSSGKPPPK

SEQ ID NO: 415 - protein, 39 aa, Artificial Sequence
  GLP Peptide
HGEGTFTSDKSKQLEKRLVILFIEWLIAGGHSSGKPPPK

SEQ ID NO: 416 - protein, 39 aa, Artificial Sequence
  GLP Peptide
HGEGTFTSDKSKQLEKRLVRIFIEWLIAGGHSSGKPPPK

SEQ ID NO: 417 - protein, 39 aa, Artificial Sequence
  GLP Peptide
HGEGTFTSDKSKQLEKRLVRLFFEWLIAGGHSSGKPPPK

SEQ ID NO: 418 - protein, 39 aa, Artificial Sequence
  GLP Peptide
HGEGTFTSDKSKQLEKRLVRLFFEWLIKGGHSKIKPPPK

SEQ ID NO: 419 - protein, 39 aa, Artificial Sequence
  GLP Peptide
HGEGTFTSDKSKQLEKRLVRLFFEWLINGGHSKIKPPPK

SEQ ID NO: 420 - protein, 39 aa, Artificial Sequence
  GLP Peptide
HGEGTFTSDKSKQLEKRLVRLFFEWLKKGGHSKGKPPPK

SEQ ID NO: 421 - protein, 39 aa, Artificial Sequence
  GLP Peptide
HGEGTFTSDKSKQLEKRLVRLFFEWLKKGGHSSIKPPPK

SEQ ID NO: 422 - protein, 39 aa, Artificial Sequence
  GLP Peptide
HGEGTFTSDKSKQLEKRLVRLFFEWLKNGGHSKGKPPPK

SEQ ID NO: 423 - protein, 39 aa, Artificial Sequence
  GLP Peptide
HGEGTFTSDKSKQLEKRLVRLFFEWLKNGGHSSIKPPPK

SEQ ID NO: 424 - protein, 39 aa, Artificial Sequence
  GLP Peptide
HGEGTFTSDKSKQLEKRLVRLFHEWLIAGGHSSGKPPPK

SEQ ID NO: 425 - protein, 39 aa, Artificial Sequence
  GLP Peptide
HGEGTFTSDKSKQLEKRLVRLFIELLIAGGHSSGKPPPK

SEQ ID NO: 426 - protein, 38 aa, Artificial Sequence
  GLP Peptide
HGEGTFTSDKSKQLEKRLVRLFIEWLIAVGHSGKPPPK

SEQ ID NO: 427 - protein, 39 aa, Artificial Sequence
  GLP Peptide
HGEGTFTSDKSKQLEKRLVRLFILWLIAGGHSSGKPPPK

SEQ ID NO: 428 - protein, 39 aa, Artificial Sequence
  GLP Peptide
HGEGTFTSDKSKQLEKRLVRLFIYWLIAGGHSSGKPPPK

SEQ ID NO: 429 - protein, 39 aa, Artificial Sequence
  GLP Peptide
HGEGTFTSDKSKQLEKRLVRLFYEWLIAGGHSSGKPPPK

SEQ ID NO: 430 - protein, 39 aa, Artificial Sequence
  GLP Peptide
HGEGTFTSDKSKQLEKRLVRLFYEWLIKGGHSKIKPPPK

SEQ ID NO: 431 - protein, 39 aa, Artificial Sequence
  GLP Peptide
HGEGTFTSDKSKQLEKRLVRLFYEWLIKGGHSKIRPPPK

SEQ ID NO: 432 - protein, 39 aa, Artificial Sequence
  GLP Peptide
HGEGTFTSDKSKQLEKRLVRLFYEWLINGGHKKIKPPPK

SEQ ID NO: 433 - protein, 39 aa, Artificial Sequence
  GLP Peptide
HGEGTFTSDKSKQLEKRLVRLFYEWLINGGHSKIKPPPK

SEQ ID NO: 434 - protein, 39 aa, Artificial Sequence
  GLP Peptide
HGEGTFTSDKSKQLEKRLVRLFYEWLINGGHSKIRPPPK

SEQ ID NO: 435 - protein, 39 aa, Artificial Sequence
  GLP Peptide
HGEGTFTSDKSKQLEKRLVRLFYEWLKAGGHSKIKYPPK

SEQ ID NO: 436 - protein, 39 aa, Artificial Sequence
  GLP Peptide
HGEGTFTSDKSKQLEKRLVRLLIEWLIAGGHSSGKPPPK

SEQ ID NO: 437 - protein, 39 aa, Artificial Sequence
  GLP Peptide
HGEGTFTSDKSKQLEKRRVRLFFEWLKAGGHSSIKPPPK

SEQ ID NO: 438 - protein, 39 aa, Artificial Sequence
  GLP Peptide
HGEGTFTSDKSKQLEKRRVRLFYEWLKAGGHSKIKPPPK

SEQ ID NO: 439 - protein, 39 aa, Artificial Sequence
  GLP Peptide
HGEGTFTSDKSQLLEERLAHLFIEWLIAGGHSKQKPPPK

SEQ ID NO: 440 - protein, 39 aa, Artificial Sequence
  GLP Peptide
HGEGTFTSDKSQLLEERLAHLFIEWLIAGGHSSGRPPPK

SEQ ID NO: 441 - protein, 39 aa, Artificial Sequence
  GLP Peptide
HGEGTFTSDKSQLLEERLAHLFIEWLIKGGHSSIKPPPK

SEQ ID NO: 442 - protein, 39 aa, Artificial Sequence
  GLP Peptide
HGEGTFTSDKSQLLEERLVHLFIEWLIAGGHSSGKLPPK

SEQ ID NO: 443 - protein, 39 aa, Artificial Sequence
  GLP Peptide
HGEGTFTSDKSQLLEKEAAHLFIEWLIAGGHSKGKPPPK

SEQ ID NO: 444 - protein, 39 aa, Artificial Sequence
  GLP Peptide
HGEGTFTSDKSQLLEKEAAHLFIEWLIAGGHSSIKPPPK

SEQ ID NO: 445 - protein, 39 aa, Artificial Sequence
  GLP Peptide
HGEGTFTSDKSQLLEKELAHLFIEWLIAGGHSKGRPPPK

SEQ ID NO: 446 - protein, 39 aa, Artificial Sequence
  GLP Peptide
HGEGTFTSDKSQLLEKELAHLFIEWLIAGGHSKQKPPPK

SEQ ID NO: 447 - protein, 39 aa, Artificial Sequence
  GLP Peptide
HGEGTFTSDKSQLLEKELAHLFIEWLIAGGHSSIKPPPK

SEQ ID NO: 448 - protein, 39 aa, Artificial Sequence
  GLP Peptide
HGEGTFTSDKSQLLEKELAHLFIEWLIAGGHSSIRPPPK

SEQ ID NO: 449 - protein, 39 aa, Artificial Sequence
  GLP Peptide
HGEGTFTSDKSQLLEKELAHLFIEWLLAGGHSKGKPPPK

SEQ ID NO: 450 - protein, 39 aa, Artificial Sequence
  GLP Peptide
HGEGTFTSDKSQLLEKRAAHLFIEWLIAGGHKKGKPPPK

SEQ ID NO: 451 - protein, 39 aa, Artificial Sequence
  GLP Peptide
HGEGTFTSDKSQLLEKRAAHLFIEWLIAGGHSKGRPPPK

SEQ ID NO: 452 - protein, 39 aa, Artificial Sequence
  GLP Peptide
HGEGTFTSDKSQLLEKRAAHLFIEWLIAGGHSSGKLSPK

SEQ ID NO: 453 - protein, 39 aa, Artificial Sequence
  GLP Peptide
HGEGTFTSDKSQLLEKRAAHLFIEWLIAGGHSSGRYPPK

SEQ ID NO: 454 - protein, 39 aa, Artificial Sequence
  GLP Peptide
HGEGTFTSDKSQLLEKRAAHLFIEWLIAGGPSKGKPPPK

SEQ ID NO: 455 - protein, 39 aa, Artificial Sequence
  GLP Peptide
HGEGTFTSDKSQLLEKRAAHLFIEWLIAGGPSSGKLPPK

SEQ ID NO: 456 - protein, 39 aa, Artificial Sequence
  GLP Peptide
HGEGTFTSDKSQLLEKRAAHLFIEWLIKGGHSKGKPPPK

SEQ ID NO: 457 - protein, 39 aa, Artificial Sequence
  GLP Peptide
HGEGTFTSDKSQLLEKRAAHLFIEWLIKGGHSSIKPPPK

SEQ ID NO: 458 - protein, 39 aa, Artificial Sequence
  GLP Peptide
HGEGTFTSDKSQLLEKRAAHLFIEWLLAGGHSSIKPPPK

SEQ ID NO: 459 - protein, 39 aa, Artificial Sequence
  GLP Peptide
HGEGTFTSDKSQLLEKRLAHLFIEWLIAGGHKKGKYPPK

SEQ ID NO: 460 - protein, 39 aa, Artificial Sequence
  GLP Peptide
HGEGTFTSDKSQLLEKRLAHLFIEWLIAGGHKSGKYSPK

SEQ ID NO: 461 - protein, 39 aa, Artificial Sequence
  GLP Peptide
HGEGTFTSDKSQLLEKRLAHLFIEWLIAGGHSKGRLPPK

SEQ ID NO: 462 - protein, 39 aa, Artificial Sequence
  GLP Peptide
HGEGTFTSDKSQLLEKRLAHLFIEWLIAGGHSKIKYPPK

SEQ ID NO: 463 - protein, 39 aa, Artificial Sequence
  GLP Peptide
HGEGTFTSDKSQLLEKRLAHLFIEWLIAGGHSSGRLSPK

SEQ ID NO: 464 - protein, 39 aa, Artificial Sequence
  GLP Peptide
HGEGTFTSDKSQLLEKRLAHLFIEWLIAGGHSSGRYSPK

SEQ ID NO: 465 - protein, 39 aa, Artificial Sequence
  GLP Peptide
HGEGTFTSDKSQLLEKRLAHLFIEWLIAGGHSSIKPPPK

SEQ ID NO: 466 - protein, 39 aa, Artificial Sequence
  GLP Peptide
HGEGTFTSDKSQLLEKRLAHLFIEWLIAGGPSKGKPPPK

SEQ ID NO: 467 - protein, 39 aa, Artificial Sequence
  GLP Peptide
HGEGTFTSDKSQLLEKRLAHLFIEWLIAGGPSKGRPPPK

SEQ ID NO: 468 - protein, 39 aa, Artificial Sequence
  GLP Peptide
HGEGTFTSDKSQLLEKRLAHLFIEWLIAGGPSSGKYSPK

SEQ ID NO: 469 - protein, 39 aa, Artificial Sequence
  GLP Peptide
HGEGTFTSDKSQLLEKRLAHLFIEWLIAGGPSSGRYPPK

SEQ ID NO: 470 - protein, 39 aa, Artificial Sequence
  GLP Peptide
HGEGTFTSDKSQLLEKRLAHLFIEWLIKGGHSKGKPPPK

SEQ ID NO: 471 - protein, 39 aa, Artificial Sequence
  GLP Peptide
HGEGTFTSDKSQLLEKRLAHLFIEWLIKGGHSKGKYPPK

SEQ ID NO: 472 - protein, 39 aa, Artificial Sequence
  GLP Peptide
HGEGTFTSDKSQLLEKRLAHLFIEWLIKGGHSKGRPPPK

SEQ ID NO: 473 - protein, 39 aa, Artificial Sequence
  GLP Peptide
HGEGTFTSDKSQLLEKRLAHLFIEWLIKGGHSKQKPPPK

SEQ ID NO: 474 - protein, 39 aa, Artificial Sequence
  GLP Peptide
HGEGTFTSDKSQLLEKRLAHLFIEWLIKGGHSSGKPPPK

SEQ ID NO: 475 - protein, 39 aa, Artificial Sequence
  GLP Peptide
HGEGTFTSDKSQLLEKRLAHLFIEWLIKGGHSSGRPPPK

SEQ ID NO: 476 - protein, 39 aa, Artificial Sequence
  GLP Peptide
HGEGTFTSDKSQLLEKRLAHLFIEWLIKGGHSSIRPPPK

SEQ ID NO: 477 - protein, 39 aa, Artificial Sequence
  GLP Peptide
HGEGTFTSDKSQLLEKRLAHLFIEWLIKGGPSSIKPPPK

SEQ ID NO: 478 - protein, 39 aa, Artificial Sequence
  GLP Peptide
HGEGTFTSDKSQLLEKRLAHLFIEWLLAGGHKKGKPPPK

SEQ ID NO: 479 - protein, 39 aa, Artificial Sequence
  GLP Peptide
HGEGTFTSDKSQLLEKRLAHLFIEWLLAGGHSSGKLSPK

SEQ ID NO: 480 - protein, 39 aa, Artificial Sequence
  GLP Peptide
HGEGTFTSDKSQLLEKRLAHLFIEWLLAGGHSSIKPPPK

SEQ ID NO: 481 - protein, 39 aa, Artificial Sequence
  GLP Peptide
HGEGTFTSDKSQLLEKRLAHLFIEWLLAGGHSSIRPPPK

SEQ ID NO: 482 - protein, 39 aa, Artificial Sequence
  GLP Peptide
HGEGTFTSDKSQLLEKRLAHLFIEWLLAGGPSSGKPPPK

SEQ ID NO: 483 - protein, 39 aa, Artificial Sequence
  GLP Peptide
HGEGTFTSDKSQLLEKRLAHLFIEWLLAGGPSSGRPPPK

SEQ ID NO: 484 - protein, 39 aa, Artificial Sequence
  GLP Peptide
HGEGTFTSDKSQLLEKRLAHLFIEWLLKGGHSKGKPPPK

SEQ ID NO: 485 - protein, 39 aa, Artificial Sequence
  GLP Peptide
HGEGTFTSDKSQLLEKRLAHLFIEWLLKGGHSSGRPPPK

SEQ ID NO: 486 - protein, 39 aa, Artificial Sequence
  GLP Peptide
HGEGTFTSDKSQQLEEELVRLFYEWLIAGGHSKGKPPPK

SEQ ID NO: 487 - protein, 39 aa, Artificial Sequence
  GLP Peptide
HGEGTFTSDKSQQLEEELVRLFYEWLIAGGHSSIKPPPK

SEQ ID NO: 488 - protein, 39 aa, Artificial Sequence
  GLP Peptide
HGEGTFTSDKSQQLEKELVRLFFEWLIAGGHSKGKPPPK

SEQ ID NO: 489 - protein, 39 aa, Artificial Sequence
  GLP Peptide
HGEGTFTSDKSQQLEKELVRLFFEWLIAGGHSSIKPPPK

SEQ ID NO: 490 - protein, 39 aa, Artificial Sequence
  GLP Peptide
HGEGTFTSDKSQQLEKELVRLFYEWLIAGGHSKIKPPPK

SEQ ID NO: 491 - protein, 39 aa, Artificial Sequence
  GLP Peptide
HGEGTFTSDKSQQLEKELVRLFYEWLKAGGHSKGKPPPK

SEQ ID NO: 492 - protein, 39 aa, Artificial Sequence
  GLP Peptide
HGEGTFTSDKSQQLEKELVRLFYEWLKAGGHSSIKPPPK

SEQ ID NO: 493 - protein, 39 aa, Artificial Sequence
  GLP Peptide
HGEGTFTSDKSQQLEKELVRLFYEWLLAGGHSSIKPPPK

SEQ ID NO: 494 - protein, 39 aa, Artificial Sequence
  GLP Peptide
HGEGTFTSDKSQQLEKRLARLFYEWLIAGGHSKIKPPPK

SEQ ID NO: 495 - protein, 39 aa, Artificial Sequence
  GLP Peptide
HGEGTFTSDKSQQLEKRLARLFYEWLKAGGHSKGKPPPK

SEQ ID NO: 496 - protein, 39 aa, Artificial Sequence
  GLP Peptide
HGEGTFTSDKSQQLEKRLARLFYEWLKAGGHSSIKPPPK

SEQ ID NO: 497 - protein, 39 aa, Artificial Sequence
  GLP Peptide
HGEGTFTSDKSQQLEKRLVRLFYEWLIKGGHSKIKPPPK

SEQ ID NO: 498 - protein, 39 aa, Artificial Sequence
  GLP Peptide
HGEGTFTSDKSQQLEKRLVRLFYEWLINGGHSKIKPPPK

SEQ ID NO: 499 - protein, 39 aa, Artificial Sequence
  GLP Peptide
HGEGTFTSDKSQQLEKRLVRLFYEWLINGGHSSIRPPPK

SEQ ID NO: 500 - protein, 39 aa, Artificial Sequence
  GLP Peptide
HGEGTFTSDKSQQLEKRLVRLFYEWLKKGGHSKGKPPPK

SEQ ID NO: 501 - protein, 39 aa, Artificial Sequence
  GLP Peptide
HGEGTFTSDKSQQLEKRLVRLFYEWLKKGGHSSIKPPPK

SEQ ID NO: 502 - protein, 39 aa, Artificial Sequence
  GLP Peptide
HGEGTFTSDKSQQLEKRLVRLFYEWLKNGGHSKGKPPPK

SEQ ID NO: 503 - protein, 39 aa, Artificial Sequence
  GLP Peptide
HGEGTFTSDKSQQLEKRLVRLFYEWLKNGGHSSIKPPPK

SEQ ID NO: 504 - protein, 39 aa, Artificial Sequence
  GLP Peptide
HGEGTFTSDKSQQLEKRRVRLFYEWLKAGGHSKGKPPPK

SEQ ID NO: 505 - protein, 39 aa, Artificial Sequence
  GLP Peptide
HGEGTFTSDLSILLDEEAVQLFIEWLLATGPSSGAPPPS

SEQ ID NO: 506 - protein, 39 aa, Artificial Sequence
  GLP Peptide
HGEGTFTSDLSILLDEEAVQLFIEWLLATGPVSGAPPPS

SEQ ID NO: 507 - protein, 39 aa, Artificial Sequence
  GLP Peptide
HGEGTFTSDLSILLDEEAVREFIEWLLATGPSSGAPPPS

SEQ ID NO: 508 - protein, 39 aa, Artificial Sequence
  GLP Peptide
HGEGTFTSDLSILLDEEAVRLFIEWLLATGPSSGAPPPS

SEQ ID NO: 509 - protein, 39 aa, Artificial Sequence
  GLP Peptide
HGEGTFTSDLSILLDEEAVRLFIEWLLATGPVSGAPPPS

SEQ ID NO: 510 - protein, 39 aa, Artificial Sequence
  GLP Peptide
HGEGTFTSDLSILLEEEAVREFIEWLLATGPSSGAPPPS

SEQ ID NO: 511 - protein, 39 aa, Artificial Sequence
  GLP Peptide
HGEGTFTSDLSILLEEEAVRLFIEWLLATGPSSGAPPPS

SEQ ID NO: 512 - protein, 39 aa, Artificial Sequence
  GLP Peptide
HGEGTFTSDLSILLEEEAVRLFIEWLLATGPVSGAPPPS

SEQ ID NO: 513 - protein, 39 aa, Artificial Sequence
  GLP Peptide
HGEGTFTSDLSIQLAKRLAQLFIEWLIKGGHSSGKPPPK

SEQ ID NO: 514 - protein, 39 aa, Artificial Sequence
  GLP Peptide
HGEGTFTSDLSIQLDEEAVQEFIEWLLATGPSSGAPPPS

SEQ ID NO: 515 - protein, 39 aa, Artificial Sequence
  GLP Peptide
HGEGTFTSDLSIQLDEEAVQLFIEWLLATGPSSGAPPPS

SEQ ID NO: 516 - protein, 39 aa, Artificial Sequence
  GLP Peptide
HGEGTFTSDLSIQLDEEAVQLFIEWLLATGPVSGAPPPS

SEQ ID NO: 517 - protein, 39 aa, Artificial Sequence
  GLP Peptide
HGEGTFTSDLSIQLDEEAVREFIEWLLATGPVSGAPPPS

SEQ ID NO: 518 - protein, 39 aa, Artificial Sequence
  GLP Peptide
HGEGTFTSDLSIQLDEEAVRLFIEWLEATGPVSGAPPPS

SEQ ID NO: 519 - protein, 39 aa, Artificial Sequence
  GLP Peptide
HGEGTFTSDLSIQLDEEAVRLFIEWLLATGPVSGAPPPS

SEQ ID NO: 520 - protein, 39 aa, Artificial Sequence
  GLP Peptide
HGEGTFTSDLSIQLEEEAVQEFIEWLLATGPVSGAPPPS

SEQ ID NO: 521 - protein, 39 aa, Artificial Sequence
  GLP Peptide
HGEGTFTSDLSIQLEEEAVQLFIEWLLATGPSSGAPPPS

SEQ ID NO: 522 - protein, 39 aa, Artificial Sequence
  GLP Peptide
HGEGTFTSDLSIQLEEEAVQLFIEWLLATGPVSGAPPPS

SEQ ID NO: 523 - protein, 39 aa, Artificial Sequence
  GLP Peptide
HGEGTFTSDLSKQLAERLVRLFIEWLIKGGHSSGKPPPK

SEQ ID NO: 524 - protein, 39 aa, Artificial Sequence
  GLP Peptide
HGEGTFTSDLSKQLAKRLVREFIEWLIEGGHSSGKPPPK

SEQ ID NO: 525 - protein, 39 aa, Artificial Sequence
  GLG Peptide
HGEGTFTSDLSKQLAKRLVREFIEWLIEGGPSSGAPPPS

SEQ ID NO: 526 - protein, 39 aa, Artificial Sequence
  GLP Peptide
HGEGTFTSDLSKQLAKRLVREFIEWLIKGGHSSGKPPPK

SEQ ID NO: 527 - protein, 39 aa, Artificial Sequence
  GLP Peptide
HGEGTFTSDLSKQLAKRLVRLFIEWLIKGGHSSGKPPPK

SEQ ID NO: 528 - protein, 39 aa, Artificial Sequence
  GLP Peptide
HGEGTFTSDLSKQLEEEAVQLFIEWLLATGPSSGAPPPS

SEQ ID NO: 529 - protein, 39 aa, Artificial Sequence
  GLP Peptide
HGEGTFTSDLSKQLEEEAVQLFIEWLLATGPSSGEPPPK

SEQ ID NO: 530 - protein, 40 aa, Artificial Sequence
  GLP Peptide
HGEGTFTSDLSKQLEEEAVQLFIEWLLATGPSSGEPPPKS

SEQ ID NO: 531 - protein, 39 aa, Artificial Sequence
  GLP Peptide
HGEGTFTSDLSKQLEEEAVQLFIEWLLATGPSSGKPPPE

SEQ ID NO: 532 - protein, 40 aa, Artificial Sequence
  GLP Peptide
HGEGTFTSDLSKQLEEEAVQLFIEWLLATGPSSGKPPPES

SEQ ID NO: 533 - protein, 39 aa, Artificial Sequence
  GLP Peptide
HGEGTFTSDLSKQLEEEAVQLFIEWLLATGPSSGKPPPK

SEQ ID NO: 534 - protein, 40 aa, Artificial Sequence
  GLP Peptide
HGEGTFTSDLSKQLEEEAVQLFIEWLLATGPSSGKPPPKS

SEQ ID NO: 535 - protein, 39 aa, Artificial Sequence
  GLP Peptide
HGEGTFTSDLSKQLEEEAVQLFIEWLLNGGPSSGAPPPE

SEQ ID NO: 536 - protein, 39 aa, Artificial Sequence
  GLP Peptide
HGEGTFTSDLSKQLEEEAVRLFIEWLLATGPSSGEPPPE

SEQ ID NO: 537 - protein, 39 aa, Artificial Sequence
  GLP Peptide
HGEGTFTSDLSKQLEERLARLFYEWLIAGGHSSQKPPPK

SEQ ID NO: 538 - protein, 39 aa, Artificial Sequence
  GLP Peptide
HGEGTFTSDLSKQLEKELVRLFYEWLIAGGHKSQKPPPK

SEQ ID NO: 539 - protein, 39 aa, Artificial Sequence
  GLP Peptide
HGEGTFTSDLSKQLEKELVRLFYEWLIAGGHSSQRPPPK

SEQ ID NO: 540 - protein, 39 aa, Artificial Sequence
  GLP Peptide
HGEGTFTSDLSKQLEKELVRLFYEWLIKGGHKSGKPPPK

SEQ ID NO: 541 - protein, 39 aa, Artificial Sequence
  GLP Peptide
HGEGTFTSDLSKQLEKELVRLFYEWLIKGGHSKGKPPPK

SEQ ID NO: 542 - protein, 39 aa, Artificial Sequence
  GLP Peptide
HGEGTFTSDLSKQLEKELVRLFYEWLIKGGHSSGRPPPK

SEQ ID NO: 543 - protein, 39 aa, Artificial Sequence
  GLP Peptide
HGEGTFTSDLSKQLEKELVRLFYEWLIKGGHSSIKPPPK

SEQ ID NO: 544 - protein, 39 aa, Artificial Sequence
  GLP Peptide
HGEGTFTSDLSKQLEKELVRLFYEWLIKGGHSSQKPPPK

SEQ ID NO: 545 - protein, 39 aa, Artificial Sequence
  GLP Peptide
HGEGTFTSDLSKQLEKELVRLFYEWLINGGHKSGKPPPK

SEQ ID NO: 546 - protein, 39 aa, Artificial Sequence
  GLP Peptide
HGEGTFTSDLSKQLEKELVRLFYEWLINGGHSKGKPPPK

SEQ ID NO: 547 - protein, 39 aa, Artificial Sequence
  GLP Peptide
HGEGTFTSDLSKQLEKELVRLFYEWLINGGHSSGKPPPK

SEQ ID NO: 548 - protein, 39 aa, Artificial Sequence
  GLP Peptide
HGEGTFTSDLSKQLEKELVRLFYEWLINGGHSSQKPPPK

SEQ ID NO: 549 - protein, 39 aa, Artificial Sequence
  GLP Peptide
HGEGTFTSDLSKQLEKELVRLFYEWLINGGPSSGKPPPK

SEQ ID NO: 550 - protein, 39 aa, Artificial Sequence
  GLP Peptide
HGEGTFTSDLSKQLEKELVRLFYEWLKAGGHSSGKPPPK

SEQ ID NO: 551 - protein, 39 aa, Artificial Sequence
  GLP Peptide
HGEGTFTSDLSKQLEKRLVRLFYEWLKNGGHSSGKPPPK

SEQ ID NO: 552 - protein, 39 aa, Artificial Sequence
  GLP Peptide
HGEGTFTSDLSKQLEKRLVRLFYEWLLNGGHSSQKPPPK

SEQ ID NO: 553 - protein, 39 aa, Artificial Sequence
  GLP Peptide
HGEGTFTSDLSKQMEEEAVRLFIEWLKNGGPSSGAPPPS

SEQ ID NO: 554 - protein, 39 aa, Artificial Sequence
  GLP Peptide
HSEGTFTSDKSKQLAKRLVRLFIEWLIKGGHSSGKPPPK

SEQ ID NO: 555 - protein, 39 aa, Artificial Sequence
  GLP Peptide
HSQGTFTSDLSKQLESRRARRFIEWLLATGPESGAPPPS

SEQ ID NO: 556 - protein, 39 aa, Artificial Sequence
  GLP Peptide
YGEGTFTSDKSKLLEKRLAHLFIEWLIAGGHSSGKPPPK

SEQ ID NO: 557 - protein, 39 aa, Artificial Sequence
  GLP Peptide
YGEGTFTSDKSKLLEKRLVRLFIEWLIAGGHSSGKPPPK

SEQ ID NO: 558 - protein, 39 aa, Artificial Sequence
  GLP Peptide
YGEGTFTSDKSKQLEKRLVRLFIEWLIAGGHSSGKPPPK

SEQ ID NO: 559 - protein, 39 aa, Artificial Sequence
  GLP Peptide
YGEGTFTSDKSKQLEKRLVRLFIEWLIKGGHSSGKPPPK

SEQ ID NO: 560 - protein, 39 aa, Artificial Sequence
  GLP Peptide
YGEGTFTSDKSQLLEERLAHLFIEWLIAGGHSKIRPPPK

SEQ ID NO: 561 - protein, 39 aa, Artificial Sequence
  GLP Peptide
YGEGTFTSDKSQLLEERLVHLFIEWLIAGGHSKIKPPPK

SEQ ID NO: 562 - protein, 39 aa, Artificial Sequence
  GLP Peptide
YGEGTFTSDKSQLLEKELAHLFIEWLIAGGHKSGRPSPK

SEQ ID NO: 563 - protein, 39 aa, Artificial Sequence
  GLP Peptide
YGEGTFTSDKSQLLEKRLAHLFIEWLIKGGHSSIKPPPK

SEQ ID NO: 564 - protein, 39 aa, Artificial Sequence
  GLP Peptide
YGEGTFTSDKSQLLEKRLAHLFIEWLIKGGHSSIRPPPK

SEQ ID NO: 565 - protein, 44 aa, Artificial Sequence
  GLP Peptide
YSEGTFTSDLSILCEKRAVHEFIEWLIAGGPSSGKPPPKPGCGS

SEQ ID NO: 566 - protein, 477 aa, Artificial Sequence
  Fusion Protein
HGEGTFTSDLSIQLDEEAVRLFIEWLLATGPVSGAPPSKKKKKKGGGGGGGSGGGGSGGGGSADKTHTCPPCPAPEAAGGPSVFLFPPKPKDTLMISRTPEVTCVVVDVSHEDPEVKFNWYVDGVEVHNAKTKPREEQYNSTYRVVSVLTVLHQDWLNGKEYKCKVSNKALPAPIEKTISKAKGQPREPQVYTLPPSRDELTKNQVSLTCLVKGFYPSDIAVEWESNGQPENNYKTTPPVLDSDGSFFLYSKLTVDKSRWQQGNVFSCSVMHEALHNHYTQKSLSLSPGGGGSGSAHPIPDSSPLLQFGGQVRQRYLYTDDACQTEAHLEIREDGTVGGAADQSPESLLQLKALKPGVIQILGVKTSRFLCQRPDGALYGSLHFDPEACSFRELLLEDGYNVYQSEAHGLPLHLPGCKSPHRDPAPRGPARFLPLPGLPPAPPEPPGILAPQPPDVGSSDPLSMVYPSQGRSPSYAS

SEQ ID NO: 567 - protein, 476 aa, Artificial Sequence
  Fusion Protein
HGEGTFTSDLSIQLDEEAVRLFIEWLLATGPVSGAPPSKKKKKKGGGGGGGSGGGGSGGGGSADKTHTCPPCPAPEAAGGPSVFLFPPKPKDTLMISRTPEVTCVVVDVSHEDPEVKFNWYVDGVEVHNAKTKPREEQYNSTYRVVSVLTVLHQDWLNGKEYKCKVSNKALPAPIEKTISKAKGQPREPQVYTLPPSRDELTKNQVSLTCLVKGFYPSDIAVEWESNGQPENNYKTTPPVLDSDGSFFLYSKLTVDKSRWQQGNVFSCSVMHEALHNHYTQKSLSLSPGGGGSGSAHPIPDSSPLLQFGGQVRQRYLYTDDACQTEAHLEIREDGTVGGAADQSPESLLQLKALKPGVIQILGVKTSRFLCQRPDGALYGSLHFDPEACSFRELLLEDGYNVYQSEAHGLPLHLCGNKSPHRDPAPRGPARFLPLPGLPPAPPEPPGILAPQPPDVGSSDPLSMVGSQGRSPSYAS

SEQ ID NO: 568 - protein, 477 aa, Artificial Sequence
  Fusion Protein
HGEGTFTSDLSIQLDEEAVRLFIEWLLATGPVSGAPPSKKKKKKGGGGGGGSGGGGSGGGGSADKTHTCPPCPAPEAAGGPSVFLFPPKPKDTLMISRTPEVTCVVVDVSHEDPEVKFNWYVDGVEVHNAKTKPREEQYNSTYRVVSVLTVLHQDWLNGKEYKCKVSNKALPAPIEKTISKAKGQPREPQVYTLPPSRDELTKNQVSLTCLVKGFYPSDIAVEWESNGQPENNYKTTPPVLDSDGSFFLYSKLTVDKSRWQQGNVFSCSVMHEALHNHYTQKSLSLSPGGGGSGSAHPIPDSSPLLQFGGQVRQRYLYTDDACQTEAHLEIREDGTVGGAADQSPESLLQLKALKPGVIQILGVKTSRFLCQRPDGALYGSLHFDPEACSFRELLLEDGYNVYQSEAHGLPLHLCGNKSPHRDPAPRGPARFLPLPGLPPAPPEPPGILAPQPPDVGSSDPLSMVYPSQGRSPSYAS

SEQ ID NO: 569 - protein, 476 aa, Artificial Sequence
  Fusion Protein
HGEGTFTSDLSIQLDEEAVRLFIEWLLATGPVSGAPPSKKKKKKGGGGGGGSGGGGSGGGGSADKTHTCPPCPAPELLGGPSVFLFPPKPKDTLMISRTPEVTCVVVDVSHEDPEVKFNWYVDGVEVHNAKTKPREEQYNNASRVVSVLTVLHQDWLNGKEYKCKVSNKALPAPIEKTISKAKGQPREPQVYTLPPSRDELTKNQVSLTCLVKGFYPSDIAVEWESNGQPENNYKTTPPVLDSDGSFFLYSKLTVDKSRWQQGNVFSCSVMHEALHNHYTQKSLSLSPGGGGSGSAHPIPDSSPLLQFGGQVRQRYLYTDDACQTEAHLEIREDGTVGGAADQSPESLLQLKALKPGVIQILGVKTSRFLCQRPDGALYGSLHFDPEACSFRELLLEDGYNVYQSEAHGLPLHLPGCKSPHRDPAPRGPARFLPLPGLPPAPPEPPGILAPQPPDVGSSDPLSMVGSQGRSPSYAS

SEQ ID NO: 570 - protein, 477 aa, Artificial Sequence
  Fusion Protein
HGEGTFTSDLSIQLDEEAVRLFIEWLLATGPVSGAPPSKKKKKKGGGGGGGSGGGGSGGGGSADKTHTCPPCPAPELLGGPSVFLFPPKPKDTLMISRTPEVTCVVVDVSHEDPEVKFNWYVDGVEVHNAKTKPREEQYNNASRVVSVLTVLHQDWLNGKEYKCKVSNKALPAPIEKTISKAKGQPREPQVYTLPPSRDELTKNQVSLTCLVKGFYPSDIAVEWESNGQPENNYKTTPPVLDSDGSFFLYSKLTVDKSRWQQGNVFSCSVMHEALHNHYTQKSLSLSPGGGGSGSAHPIPDSSPLLQFGGQVRQRYLYTDDACQTEAHLEIREDGTVGGAADQSPESLLQLKALKPGVIQILGVKTSRFLCQRPDGALYGSLHFDPEACSFRELLLEDGYNVYQSEAHGLPLHLPGCKSPHRDPAPRGPARFLPLPGLPPAPPEPPGILAPQPPDVGSSDPLSMVYPSQGRSPSYAS

SEQ ID NO: 571 - protein, 476 aa, Artificial Sequence
  Fusion Protein
HGEGTFTSDLSIQLDEEAVRLFIEWLLATGPVSGAPPSKKKKKKGGGGGGGSGGGGSGGGGSADKTHTCPPCPAPELLGGPSVFLFPPKPKDTLMISRTPEVTCVVVDVSHEDPEVKFNWYVDGVEVHNAKTKPREEQYNNASRVVSVLTVLHQDWLNGKEYKCKVSNKALPAPIEKTISKAKGQPREPQVYTLPPSRDELTKNQVSLTCLVKGFYPSDIAVEWESNGQPENNYKTTPPVLDSDGSFFLYSKLTVDKSRWQQGNVFSCSVMHEALHNHYTQKSLSLSPGGGGSGSAHPIPDSSPLLQFGGQVRQRYLYTDDACQTEAHLEIREDGTVGGAADQSPESLLQLKALKPGVIQILGVKTSRFLCQRPDGALYGSLHFDPEACSFRELLLEDGYNVYQSEAHGLPLHLCGNKSPHRDPAPRGPARFLPLPGLPPAPPEPPGILAPQPPDVGSSDPLSMVGSQGRSPSYAS

SEQ ID NO: 572 - protein, 477 aa, Artificial Sequence
  Fusion Protein
HGEGTFTSDLSIQLDEEAVRLFIEWLLATGPVSGAPPSKKKKKKGGGGGGGSGGGGSGGGGSADKTHTCPPCPAPELLGGPSVFLFPPKPKDTLMISRTPEVTCVVVDVSHEDPEVKFNWYVDGVEVHNAKTKPREEQYNNASRVVSVLTVLHQDWLNGKEYKCKVSNKALPAPIEKTISKAKGQPREPQVYTLPPSRDELTKNQVSLTCLVKGFYPSDIAVEWESNGQPENNYKTTPPVLDSDGSFFLYSKLTVDKSRWQQGNVFSCSVMHEALHNHYTQKSLSLSPGGGGSGSAHPIPDSSPLLQFGGQVRQRYLYTDDACQTEAHLEIREDGTVGGAADQSPESLLQLKALKPGVIQILGVKTSRFLCQRPDGALYGSLHFDPEACSFRELLLEDGYNVYQSEAHGLPLHLCGNKSPHRDPAPRGPARFLPLPGLPPAPPEPPGILAPQPPDVGSSDPLSMVYPSQGRSPSYAS

SEQ ID NO: 573 - protein, 478 aa, Artificial Sequence
  Fusion Protein
HGEGTFTSDLSIQLDEEAVRLFIEWLLATGPVSGAPPSKKKKKKGGGGGGGSGGGGSGGGGSAESKYGPPCPPCPAPEFEGGPSVFLFPPKPKDTLMISRTPEVTCVVVDVSQEDPEVQFNWYVDGVEVHNAKTKPREEQFNSTYRVVSVLTVLHQDWLNGKEYKCKVSNKGLPSSIEKTISKAKGQPREPQVYTLPPSQEEMTKNQVSLTCLVKGFYPSDIAVEWESNGQPENNYKTTPPVLDSDGSFFLYSRLTVDKSRWQEGNVFSCSVMHEALHNHYTQKSLSLSLGGGGSGSAHPIPDSSPLLQFGGQVRQRYLYTDDACQTEAHLEIREDGTVGGAADQSPESLLQLKALKPGVIQILGVKTSRFLCQRPDGALYGSLHFDPEACSFRELLLEDGYNVYQSEAHGLPLHLPGCKSPHRDPAPRGPARFLPLPGLPPAPPEPPGILAPQPPDVGSSDPLSMVGSQGRSPSYAS

SEQ ID NO: 574 - protein, 479 aa, Artificial Sequence
  Fusion Protein
HGEGTFTSDLSIQLDEEAVRLFIEWLLATGPVSGAPPSKKKKKKGGGGGGGSGGGGSGGGGSAESKYGPPCPPCPAPEFEGGPSVFLFPPKPKDTLMISRTPEVTCVVVDVSQEDPEVQFNWYVDGVEVHNAKTKPREEQFNSTYRVVSVLTVLHQDWLNGKEYKCKVSNKGLPSSIEKTISKAKGQPREPQVYTLPPSQEEMTKNQVSLTCLVKGFYPSDIAVEWESNGQPENNYKTTPPVLDSDGSFFLYSRLTVDKSRWQEGNVFSCSVMHEALHNHYTQKSLSLSLGGGGSGSAHPIPDSSPLLQFGGQVRQRYLYTDDACQTEAHLEIREDGTVGGAADQSPESLLQLKALKPGVIQILGVKTSRFLCQRPDGALYGSLHFDPEACSFRELLLEDGYNVYQSEAHGLPLHLPGCKSPHRDPAPRGPARFLPLPGLPPAPPEPPGILAPQPPDVGSSDPLSMVYPSQGRSPSYAS

SEQ ID NO: 575 - protein, 478 aa, Artificial Sequence
  Fusion Protein
HGEGTFTSDLSIQLDEEAVRLFIEWLLATGPVSGAPPSKKKKKKGGGGGGGSGGGGSGGGGSAESKYGPPCPPCPAPEFEGGPSVFLFPPKPKDTLMISRTPEVTCVVVDVSQEDPEVQFNWYVDGVEVHNAKTKPREEQFNSTYRVVSVLTVLHQDWLNGKEYKCKVSNKGLPSSIEKTISKAKGQPREPQVYTLPPSQEEMTKNQVSLTCLVKGFYPSDIAVEWESNGQPENNYKTTPPVLDSDGSFFLYSRLTVDKSRWQEGNVFSCSVMHEALHNHYTQKSLSLSLGGGGSGSAHPIPDSSPLLQFGGQVRQRYLYTDDACQTEAHLEIREDGTVGGAADQSPESLLQLKALKPGVIQILGVKTSRFLCQRPDGALYGSLHFDPEACSFRELLLEDGYNVYQSEAHGLPLHLCGNKSPHRDPAPRGPARFLPLPGLPPAPPEPPGILAPQPPDVGSSDPLSMVGSQGRSPSYAS

SEQ ID NO: 576 - protein, 479 aa, Artificial Sequence
  Fusion Protein
HGEGTFTSDLSIQLDEEAVRLFIEWLLATGPVSGAPPSKKKKKKGGGGGGGSGGGGSGGGGSAESKYGPPCPPCPAPEFEGGPSVFLFPPKPKDTLMISRTPEVTCVVVDVSQEDPEVQFNWYVDGVEVHNAKTKPREEQFNSTYRVVSVLTVLHQDWLNGKEYKCKVSNKGLPSSIEKTISKAKGQPREPQVYTLPPSQEEMTKNQVSLTCLVKGFYPSDIAVEWESNGQPENNYKTTPPVLDSDGSFFLYSRLTVDKSRWQEGNVFSCSVMHEALHNHYTQKSLSLSLGGGGSGSAHPIPDSSPLLQFGGQVRQRYLYTDDACQTEAHLEIREDGTVGGAADQSPESLLQLKALKPGVIQILGVKTSRFLCQRPDGALYGSLHFDPEACSFRELLLEDGYNVYQSEAHGLPLHLCGNKSPHRDPAPRGPARFLPLPGLPPAPPEPPGILAPQPPDVGSSDPLSMVYPSQGRSPSYAS

SEQ ID NO: 577 - protein, 471 aa, Artificial Sequence
  Fusion Protein
HGEGTFTSDLSKQMEEEAVRLFIEWLKNGGPSSGAPPPSGGGGGGGSGGGGSGGGGSADKTHTCPPCPAPEAAGGPSVFLFPPKPKDTLMISRTPEVTCVVVDVSHEDPEVKFNWYVDGVEVHNAKTKPREEQYNSTYRVVSVLTVLHQDWLNGKEYKCKVSNKALPAPIEKTISKAKGQPREPQVYTLPPSRDELTKNQVSLTCLVKGFYPSDIAVEWESNGQPENNYKTTPPVLDSDGSFFLYSKLTVDKSRWQQGNVFSCSVMHEALHNHYTQKSLSLSPGGGGSGSAHPIPDSSPLLQFGGQVRQRYLYTDDACQTEAHLEIREDGTVGGAADQSPESLLQLKALKPGVIQILGVKTSRFLCQRPDGALYGSLHFDPEACSFRELLLEDGYNVYQSEAHGLPLHLPGCKSPHRDPAPRGPARFLPLPGLPPAPPEPPGILAPQPPDVGSSDPLSMVGSQGRSPSYAS

SEQ ID NO: 578 - protein, 471 aa, Artificial Sequence
  Fusion Protein
HGEGTFTSDLSKQMEEEAVRLFIEWLKNGGPSSGAPPPSGGGGGGGSGGGGSGGGGSADKTHTCPPCPAPEAAGGPSVFLFPPKPKDTLMISRTPEVTCVVVDVSHEDPEVKFNWYVDGVEVHNAKTKPREEQYNSTYRVVSVLTVLHQDWLNGKEYKCKVSNKALPAPIEKTISKAKGQPREPQVYTLPPSRDELTKNQVSLTCLVKGFYPSDIAVEWESNGQPENNYKTTPPVLDSDGSFFLYSKLTVDKSRWQQGNVFSCSVMHEALHNHYTQKSLSLSPGGGGSGSAHPIPDSSPLLQFGGQVRQRYLYTDDACQTEAHLEIREDGTVGGAADQSPESLLQLKALKPGVIQILGVKTSRFLCQRPDGALYGSLHFDPEACSFRELLLEDGYNVYQSEAHGLPLHLCGNKSPHRDPAPRGPARFLPLPGLPPAPPEPPGILAPQPPDVGSSDPLSMVGSQGRSPSYAS

SEQ ID NO: 579 - protein, 472 aa, Artificial Sequence
  Fusion Protein
HGEGTFTSDLSKQMEEEAVRLFIEWLKNGGPSSGAPPPSGGGGGGGSGGGGSGGGGSADKTHTCPPCPAPEAAGGPSVFLFPPKPKDTLMISRTPEVTCVVVDVSHEDPEVKFNWYVDGVEVHNAKTKPREEQYNSTYRVVSVLTVLHQDWLNGKEYKCKVSNKALPAPIEKTISKAKGQPREPQVYTLPPSRDELTKNQVSLTCLVKGFYPSDIAVEWESNGQPENNYKTTPPVLDSDGSFFLYSKLTVDKSRWQQGNVFSCSVMHEALHNHYTQKSLSLSPGGGGSGSAHPIPDSSPLLQFGGQVRQRYLYTDDACQTEAHLEIREDGTVGGAADQSPESLLQLKALKPGVIQILGVKTSRFLCQRPDGALYGSLHFDPEACSFRELLLEDGYNVYQSEAHGLPLHLCGNKSPHRDPAPRGPARFLPLPGLPPAPPEPPGILAPQPPDVGSSDPLSMVYPSQGRSPSYAS

SEQ ID NO: 580 - protein, 471 aa, Artificial Sequence
  Fusion Protein
HGEGTFTSDLSKQMEEEAVRLFIEWLKNGGPSSGAPPPSGGGGGGGSGGGGSGGGGSADKTHTCPPCPAPELLGGPSVFLFPPKPKDTLMISRTPEVTCVVVDVSHEDPEVKFNWYVDGVEVHNAKTKPREEQYNNASRVVSVLTVLHQDWLNGKEYKCKVSNKALPAPIEKTISKAKGQPREPQVYTLPPSRDELTKNQVSLTCLVKGFYPSDIAVEWESNGQPENNYKTTPPVLDSDGSFFLYSKLTVDKSRWQQGNVFSCSVMHEALHNHYTQKSLSLSPGGGGSGSAHPIPDSSPLLQFGGQVRQRYLYTDDACQTEAHLEIREDGTVGGAADQSPESLLQLKALKPGVIQILGVKTSRFLCQRPDGALYGSLHFDPEACSFRELLLEDGYNVYQSEAHGLPLHLPGCKSPHRDPAPRGPARFLPLPGLPPAPPEPPGILAPQPPDVGSSDPLSMVGSQGRSPSYAS

SEQ ID NO: 581 - protein, 472 aa, Artificial Sequence
  Fusion Protein
HGEGTFTSDLSKQMEEEAVRLFIEWLKNGGPSSGAPPPSGGGGGGGSGGGGSGGGGSADKTHTCPPCPAPELLGGPSVFLFPPKPKDTLMISRTPEVTCVVVDVSHEDPEVKFNWYVDGVEVHNAKTKPREEQYNNASRVVSVLTVLHQDWLNGKEYKCKVSNKALPAPIEKTISKAKGQPREPQVYTLPPSRDELTKNQVSLTCLVKGFYPSDIAVEWESNGQPENNYKTTPPVLDSDGSFFLYSKLTVDKSRWQQGNVFSCSVMHEALHNHYTQKSLSLSPGGGGSGSAHPIPDSSPLLQFGGQVRQRYLYTDDACQTEAHLEIREDGTVGGAADQSPESLLQLKALKPGVIQILGVKTSRFLCQRPDGALYGSLHFDPEACSFRELLLEDGYNVYQSEAHGLPLHLPGCKSPHRDPAPRGPARFLPLPGLPPAPPEPPGILAPQPPDVGSSDPLSMVYPSQGRSPSYAS

SEQ ID NO: 582 - protein, 471 aa, Artificial Sequence
  Fusion Protein
HGEGTFTSDLSKQMEEEAVRLFIEWLKNGGPSSGAPPPSGGGGGGGSGGGGSGGGGSADKTHTCPPCPAPELLGGPSVFLFPPKPKDTLMISRTPEVTCVVVDVSHEDPEVKFNWYVDGVEVHNAKTKPREEQYNNASRVVSVLTVLHQDWLNGKEYKCKVSNKALPAPIEKTISKAKGQPREPQVYTLPPSRDELTKNQVSLTCLVKGFYPSDIAVEWESNGQPENNYKTTPPVLDSDGSFFLYSKLTVDKSRWQQGNVFSCSVMHEALHNHYTQKSLSLSPGGGGSGSAHPIPDSSPLLQFGGQVRQRYLYTDDACQTEAHLEIREDGTVGGAADQSPESLLQLKALKPGVIQILGVKTSRFLCQRPDGALYGSLHFDPEACSFRELLLEDGYNVYQSEAHGLPLHLCGNKSPHRDPAPRGPARFLPLPGLPPAPPEPPGILAPQPPDVGSSDPLSMVGSQGRSPSYAS

SEQ ID NO: 583 - protein, 472 aa, Artificial Sequence
  Fusion Protein
HGEGTFTSDLSKQMEEEAVRLFIEWLKNGGPSSGAPPPSGGGGGGGSGGGGSGGGGSADKTHTCPPCPAPELLGGPSVFLFPPKPKDTLMISRTPEVTCVVVDVSHEDPEVKFNWYVDGVEVHNAKTKPREEQYNNASRVVSVLTVLHQDWLNGKEYKCKVSNKALPAPIEKTISKAKGQPREPQVYTLPPSRDELTKNQVSLTCLVKGFYPSDIAVEWESNGQPENNYKTTPPVLDSDGSFFLYSKLTVDKSRWQQGNVFSCSVMHEALHNHYTQKSLSLSPGGGGSGSAHPIPDSSPLLQFGGQVRQRYLYTDDACQTEAHLEIREDGTVGGAADQSPESLLQLKALKPGVIQILGVKTSRFLCQRPDGALYGSLHFDPEACSFRELLLEDGYNVYQSEAHGLPLHLCGNKSPHRDPAPRGPARFLPLPGLPPAPPEPPGILAPQPPDVGSSDPLSMVYPSQGRSPSYAS

SEQ ID NO: 584 - protein, 473 aa, Artificial Sequence
  Fusion Protein
HGEGTFTSDLSKQMEEEAVRLFIEWLKNGGPSSGAPPPSGGGGGGGSGGGGSGGGGSAESKYGPPCPPCPAPEFEGGPSVFLFPPKPKDTLMISRTPEVTCVVVDVSQEDPEVQFNWYVDGVEVHNAKTKPREEQFNSTYRVVSVLTVLHQDWLNGKEYKCKVSNKGLPSSIEKTISKAKGQPREPQVYTLPPSQEEMTKNQVSLTCLVKGFYPSDIAVEWESNGQPENNYKTTPPVLDSDGSFFLYSRLTVDKSRWQEGNVFSCSVMHEALHNHYTQKSLSLSLGGGGSGSAHPIPDSSPLLQFGGQVRQRYLYTDDACQTEAHLEIREDGTVGGAADQSPESLLQLKALKPGVIQILGVKTSRFLCQRPDGALYGSLHFDPEACSFRELLLEDGYNVYQSEAHGLPLHLPGCKSPHRDPAPRGPARFLPLPGLPPAPPEPPGILAPQPPDVGSSDPLSMVGSQGRSPSYAS

SEQ ID NO: 585 - protein, 474 aa, Artificial Sequence
  Fusion Protein
HGEGTFTSDLSKQMEEEAVRLFIEWLKNGGPSSGAPPPSGGGGGGGSGGGGSGGGGSAESKYGPPCPPCPAPEFEGGPSVFLFPPKPKDTLMISRTPEVTCVVVDVSQEDPEVQFNWYVDGVEVHNAKTKPREEQFNSTYRVVSVLTVLHQDWLNGKEYKCKVSNKGLPSSIEKTISKAKGQPREPQVYTLPPSQEEMTKNQVSLTCLVKGFYPSDIAVEWESNGQPENNYKTTPPVLDSDGSFFLYSRLTVDKSRWQEGNVFSCSVMHEALHNHYTQKSLSLSLGGGGSGSAHPIPDSSPLLQFGGQVRQRYLYTDDACQTEAHLEIREDGTVGGAADQSPESLLQLKALKPGVIQILGVKTSRFLCQRPDGALYGSLHFDPEACSFRELLLEDGYNVYQSEAHGLPLHLPGCKSPHRDPAPRGPARFLPLPGLPPAPPEPPGILAPQPPDVGSSDPLSMVYPSQGRSPSYAS

SEQ ID NO: 586 - protein, 473 aa, Artificial Sequence
  Fusion Protein
HGEGTFTSDLSKQMEEEAVRLFIEWLKNGGPSSGAPPPSGGGGGGGSGGGGSGGGGSAESKYGPPCPPCPAPEFEGGPSVFLFPPKPKDTLMISRTPEVTCVVVDVSQEDPEVQFNWYVDGVEVHNAKTKPREEQFNSTYRVVSVLTVLHQDWLNGKEYKCKVSNKGLPSSIEKTISKAKGQPREPQVYTLPPSQEEMTKNQVSLTCLVKGFYPSDIAVEWESNGQPENNYKTTPPVLDSDGSFFLYSRLTVDKSRWQEGNVFSCSVMHEALHNHYTQKSLSLSLGGGGSGSAHPIPDSSPLLQFGGQVRQRYLYTDDACQTEAHLEIREDGTVGGAADQSPESLLQLKALKPGVIQILGVKTSRFLCQRPDGALYGSLHFDPEACSFRELLLEDGYNVYQSEAHGLPLHLCGNKSPHRDPAPRGPARFLPLPGLPPAPPEPPGILAPQPPDVGSSDPLSMVGSQGRSPSYAS

SEQ ID NO: 587 - protein, 474 aa, Artificial Sequence
  Fusion Protein
HGEGTFTSDLSKQMEEEAVRLFIEWLKNGGPSSGAPPPSGGGGGGGSGGGGSGGGGSAESKYGPPCPPCPAPEFEGGPSVFLFPPKPKDTLMISRTPEVTCVVVDVSQEDPEVQFNWYVDGVEVHNAKTKPREEQFNSTYRVVSVLTVLHQDWLNGKEYKCKVSNKGLPSSIEKTISKAKGQPREPQVYTLPPSQEEMTKNQVSLTCLVKGFYPSDIAVEWESNGQPENNYKTTPPVLDSDGSFFLYSRLTVDKSRWQEGNVFSCSVMHEALHNHYTQKSLSLSLGGGGSGSAHPIPDSSPLLQFGGQVRQRYLYTDDACQTEAHLEIREDGTVGGAADQSPESLLQLKALKPGVIQILGVKTSRFLCQRPDGALYGSLHFDPEACSFRELLLEDGYNVYQSEAHGLPLHLCGNKSPHRDPAPRGPARFLPLPGLPPAPPEPPGILAPQPPDVGSSDPLSMVYPSQGRSPSYAS

SEQ ID NO: 588 - protein, 473 aa, Artificial Sequence
  Fusion Protein
GHGEGTFTSDLSIQLEEEAVRLFIEWLLAGGPSSGAPPPSGGGGGGGSGGGGSGGGGSADKTHTCPPCPAPEAAGGPSVFLFPPKPKDTLMISRTPEVTCVVVDVSHEDPEVKFNWYVDGVEVHNAKTKPREEQYNSTYRVVSVLTVLHQDWLNGKEYKCKVSNKALPAPIEKTISKAKGQPREPQVYTLPPSRDELTKNQVSLTCLVKGFYPSDIAVEWESNGQPENNYKTTPPVLDSDGSFFLYSKLTVDKSRWQQGNVFSCSVMHEALHNHYTQKSLSLSPGGGGSGSAHPIPDSSPLLQFGGQVRQRYLYTDDACQTEAHLEIREDGTVGGAADQSPESLLQLKALKPGVIQILGVKTSRFLCQRPDGALYGSLHFDPEACSFRELLLEDGYNVYQSEAHGLPLHLPGCKSPHRDPAPRGPARFLPLPGLPPAPPEPPGILAPQPPDVGSSDPLSMVYPSQGRSPSYAS

SEQ ID NO: 589 - protein, 472 aa, Artificial Sequence
  Fusion Protein
GHGEGTFTSDLSIQLEEEAVRLFIEWLLAGGPSSGAPPPSGGGGGGGSGGGGSGGGGSADKTHTCPPCPAPEAAGGPSVFLFPPKPKDTLMISRTPEVTCVVVDVSHEDPEVKFNWYVDGVEVHNAKTKPREEQYNSTYRVVSVLTVLHQDWLNGKEYKCKVSNKALPAPIEKTISKAKGQPREPQVYTLPPSRDELTKNQVSLTCLVKGFYPSDIAVEWESNGQPENNYKTTPPVLDSDGSFFLYSKLTVDKSRWQQGNVFSCSVMHEALHNHYTQKSLSLSPGGGGSGSAHPIPDSSPLLQFGGQVRQRYLYTDDACQTEAHLEIREDGTVGGAADQSPESLLQLKALKPGVIQILGVKTSRFLCQRPDGALYGSLHFDPEACSFRELLLEDGYNVYQSEAHGLPLHLCGNKSPHRDPAPRGPARFLPLPGLPPAPPEPPGILAPQPPDVGSSDPLSMVGSQGRSPSYAS

SEQ ID NO: 590 - protein, 473 aa, Artificial Sequence
  Fusion Protein
GHGEGTFTSDLSIQLEEEAVRLFIEWLLAGGPSSGAPPPSGGGGGGGSGGGGSGGGGSADKTHTCPPCPAPEAAGGPSVFLFPPKPKDTLMISRTPEVTCVVVDVSHEDPEVKFNWYVDGVEVHNAKTKPREEQYNSTYRVVSVLTVLHQDWLNGKEYKCKVSNKALPAPIEKTISKAKGQPREPQVYTLPPSRDELTKNQVSLTCLVKGFYPSDIAVEWESNGQPENNYKTTPPVLDSDGSFFLYSKLTVDKSRWQQGNVFSCSVMHEALHNHYTQKSLSLSPGGGGSGSAHPIPDSSPLLQFGGQVRQRYLYTDDACQTEAHLEIREDGTVGGAADQSPESLLQLKALKPGVIQILGVKTSRFLCQRPDGALYGSLHFDPEACSFRELLLEDGYNVYQSEAHGLPLHLCGNKSPHRDPAPRGPARFLPLPGLPPAPPEPPGILAPQPPDVGSSDPLSMVYPSQGRSPSYAS

SEQ ID NO: 591 - protein, 472 aa, Artificial Sequence
  Fusion Protein
GHGEGTFTSDLSIQLEEEAVRLFIEWLLAGGPSSGAPPPSGGGGGGGSGGGGSGGGGSADKTHTCPPCPAPELLGGPSVFLFPPKPKDTLMISRTPEVTCVVVDVSHEDPEVKFNWYVDGVEVHNAKTKPREEQYNNASRVVSVLTVLHQDWLNGKEYKCKVSNKALPAPIEKTISKAKGQPREPQVYTLPPSRDELTKNQVSLTCLVKGFYPSDIAVEWESNGQPENNYKTTPPVLDSDGSFFLYSKLTVDKSRWQQGNVFSCSVMHEALHNHYTQKSLSLSPGGGGSGSAHPIPDSSPLLQFGGQVRQRYLYTDDACQTEAHLEIREDGTVGGAADQSPESLLQLKALKPGVIQILGVKTSRFLCQRPDGALYGSLHFDPEACSFRELLLEDGYNVYQSEAHGLPLHLPGCKSPHRDPAPRGPARFLPLPGLPPAPPEPPGILAPQPPDVGSSDPLSMVGSQGRSPSYAS

SEQ ID NO: 592 - protein, 473 aa, Artificial Sequence
  Fusion Protein
GHGEGTFTSDLSIQLEEEAVRLFIEWLLAGGPSSGAPPPSGGGGGGGSGGGGSGGGGSADKTHTCPPCPAPELLGGPSVFLFPPKPKDTLMISRTPEVTCVVVDVSHEDPEVKFNWYVDGVEVHNAKTKPREEQYNNASRVVSVLTVLHQDWLNGKEYKCKVSNKALPAPIEKTISKAKGQPREPQVYTLPPSRDELTKNQVSLTCLVKGFYPSDIAVEWESNGQPENNYKTTPPVLDSDGSFFLYSKLTVDKSRWQQGNVFSCSVMHEALHNHYTQKSLSLSPGGGGSGSAHPIPDSSPLLQFGGQVRQRYLYTDDACQTEAHLEIREDGTVGGAADQSPESLLQLKALKPGVIQILGVKTSRFLCQRPDGALYGSLHFDPEACSFRELLLEDGYNVYQSEAHGLPLHLPGCKSPHRDPAPRGPARFLPLPGLPPAPPEPPGILAPQPPDVGSSDPLSMVYPSQGRSPSYAS

SEQ ID NO: 593 - protein, 472 aa, Artificial Sequence
  Fusion Protein
GHGEGTFTSDLSIQLEEEAVRLFIEWLLAGGPSSGAPPPSGGGGGGGSGGGGSGGGGSADKTHTCPPCPAPELLGGPSVFLFPPKPKDTLMISRTPEVTCVVVDVSHEDPEVKFNWYVDGVEVHNAKTKPREEQYNNASRVVSVLTVLHQDWLNGKEYKCKVSNKALPAPIEKTISKAKGQPREPQVYTLPPSRDELTKNQVSLTCLVKGFYPSDIAVEWESNGQPENNYKTTPPVLDSDGSFFLYSKLTVDKSRWQQGNVFSCSVMHEALHNHYTQKSLSLSPGGGGSGSAHPIPDSSPLLQFGGQVRQRYLYTDDACQTEAHLEIREDGTVGGAADQSPESLLQLKALKPGVIQILGVKTSRFLCQRPDGALYGSLHFDPEACSFRELLLEDGYNVYQSEAHGLPLHLCGNKSPHRDPAPRGPARFLPLPGLPPAPPEPPGILAPQPPDVGSSDPLSMVGSQGRSPSYAS

SEQ ID NO: 594 - protein, 473 aa, Artificial Sequence
  Fusion Protein
GHGEGTFTSDLSIQLEEEAVRLFIEWLLAGGPSSGAPPPSGGGGGGGSGGGGSGGGGSADKTHTCPPCPAPELLGGPSVFLFPPKPKDTLMISRTPEVTCVVVDVSHEDPEVKFNWYVDGVEVHNAKTKPREEQYNNASRVVSVLTVLHQDWLNGKEYKCKVSNKALPAPIEKTISKAKGQPREPQVYTLPPSRDELTKNQVSLTCLVKGFYPSDIAVEWESNGQPENNYKTTPPVLDSDGSFFLYSKLTVDKSRWQQGNVFSCSVMHEALHNHYTQKSLSLSPGGGGSGSAHPIPDSSPLLQFGGQVRQRYLYTDDACQTEAHLEIREDGTVGGAADQSPESLLQLKALKPGVIQILGVKTSRFLCQRPDGALYGSLHFDPEACSFRELLLEDGYNVYQSEAHGLPLHLCGNKSPHRDPAPRGPARFLPLPGLPPAPPEPPGILAPQPPDVGSSDPLSMVYPSQGRSPSYAS

SEQ ID NO: 595 - protein, 474 aa, Artificial Sequence
  Fusion Protein
GHGEGTFTSDLSIQLEEEAVRLFIEWLLAGGPSSGAPPPSGGGGGGGSGGGGSGGGGSAESKYGPPCPPCPAPEFEGGPSVFLFPPKPKDTLMISRTPEVTCVVVDVSQEDPEVQFNWYVDGVEVHNAKTKPREEQFNSTYRVVSVLTVLHQDWLNGKEYKCKVSNKGLPSSIEKTISKAKGQPREPQVYTLPPSQEEMTKNQVSLTCLVKGFYPSDIAVEWESNGQPENNYKTTPPVLDSDGSFFLYSRLTVDKSRWQEGNVFSCSVMHEALHNHYTQKSLSLSLGGGGSGSAHPIPDSSPLLQFGGQVRQRYLYTDDACQTEAHLEIREDGTVGGAADQSPESLLQLKALKPGVIQILGVKTSRFLCQRPDGALYGSLHFDPEACSFRELLLEDGYNVYQSEAHGLPLHLPGCKSPHRDPAPRGPARFLPLPGLPPAPPEPPGILAPQPPDVGSSDPLSMVGSQGRSPSYAS

SEQ ID NO: 596 - protein, 475 aa, Artificial Sequence
  Fusion Protein
GHGEGTFTSDLSIQLEEEAVRLFIEWLLAGGPSSGAPPPSGGGGGGGSGGGGSGGGGSAESKYGPPCPPCPAPEFEGGPSVFLFPPKPKDTLMISRTPEVTCVVVDVSQEDPEVQFNWYVDGVEVHNAKTKPREEQFNSTYRVVSVLTVLHQDWLNGKEYKCKVSNKGLPSSIEKTISKAKGQPREPQVYTLPPSQEEMTKNQVSLTCLVKGFYPSDIAVEWESNGQPENNYKTTPPVLDSDGSFFLYSRLTVDKSRWQEGNVFSCSVMHEALHNHYTQKSLSLSLGGGGSGSAHPIPDSSPLLQFGGQVRQRYLYTDDACQTEAHLEIREDGTVGGAADQSPESLLQLKALKPGVIQILGVKTSRFLCQRPDGALYGSLHFDPEACSFRELLLEDGYNVYQSEAHGLPLHLPGCKSPHRDPAPRGPARFLPLPGLPPAPPEPPGILAPQPPDVGSSDPLSMVYPSQGRSPSYAS

SEQ ID NO: 597 - protein, 474 aa, Artificial Sequence
  Fusion Protein
GHGEGTFTSDLSIQLEEEAVRLFIEWLLAGGPSSGAPPPSGGGGGGGSGGGGSGGGGSAESKYGPPCPPCPAPEFEGGPSVFLFPPKPKDTLMISRTPEVTCVVVDVSQEDPEVQFNWYVDGVEVHNAKTKPREEQFNSTYRVVSVLTVLHQDWLNGKEYKCKVSNKGLPSSIEKTISKAKGQPREPQVYTLPPSQEEMTKNQVSLTCLVKGFYPSDIAVEWESNGQPENNYKTTPPVLDSDGSFFLYSRLTVDKSRWQEGNVFSCSVMHEALHNHYTQKSLSLSLGGGGSGSAHPIPDSSPLLQFGGQVRQRYLYTDDACQTEAHLEIREDGTVGGAADQSPESLLQLKALKPGVIQILGVKTSRFLCQRPDGALYGSLHFDPEACSFRELLLEDGYNVYQSEAHGLPLHLCGNKSPHRDPAPRGPARFLPLPGLPPAPPEPPGILAPQPPDVGSSDPLSMVGSQGRSPSYAS

SEQ ID NO: 598 - protein, 475 aa, Artificial Sequence
  Fusion Protein
GHGEGTFTSDLSIQLEEEAVRLFIEWLLAGGPSSGAPPPSGGGGGGGSGGGGSGGGGSAESKYGPPCPPCPAPEFEGGPSVFLFPPKPKDTLMISRTPEVTCVVVDVSQEDPEVQFNWYVDGVEVHNAKTKPREEQFNSTYRVVSVLTVLHQDWLNGKEYKCKVSNKGLPSSIEKTISKAKGQPREPQVYTLPPSQEEMTKNQVSLTCLVKGFYPSDIAVEWESNGQPENNYKTTPPVLDSDGSFFLYSRLTVDKSRWQEGNVFSCSVMHEALHNHYTQKSLSLSLGGGGSGSAHPIPDSSPLLQFGGQVRQRYLYTDDACQTEAHLEIREDGTVGGAADQSPESLLQLKALKPGVIQILGVKTSRFLCQRPDGALYGSLHFDPEACSFRELLLEDGYNVYQSEAHGLPLHLCGNKSPHRDPAPRGPARFLPLPGLPPAPPEPPGILAPQPPDVGSSDPLSMVYPSQGRSPSYAS

SEQ ID NO: 599 - protein, 473 aa, Artificial Sequence
  Fusion Protein
GHGEGTFTSDLSIQLEEEAVRLFIEWLLATGPSSGAPPPSGGGGGGGSGGGGSGGGGSADKTHTCPPCPAPEAAGGPSVFLFPPKPKDTLMISRTPEVTCVVVDVSHEDPEVKFNWYVDGVEVHNAKTKPREEQYNSTYRVVSVLTVLHQDWLNGKEYKCKVSNKALPAPIEKTISKAKGQPREPQVYTLPPSRDELTKNQVSLTCLVKGFYPSDIAVEWESNGQPENNYKTTPPVLDSDGSFFLYSKLTVDKSRWQQGNVFSCSVMHEALHNHYTQKSLSLSPGGGGSGSAHPIPDSSPLLQFGGQVRQRYLYTDDACQTEAHLEIREDGTVGGAADQSPESLLQLKALKPGVIQILGVKTSRFLCQRPDGALYGSLHFDPEACSFRELLLEDGYNVYQSEAHGLPLHLPGCKSPHRDPAPRGPARFLPLPGLPPAPPEPPGILAPQPPDVGSSDPLSMVYPSQGRSPSYAS

SEQ ID NO: 600 - protein, 472 aa, Artificial Sequence
  Fusion Protein
GHGEGTFTSDLSIQLEEEAVRLFIEWLLATGPSSGAPPPSGGGGGGGSGGGGSGGGGSADKTHTCPPCPAPEAAGGPSVFLFPPKPKDTLMISRTPEVTCVVVDVSHEDPEVKFNWYVDGVEVHNAKTKPREEQYNSTYRVVSVLTVLHQDWLNGKEYKCKVSNKALPAPIEKTISKAKGQPREPQVYTLPPSRDELTKNQVSLTCLVKGFYPSDIAVEWESNGQPENNYKTTPPVLDSDGSFFLYSKLTVDKSRWQQGNVFSCSVMHEALHNHYTQKSLSLSPGGGGSGSAHPIPDSSPLLQFGGQVRQRYLYTDDACQTEAHLEIREDGTVGGAADQSPESLLQLKALKPGVIQILGVKTSRFLCQRPDGALYGSLHFDPEACSFRELLLEDGYNVYQSEAHGLPLHLCGNKSPHRDPAPRGPARFLPLPGLPPAPPEPPGILAPQPPDVGSSDPLSMVGSQGRSPSYAS

SEQ ID NO: 601 - protein, 473 aa, Artificial Sequence
  Fusion Protein
GHGEGTFTSDLSIQLEEEAVRLFIEWLLATGPSSGAPPPSGGGGGGGSGGGGSGGGGSADKTHTCPPCPAPEAAGGPSVFLFPPKPKDTLMISRTPEVTCVVVDVSHEDPEVKFNWYVDGVEVHNAKTKPREEQYNSTYRVVSVLTVLHQDWLNGKEYKCKVSNKALPAPIEKTISKAKGQPREPQVYTLPPSRDELTKNQVSLTCLVKGFYPSDIAVEWESNGQPENNYKTTPPVLDSDGSFFLYSKLTVDKSRWQQGNVFSCSVMHEALHNHYTQKSLSLSPGGGGSGSAHPIPDSSPLLQFGGQVRQRYLYTDDACQTEAHLEIREDGTVGGAADQSPESLLQLKALKPGVIQILGVKTSRFLCQRPDGALYGSLHFDPEACSFRELLLEDGYNVYQSEAHGLPLHLCGNKSPHRDPAPRGPARFLPLPGLPPAPPEPPGILAPQPPDVGSSDPLSMVYPSQGRSPSYAS

SEQ ID NO: 602 - protein, 472 aa, Artificial Sequence
  Fusion Protein
GHGEGTFTSDLSIQLEEEAVRLFIEWLLATGPSSGAPPPSGGGGGGGSGGGGSGGGGSADKTHTCPPCPAPELLGGPSVFLFPPKPKDTLMISRTPEVTCVVVDVSHEDPEVKFNWYVDGVEVHNAKTKPREEQYNNASRVVSVLTVLHQDWLNGKEYKCKVSNKALPAPIEKTISKAKGQPREPQVYTLPPSRDELTKNQVSLTCLVKGFYPSDIAVEWESNGQPENNYKTTPPVLDSDGSFFLYSKLTVDKSRWQQGNVFSCSVMHEALHNHYTQKSLSLSPGGGGSGSAHPIPDSSPLLQFGGQVRQRYLYTDDACQTEAHLEIREDGTVGGAADQSPESLLQLKALKPGVIQILGVKTSRFLCQRPDGALYGSLHFDPEACSFRELLLEDGYNVYQSEAHGLPLHLPGCKSPHRDPAPRGPARFLPLPGLPPAPPEPPGILAPQPPDVGSSDPLSMVGSQGRSPSYAS

SEQ ID NO: 603 - protein, 473 aa, Artificial Sequence
  Fusion Protein
GHGEGTFTSDLSIQLEEEAVRLFIEWLLATGPSSGAPPPSGGGGGGGSGGGGSGGGGSADKTHTCPPCPAPELLGGPSVFLFPPKPKDTLMISRTPEVTCVVVDVSHEDPEVKFNWYVDGVEVHNAKTKPREEQYNNASRVVSVLTVLHQDWLNGKEYKCKVSNKALPAPIEKTISKAKGQPREPQVYTLPPSRDELTKNQVSLTCLVKGFYPSDIAVEWESNGQPENNYKTTPPVLDSDGSFFLYSKLTVDKSRWQQGNVFSCSVMHEALHNHYTQKSLSLSPGGGGSGSAHPIPDSSPLLQFGGQVRQRYLYTDDACQTEAHLEIREDGTVGGAADQSPESLLQLKALKPGVIQILGVKTSRFLCQRPDGALYGSLHFDPEACSFRELLLEDGYNVYQSEAHGLPLHLPGCKSPHRDPAPRGPARFLPLPGLPPAPPEPPGILAPQPPDVGSSDPLSMVYPSQGRSPSYAS

SEQ ID NO: 604 - protein, 472 aa, Artificial Sequence
  Fusion Protein
GHGEGTFTSDLSIQLEEEAVRLFIEWLLATGPSSGAPPPSGGGGGGGSGGGGSGGGGSADKTHTCPPCPAPELLGGPSVFLFPPKPKDTLMISRTPEVTCVVVDVSHEDPEVKFNWYVDGVEVHNAKTKPREEQYNNASRVVSVLTVLHQDWLNGKEYKCKVSNKALPAPIEKTISKAKGQPREPQVYTLPPSRDELTKNQVSLTCLVKGFYPSDIAVEWESNGQPENNYKTTPPVLDSDGSFFLYSKLTVDKSRWQQGNVFSCSVMHEALHNHYTQKSLSLSPGGGGSGSAHPIPDSSPLLQFGGQVRQRYLYTDDACQTEAHLEIREDGTVGGAADQSPESLLQLKALKPGVIQILGVKTSRFLCQRPDGALYGSLHFDPEACSFRELLLEDGYNVYQSEAHGLPLHLCGNKSPHRDPAPRGPARFLPLPGLPPAPPEPPGILAPQPPDVGSSDPLSMVGSQGRSPSYAS

SEQ ID NO: 605 - protein, 473 aa, Artificial Sequence
  Fusion Protein
GHGEGTFTSDLSIQLEEEAVRLFIEWLLATGPSSGAPPPSGGGGGGGSGGGGSGGGGSADKTHTCPPCPAPELLGGPSVFLFPPKPKDTLMISRTPEVTCVVVDVSHEDPEVKFNWYVDGVEVHNAKTKPREEQYNNASRVVSVLTVLHQDWLNGKEYKCKVSNKALPAPIEKTISKAKGQPREPQVYTLPPSRDELTKNQVSLTCLVKGFYPSDIAVEWESNGQPENNYKTTPPVLDSDGSFFLYSKLTVDKSRWQQGNVFSCSVMHEALHNHYTQKSLSLSPGGGGSGSAHPIPDSSPLLQFGGQVRQRYLYTDDACQTEAHLEIREDGTVGGAADQSPESLLQLKALKPGVIQILGVKTSRFLCQRPDGALYGSLHFDPEACSFRELLLEDGYNVYQSEAHGLPLHLCGNKSPHRDPAPRGPARFLPLPGLPPAPPEPPGILAPQPPDVGSSDPLSMVYPSQGRSPSYAS

SEQ ID NO: 606 - protein, 474 aa, Artificial Sequence
  Fusion Protein
GHGEGTFTSDLSIQLEEEAVRLFIEWLLATGPSSGAPPPSGGGGGGGSGGGGSGGGGSAESKYGPPCPPCPAPEFEGGPSVFLFPPKPKDTLMISRTPEVTCVVVDVSQEDPEVQFNWYVDGVEVHNAKTKPREEQFNSTYRVVSVLTVLHQDWLNGKEYKCKVSNKGLPSSIEKTISKAKGQPREPQVYTLPPSQEEMTKNQVSLTCLVKGFYPSDIAVEWESNGQPENNYKTTPPVLDSDGSFFLYSRLTVDKSRWQEGNVFSCSVMHEALHNHYTQKSLSLSLGGGGSGSAHPIPDSSPLLQFGGQVRQRYLYTDDACQTEAHLEIREDGTVGGAADQSPESLLQLKALKPGVIQILGVKTSRFLCQRPDGALYGSLHFDPEACSFRELLLEDGYNVYQSEAHGLPLHLPGCKSPHRDPAPRGPARFLPLPGLPPAPPEPPGILAPQPPDVGSSDPLSMVGSQGRSPSYAS

SEQ ID NO: 607 - protein, 475 aa, Artificial Sequence
  Fusion Protein
GHGEGTFTSDLSIQLEEEAVRLFIEWLLATGPSSGAPPPSGGGGGGGSGGGGSGGGGSAESKYGPPCPPCPAPEFEGGPSVFLFPPKPKDTLMISRTPEVTCVVVDVSQEDPEVQFNWYVDGVEVHNAKTKPREEQFNSTYRVVSVLTVLHQDWLNGKEYKCKVSNKGLPSSIEKTISKAKGQPREPQVYTLPPSQEEMTKNQVSLTCLVKGFYPSDIAVEWESNGQPENNYKTTPPVLDSDGSFFLYSRLTVDKSRWQEGNVFSCSVMHEALHNHYTQKSLSLSLGGGGSGSAHPIPDSSPLLQFGGQVRQRYLYTDDACQTEAHLEIREDGTVGGAADQSPESLLQLKALKPGVIQILGVKTSRFLCQRPDGALYGSLHFDPEACSFRELLLEDGYNVYQSEAHGLPLHLPGCKSPHRDPAPRGPARFLPLPGLPPAPPEPPGILAPQPPDVGSSDPLSMVYPSQGRSPSYAS

SEQ ID NO: 608 - protein, 474 aa, Artificial Sequence
  Fusion Protein
GHGEGTFTSDLSIQLEEEAVRLFIEWLLATGPSSGAPPPSGGGGGGGSGGGGSGGGGSAESKYGPPCPPCPAPEFEGGPSVFLFPPKPKDTLMISRTPEVTCVVVDVSQEDPEVQFNWYVDGVEVHNAKTKPREEQFNSTYRVVSVLTVLHQDWLNGKEYKCKVSNKGLPSSIEKTISKAKGQPREPQVYTLPPSQEEMTKNQVSLTCLVKGFYPSDIAVEWESNGQPENNYKTTPPVLDSDGSFFLYSRLTVDKSRWQEGNVFSCSVMHEALHNHYTQKSLSLSLGGGGSGSAHPIPDSSPLLQFGGQVRQRYLYTDDACQTEAHLEIREDGTVGGAADQSPESLLQLKALKPGVIQILGVKTSRFLCQRPDGALYGSLHFDPEACSFRELLLEDGYNVYQSEAHGLPLHLCGNKSPHRDPAPRGPARFLPLPGLPPAPPEPPGILAPQPPDVGSSDPLSMVGSQGRSPSYAS

SEQ ID NO: 609 - protein, 475 aa, Artificial Sequence
  Fusion Protein
GHGEGTFTSDLSIQLEEEAVRLFIEWLLATGPSSGAPPPSGGGGGGGSGGGGSGGGGSAESKYGPPCPPCPAPEFEGGPSVFLFPPKPKDTLMISRTPEVTCVVVDVSQEDPEVQFNWYVDGVEVHNAKTKPREEQFNSTYRVVSVLTVLHQDWLNGKEYKCKVSNKGLPSSIEKTISKAKGQPREPQVYTLPPSQEEMTKNQVSLTCLVKGFYPSDIAVEWESNGQPENNYKTTPPVLDSDGSFFLYSRLTVDKSRWQEGNVFSCSVMHEALHNHYTQKSLSLSLGGGGSGSAHPIPDSSPLLQFGGQVRQRYLYTDDACQTEAHLEIREDGTVGGAADQSPESLLQLKALKPGVIQILGVKTSRFLCQRPDGALYGSLHFDPEACSFRELLLEDGYNVYQSEAHGLPLHLCGNKSPHRDPAPRGPARFLPLPGLPPAPPEPPGILAPQPPDVGSSDPLSMVYPSQGRSPSYAS

SEQ ID NO: 610 - protein, 472 aa, Artificial Sequence
  Fusion Protein
HGEGTFTSDLSIQLDEEAVRLFIEWLLATGPVSGAPPPSGGGGGGGSGGGGSGGGGSADKTHTCPPCPAPEAAGGPSVFLFPPKPKDTLMISRTPEVTCVVVDVSHEDPEVKFNWYVDGVEVHNAKTKPREEQYNSTYRVVSVLTVLHQDWLNGKEYKCKVSNKALPAPIEKTISKAKGQPREPQVYTLPPSRDELTKNQVSLTCLVKGFYPSDIAVEWESNGQPENNYKTTPPVLDSDGSFFLYSKLTVDKSRWQQGNVFSCSVMHEALHNHYTQKSLSLSPGGGGSGSAHPIPDSSPLLQFGGQVRQRYLYTDDACQTEAHLEIREDGTVGGAADQSPESLLQLKALKPGVIQILGVKTSRFLCQRPDGALYGSLHFDPEACSFRELLLEDGYNVYQSEAHGLPLHLPGCKSPHRDPAPRGPARFLPLPGLPPAPPEPPGILAPQPPDVGSSDPLSMVYPSQGRSPSYAS

SEQ ID NO: 611 - protein, 471 aa, Artificial Sequence
  Fusion Protein
HGEGTFTSDLSIQLDEEAVRLFIEWLLATGPVSGAPPPSGGGGGGGSGGGGSGGGGSADKTHTCPPCPAPEAAGGPSVFLFPPKPKDTLMISRTPEVTCVVVDVSHEDPEVKFNWYVDGVEVHNAKTKPREEQYNSTYRVVSVLTVLHQDWLNGKEYKCKVSNKALPAPIEKTISKAKGQPREPQVYTLPPSRDELTKNQVSLTCLVKGFYPSDIAVEWESNGQPENNYKTTPPVLDSDGSFFLYSKLTVDKSRWQQGNVFSCSVMHEALHNHYTQKSLSLSPGGGGSGSAHPIPDSSPLLQFGGQVRQRYLYTDDACQTEAHLEIREDGTVGGAADQSPESLLQLKALKPGVIQILGVKTSRFLCQRPDGALYGSLHFDPEACSFRELLLEDGYNVYQSEAHGLPLHLCGNKSPHRDPAPRGPARFLPLPGLPPAPPEPPGILAPQPPDVGSSDPLSMVGSQGRSPSYAS

SEQ ID NO: 612 - protein, 472 aa, Artificial Sequence
  Fusion Protein
HGEGTFTSDLSIQLDEEAVRLFIEWLLATGPVSGAPPPSGGGGGGGSGGGGSGGGGSADKTHTCPPCPAPEAAGGPSVFLFPPKPKDTLMISRTPEVTCVVVDVSHEDPEVKFNWYVDGVEVHNAKTKPREEQYNSTYRVVSVLTVLHQDWLNGKEYKCKVSNKALPAPIEKTISKAKGQPREPQVYTLPPSRDELTKNQVSLTCLVKGFYPSDIAVEWESNGQPENNYKTTPPVLDSDGSFFLYSKLTVDKSRWQQGNVFSCSVMHEALHNHYTQKSLSLSPGGGGSGSAHPIPDSSPLLQFGGQVRQRYLYTDDACQTEAHLEIREDGTVGGAADQSPESLLQLKALKPGVIQILGVKTSRFLCQRPDGALYGSLHFDPEACSFRELLLEDGYNVYQSEAHGLPLHLCGNKSPHRDPAPRGPARFLPLPGLPPAPPEPPGILAPQPPDVGSSDPLSMVYPSQGRSPSYAS

SEQ ID NO: 613 - protein, 471 aa, Artificial Sequence
  Fusion Protein
HGEGTFTSDLSIQLDEEAVRLFIEWLLATGPVSGAPPPSGGGGGGGSGGGGSGGGGSADKTHTCPPCPAPELLGGPSVFLFPPKPKDTLMISRTPEVTCVVVDVSHEDPEVKFNWYVDGVEVHNAKTKPREEQYNNASRVVSVLTVLHQDWLNGKEYKCKVSNKALPAPIEKTISKAKGQPREPQVYTLPPSRDELTKNQVSLTCLVKGFYPSDIAVEWESNGQPENNYKTTPPVLDSDGSFFLYSKLTVDKSRWQQGNVFSCSVMHEALHNHYTQKSLSLSPGGGGSGSAHPIPDSSPLLQFGGQVRQRYLYTDDACQTEAHLEIREDGTVGGAADQSPESLLQLKALKPGVIQILGVKTSRFLCQRPDGALYGSLHFDPEACSFRELLLEDGYNVYQSEAHGLPLHLPGCKSPHRDPAPRGPARFLPLPGLPPAPPEPPGILAPQPPDVGSSDPLSMVGSQGRSPSYAS

SEQ ID NO: 614 - protein, 472 aa, Artificial Sequence
  Fusion Protein
HGEGTFTSDLSIQLDEEAVRLFIEWLLATGPVSGAPPPSGGGGGGGSGGGGSGGGGSADKTHTCPPCPAPELLGGPSVFLFPPKPKDTLMISRTPEVTCVVVDVSHEDPEVKFNWYVDGVEVHNAKTKPREEQYNNASRVVSVLTVLHQDWLNGKEYKCKVSNKALPAPIEKTISKAKGQPREPQVYTLPPSRDELTKNQVSLTCLVKGFYPSDIAVEWESNGQPENNYKTTPPVLDSDGSFFLYSKLTVDKSRWQQGNVFSCSVMHEALHNHYTQKSLSLSPGGGGSGSAHPIPDSSPLLQFGGQVRQRYLYTDDACQTEAHLEIREDGTVGGAADQSPESLLQLKALKPGVIQILGVKTSRFLCQRPDGALYGSLHFDPEACSFRELLLEDGYNVYQSEAHGLPLHLPGCKSPHRDPAPRGPARFLPLPGLPPAPPEPPGILAPQPPDVGSSDPLSMVYPSQGRSPSYAS

SEQ ID NO: 615 - protein, 471 aa, Artificial Sequence
  Fusion Protein
HGEGTFTSDLSIQLDEEAVRLFIEWLLATGPVSGAPPPSGGGGGGGSGGGGSGGGGSADKTHTCPPCPAPELLGGPSVFLFPPKPKDTLMISRTPEVTCVVVDVSHEDPEVKFNWYVDGVEVHNAKTKPREEQYNNASRVVSVLTVLHQDWLNGKEYKCKVSNKALPAPIEKTISKAKGQPREPQVYTLPPSRDELTKNQVSLTCLVKGFYPSDIAVEWESNGQPENNYKTTPPVLDSDGSFFLYSKLTVDKSRWQQGNVFSCSVMHEALHNHYTQKSLSLSPGGGGSGSAHPIPDSSPLLQFGGQVRQRYLYTDDACQTEAHLEIREDGTVGGAADQSPESLLQLKALKPGVIQILGVKTSRFLCQRPDGALYGSLHFDPEACSFRELLLEDGYNVYQSEAHGLPLHLCGNKSPHRDPAPRGPARFLPLPGLPPAPPEPPGILAPQPPDVGSSDPLSMVGSQGRSPSYAS

SEQ ID NO: 616 - protein, 472 aa, Artificial Sequence
  Fusion Protein
HGEGTFTSDLSIQLDEEAVRLFIEWLLATGPVSGAPPPSGGGGGGGSGGGGSGGGGSADKTHTCPPCPAPELLGGPSVFLFPPKPKDTLMISRTPEVTCVVVDVSHEDPEVKFNWYVDGVEVHNAKTKPREEQYNNASRVVSVLTVLHQDWLNGKEYKCKVSNKALPAPIEKTISKAKGQPREPQVYTLPPSRDELTKNQVSLTCLVKGFYPSDIAVEWESNGQPENNYKTTPPVLDSDGSFFLYSKLTVDKSRWQQGNVFSCSVMHEALHNHYTQKSLSLSPGGGGSGSAHPIPDSSPLLQFGGQVRQRYLYTDDACQTEAHLEIREDGTVGGAADQSPESLLQLKALKPGVIQILGVKTSRFLCQRPDGALYGSLHFDPEACSFRELLLEDGYNVYQSEAHGLPLHLCGNKSPHRDPAPRGPARFLPLPGLPPAPPEPPGILAPQPPDVGSSDPLSMVYPSQGRSPSYAS

SEQ ID NO: 617 - protein, 473 aa, Artificial Sequence
  Fusion Protein
HGEGTFTSDLSIQLDEEAVRLFIEWLLATGPVSGAPPPSGGGGGGGSGGGGSGGGGSAESKYGPPCPPCPAPEFEGGPSVFLFPPKPKDTLMISRTPEVTCVVVDVSQEDPEVQFNWYVDGVEVHNAKTKPREEQFNSTYRVVSVLTVLHQDWLNGKEYKCKVSNKGLPSSIEKTISKAKGQPREPQVYTLPPSQEEMTKNQVSLTCLVKGFYPSDIAVEWESNGQPENNYKTTPPVLDSDGSFFLYSRLTVDKSRWQEGNVFSCSVMHEALHNHYTQKSLSLSLGGGGSGSAHPIPDSSPLLQFGGQVRQRYLYTDDACQTEAHLEIREDGTVGGAADQSPESLLQLKALKPGVIQILGVKTSRFLCQRPDGALYGSLHFDPEACSFRELLLEDGYNVYQSEAHGLPLHLPGCKSPHRDPAPRGPARFLPLPGLPPAPPEPPGILAPQPPDVGSSDPLSMVGSQGRSPSYAS

SEQ ID NO: 618 - protein, 474 aa, Artificial Sequence
  Fusion Protein
HGEGTFTSDLSIQLDEEAVRLFIEWLLATGPVSGAPPPSGGGGGGGSGGGGSGGGGSAESKYGPPCPPCPAPEFEGGPSVFLFPPKPKDTLMISRTPEVTCVVVDVSQEDPEVQFNWYVDGVEVHNAKTKPREEQFNSTYRVVSVLTVLHQDWLNGKEYKCKVSNKGLPSSIEKTISKAKGQPREPQVYTLPPSQEEMTKNQVSLTCLVKGFYPSDIAVEWESNGQPENNYKTTPPVLDSDGSFFLYSRLTVDKSRWQEGNVFSCSVMHEALHNHYTQKSLSLSLGGGGSGSAHPIPDSSPLLQFGGQVRQRYLYTDDACQTEAHLEIREDGTVGGAADQSPESLLQLKALKPGVIQILGVKTSRFLCQRPDGALYGSLHFDPEACSFRELLLEDGYNVYQSEAHGLPLHLPGCKSPHRDPAPRGPARFLPLPGLPPAPPEPPGILAPQPPDVGSSDPLSMVYPSQGRSPSYAS

SEQ ID NO: 619 - protein, 473 aa, Artificial Sequence
  Fusion Protein
HGEGTFTSDLSIQLDEEAVRLFIEWLLATGPVSGAPPPSGGGGGGGSGGGGSGGGGSAESKYGPPCPPCPAPEFEGGPSVFLFPPKPKDTLMISRTPEVTCVVVDVSQEDPEVQFNWYVDGVEVHNAKTKPREEQFNSTYRVVSVLTVLHQDWLNGKEYKCKVSNKGLPSSIEKTISKAKGQPREPQVYTLPPSQEEMTKNQVSLTCLVKGFYPSDIAVEWESNGQPENNYKTTPPVLDSDGSFFLYSRLTVDKSRWQEGNVFSCSVMHEALHNHYTQKSLSLSLGGGGSGSAHPIPDSSPLLQFGGQVRQRYLYTDDACQTEAHLEIREDGTVGGAADQSPESLLQLKALKPGVIQILGVKTSRFLCQRPDGALYGSLHFDPEACSFRELLLEDGYNVYQSEAHGLPLHLCGNKSPHRDPAPRGPARFLPLPGLPPAPPEPPGILAPQPPDVGSSDPLSMVGSQGRSPSYAS

SEQ ID NO: 620 - protein, 474 aa, Artificial Sequence
  Fusion Protein
HGEGTFTSDLSIQLDEEAVRLFIEWLLATGPVSGAPPPSGGGGGGGSGGGGSGGGGSAESKYGPPCPPCPAPEFEGGPSVFLFPPKPKDTLMISRTPEVTCVVVDVSQEDPEVQFNWYVDGVEVHNAKTKPREEQFNSTYRVVSVLTVLHQDWLNGKEYKCKVSNKGLPSSIEKTISKAKGQPREPQVYTLPPSQEEMTKNQVSLTCLVKGFYPSDIAVEWESNGQPENNYKTTPPVLDSDGSFFLYSRLTVDKSRWQEGNVFSCSVMHEALHNHYTQKSLSLSLGGGGSGSAHPIPDSSPLLQFGGQVRQRYLYTDDACQTEAHLEIREDGTVGGAADQSPESLLQLKALKPGVIQILGVKTSRFLCQRPDGALYGSLHFDPEACSFRELLLEDGYNVYQSEAHGLPLHLCGNKSPHRDPAPRGPARFLPLPGLPPAPPEPPGILAPQPPDVGSSDPLSMVYPSQGRSPSYAS

SEQ ID NO: 621 - protein, 472 aa, Artificial Sequence
  Fusion Protein
HGEGTFTSDLSILLDEEAVRLFIEWLLATGPVSGAPPPSGGGGGGGSGGGGSGGGGSADKTHTCPPCPAPEAAGGPSVFLFPPKPKDTLMISRTPEVTCVVVDVSHEDPEVKFNWYVDGVEVHNAKTKPREEQYNSTYRVVSVLTVLHQDWLNGKEYKCKVSNKALPAPIEKTISKAKGQPREPQVYTLPPSRDELTKNQVSLTCLVKGFYPSDIAVEWESNGQPENNYKTTPPVLDSDGSFFLYSKLTVDKSRWQQGNVFSCSVMHEALHNHYTQKSLSLSPGGGGSGSAHPIPDSSPLLQFGGQVRQRYLYTDDACQTEAHLEIREDGTVGGAADQSPESLLQLKALKPGVIQILGVKTSRFLCQRPDGALYGSLHFDPEACSFRELLLEDGYNVYQSEAHGLPLHLPGCKSPHRDPAPRGPARFLPLPGLPPAPPEPPGILAPQPPDVGSSDPLSMVYPSQGRSPSYAS

SEQ ID NO: 622 - protein, 471 aa, Artificial Sequence
  Fusion Protein
HGEGTFTSDLSILLDEEAVRLFIEWLLATGPVSGAPPPSGGGGGGGSGGGGSGGGGSADKTHTCPPCPAPEAAGGPSVFLFPPKPKDTLMISRTPEVTCVVVDVSHEDPEVKFNWYVDGVEVHNAKTKPREEQYNSTYRVVSVLTVLHQDWLNGKEYKCKVSNKALPAPIEKTISKAKGQPREPQVYTLPPSRDELTKNQVSLTCLVKGFYPSDIAVEWESNGQPENNYKTTPPVLDSDGSFFLYSKLTVDKSRWQQGNVFSCSVMHEALHNHYTQKSLSLSPGGGGSGSAHPIPDSSPLLQFGGQVRQRYLYTDDACQTEAHLEIREDGTVGGAADQSPESLLQLKALKPGVIQILGVKTSRFLCQRPDGALYGSLHFDPEACSFRELLLEDGYNVYQSEAHGLPLHLCGNKSPHRDPAPRGPARFLPLPGLPPAPPEPPGILAPQPPDVGSSDPLSMVGSQGRSPSYAS

SEQ ID NO: 623 - protein, 472 aa, Artificial Sequence
  Fusion Protein
HGEGTFTSDLSILLDEEAVRLFIEWLLATGPVSGAPPPSGGGGGGGSGGGGSGGGGSADKTHTCPPCPAPEAAGGPSVFLFPPKPKDTLMISRTPEVTCVVVDVSHEDPEVKFNWYVDGVEVHNAKTKPREEQYNSTYRVVSVLTVLHQDWLNGKEYKCKVSNKALPAPIEKTISKAKGQPREPQVYTLPPSRDELTKNQVSLTCLVKGFYPSDIAVEWESNGQPENNYKTTPPVLDSDGSFFLYSKLTVDKSRWQQGNVFSCSVMHEALHNHYTQKSLSLSPGGGGSGSAHPIPDSSPLLQFGGQVRQRYLYTDDACQTEAHLEIREDGTVGGAADQSPESLLQLKALKPGVIQILGVKTSRFLCQRPDGALYGSLHFDPEACSFRELLLEDGYNVYQSEAHGLPLHLCGNKSPHRDPAPRGPARFLPLPGLPPAPPEPPGILAPQPPDVGSSDPLSMVYPSQGRSPSYAS

SEQ ID NO: 624 - protein, 471 aa, Artificial Sequence
  Fusion Protein
HGEGTFTSDLSILLDEEAVRLFIEWLLATGPVSGAPPPSGGGGGGGSGGGGSGGGGSADKTHTCPPCPAPELLGGPSVFLFPPKPKDTLMISRTPEVTCVVVDVSHEDPEVKFNWYVDGVEVHNAKTKPREEQYNNASRVVSVLTVLHQDWLNGKEYKCKVSNKALPAPIEKTISKAKGQPREPQVYTLPPSRDELTKNQVSLTCLVKGFYPSDIAVEWESNGQPENNYKTTPPVLDSDGSFFLYSKLTVDKSRWQQGNVFSCSVMHEALHNHYTQKSLSLSPGGGGSGSAHPIPDSSPLLQFGGQVRQRYLYTDDACQTEAHLEIREDGTVGGAADQSPESLLQLKALKPGVIQILGVKTSRFLCQRPDGALYGSLHFDPEACSFRELLLEDGYNVYQSEAHGLPLHLPGCKSPHRDPAPRGPARFLPLPGLPPAPPEPPGILAPQPPDVGSSDPLSMVGSQGRSPSYAS

SEQ ID NO: 625 - protein, 472 aa, Artificial Sequence
  Fusion Protein
HGEGTFTSDLSILLDEEAVRLFIEWLLATGPVSGAPPPSGGGGGGGSGGGGSGGGGSADKTHTCPPCPAPELLGGPSVFLFPPKPKDTLMISRTPEVTCVVVDVSHEDPEVKFNWYVDGVEVHNAKTKPREEQYNNASRVVSVLTVLHQDWLNGKEYKCKVSNKALPAPIEKTISKAKGQPREPQVYTLPPSRDELTKNQVSLTCLVKGFYPSDIAVEWESNGQPENNYKTTPPVLDSDGSFFLYSKLTVDKSRWQQGNVFSCSVMHEALHNHYTQKSLSLSPGGGGSGSAHPIPDSSPLLQFGGQVRQRYLYTDDACQTEAHLEIREDGTVGGAADQSPESLLQLKALKPGVIQILGVKTSRFLCQRPDGALYGSLHFDPEACSFRELLLEDGYNVYQSEAHGLPLHLPGCKSPHRDPAPRGPARFLPLPGLPPAPPEPPGILAPQPPDVGSSDPLSMVYPSQGRSPSYAS

SEQ ID NO: 626 - protein, 471 aa, Artificial Sequence
  Fusion Protein
HGEGTFTSDLSILLDEEAVRLFIEWLLATGPVSGAPPPSGGGGGGGSGGGGSGGGGSADKTHTCPPCPAPELLGGPSVFLFPPKPKDTLMISRTPEVTCVVVDVSHEDPEVKFNWYVDGVEVHNAKTKPREEQYNNASRVVSVLTVLHQDWLNGKEYKCKVSNKALPAPIEKTISKAKGQPREPQVYTLPPSRDELTKNQVSLTCLVKGFYPSDIAVEWESNGQPENNYKTTPPVLDSDGSFFLYSKLTVDKSRWQQGNVFSCSVMHEALHNHYTQKSLSLSPGGGGSGSAHPIPDSSPLLQFGGQVRQRYLYTDDACQTEAHLEIREDGTVGGAADQSPESLLQLKALKPGVIQILGVKTSRFLCQRPDGALYGSLHFDPEACSFRELLLEDGYNVYQSEAHGLPLHLCGNKSPHRDPAPRGPARFLPLPGLPPAPPEPPGILAPQPPDVGSSDPLSMVGSQGRSPSYAS

SEQ ID NO: 627 - protein, 472 aa, Artificial Sequence
  Fusion Protein
HGEGTFTSDLSILLDEEAVRLFIEWLLATGPVSGAPPPSGGGGGGGSGGGGSGGGGSADKTHTCPPCPAPELLGGPSVFLFPPKPKDTLMISRTPEVTCVVVDVSHEDPEVKFNWYVDGVEVHNAKTKPREEQYNNASRVVSVLTVLHQDWLNGKEYKCKVSNKALPAPIEKTISKAKGQPREPQVYTLPPSRDELTKNQVSLTCLVKGFYPSDIAVEWESNGQPENNYKTTPPVLDSDGSFFLYSKLTVDKSRWQQGNVFSCSVMHEALHNHYTQKSLSLSPGGGGSGSAHPIPDSSPLLQFGGQVRQRYLYTDDACQTEAHLEIREDGTVGGAADQSPESLLQLKALKPGVIQILGVKTSRFLCQRPDGALYGSLHFDPEACSFRELLLEDGYNVYQSEAHGLPLHLCGNKSPHRDPAPRGPARFLPLPGLPPAPPEPPGILAPQPPDVGSSDPLSMVYPSQGRSPSYAS

SEQ ID NO: 628 - protein, 474 aa, Artificial Sequence
  Fusion Protein
HGEGTFTSDLSILLDEEAVRLFIEWLLATGPVSGAPPPSGGGGGGGSGGGGSGGGGSAESKYGPPCPPCPAPEFEGGPSVFLFPPKPKDTLMISRTPEVTCVVVDVSQEDPEVQFNWYVDGVEVHNAKTKPREEQFNSTYRVVSVLTVLHQDWLNGKEYKCKVSNKGLPSSIEKTISKAKGQPREPQVYTLPPSQEEMTKNQVSLTCLVKGFYPSDIAVEWESNGQPENNYKTTPPVLDSDGSFFLYSRLTVDKSRWQEGNVFSCSVMHEALHNHYTQKSLSLSLGGGGSGSAHPIPDSSPLLQFGGQVRQRYLYTDDACQTEAHLEIREDGTVGGAADQSPESLLQLKALKPGVIQILGVKTSRFLCQRPDGALYGSLHFDPEACSFRELLLEDGYNVYQSEAHGLPLHLCGNKSPHRDPAPRGPARFLPLPGLPPAPPEPPGILAPQPPDVGSSDPLSMVYPSQGRSPSYAS

SEQ ID NO: 629 - protein, 471 aa, Artificial Sequence
  Fusion Protein
HGEGTFTSDLSIQLDEEAVRLFIEWLEATGPVSGAPPPSGGGGGGGSGGGGSGGGGSADKTHTCPPCPAPEAAGGPSVFLFPPKPKDTLMISRTPEVTCVVVDVSHEDPEVKFNWYVDGVEVHNAKTKPREEQYNSTYRVVSVLTVLHQDWLNGKEYKCKVSNKALPAPIEKTISKAKGQPREPQVYTLPPSRDELTKNQVSLTCLVKGFYPSDIAVEWESNGQPENNYKTTPPVLDSDGSFFLYSKLTVDKSRWQQGNVFSCSVMHEALHNHYTQKSLSLSPGGGGSGSAHPIPDSSPLLQFGGQVRQRYLYTDDACQTEAHLEIREDGTVGGAADQSPESLLQLKALKPGVIQILGVKTSRFLCQRPDGALYGSLHFDPEACSFRELLLEDGYNVYQSEAHGLPLHLCGNKSPHRDPAPRGPARFLPLPGLPPAPPEPPGILAPQPPDVGSSDPLSMVGSQGRSPSYAS

SEQ ID NO: 630 - protein, 472 aa, Artificial Sequence
  Fusion Protein
HGEGTFTSDLSIQLDEEAVRLFIEWLEATGPVSGAPPPSGGGGGGGSGGGGSGGGGSADKTHTCPPCPAPEAAGGPSVFLFPPKPKDTLMISRTPEVTCVVVDVSHEDPEVKFNWYVDGVEVHNAKTKPREEQYNSTYRVVSVLTVLHQDWLNGKEYKCKVSNKALPAPIEKTISKAKGQPREPQVYTLPPSRDELTKNQVSLTCLVKGFYPSDIAVEWESNGQPENNYKTTPPVLDSDGSFFLYSKLTVDKSRWQQGNVFSCSVMHEALHNHYTQKSLSLSPGGGGSGSAHPIPDSSPLLQFGGQVRQRYLYTDDACQTEAHLEIREDGTVGGAADQSPESLLQLKALKPGVIQILGVKTSRFLCQRPDGALYGSLHFDPEACSFRELLLEDGYNVYQSEAHGLPLHLCGNKSPHRDPAPRGPARFLPLPGLPPAPPEPPGILAPQPPDVGSSDPLSMVYPSQGRSPSYAS

SEQ ID NO: 631 - protein, 471 aa, Artificial Sequence
  Fusion Protein
HGEGTFTSDLSIQLDEEAVRLFIEWLEATGPVSGAPPPSGGGGGGGSGGGGSGGGGSADKTHTCPPCPAPELLGGPSVFLFPPKPKDTLMISRTPEVTCVVVDVSHEDPEVKFNWYVDGVEVHNAKTKPREEQYNNASRVVSVLTVLHQDWLNGKEYKCKVSNKALPAPIEKTISKAKGQPREPQVYTLPPSRDELTKNQVSLTCLVKGFYPSDIAVEWESNGQPENNYKTTPPVLDSDGSFFLYSKLTVDKSRWQQGNVFSCSVMHEALHNHYTQKSLSLSPGGGGSGSAHPIPDSSPLLQFGGQVRQRYLYTDDACQTEAHLEIREDGTVGGAADQSPESLLQLKALKPGVIQILGVKTSRFLCQRPDGALYGSLHFDPEACSFRELLLEDGYNVYQSEAHGLPLHLPGCKSPHRDPAPRGPARFLPLPGLPPAPPEPPGILAPQPPDVGSSDPLSMVGSQGRSPSYAS

SEQ ID NO: 632 - protein, 472 aa, Artificial Sequence
  Fusion Protein
HGEGTFTSDLSIQLDEEAVRLFIEWLEATGPVSGAPPPSGGGGGGGSGGGGSGGGGSADKTHTCPPCPAPELLGGPSVFLFPPKPKDTLMISRTPEVTCVVVDVSHEDPEVKFNWYVDGVEVHNAKTKPREEQYNNASRVVSVLTVLHQDWLNGKEYKCKVSNKALPAPIEKTISKAKGQPREPQVYTLPPSRDELTKNQVSLTCLVKGFYPSDIAVEWESNGQPENNYKTTPPVLDSDGSFFLYSKLTVDKSRWQQGNVFSCSVMHEALHNHYTQKSLSLSPGGGGSGSAHPIPDSSPLLQFGGQVRQRYLYTDDACQTEAHLEIREDGTVGGAADQSPESLLQLKALKPGVIQILGVKTSRFLCQRPDGALYGSLHFDPEACSFRELLLEDGYNVYQSEAHGLPLHLPGCKSPHRDPAPRGPARFLPLPGLPPAPPEPPGILAPQPPDVGSSDPLSMVYPSQGRSPSYAS

SEQ ID NO: 633 - protein, 471 aa, Artificial Sequence
  Fusion Protein
HGEGTFTSDLSIQLDEEAVRLFIEWLEATGPVSGAPPPSGGGGGGGSGGGGSGGGGSADKTHTCPPCPAPELLGGPSVFLFPPKPKDTLMISRTPEVTCVVVDVSHEDPEVKFNWYVDGVEVHNAKTKPREEQYNNASRVVSVLTVLHQDWLNGKEYKCKVSNKALPAPIEKTISKAKGQPREPQVYTLPPSRDELTKNQVSLTCLVKGFYPSDIAVEWESNGQPENNYKTTPPVLDSDGSFFLYSKLTVDKSRWQQGNVFSCSVMHEALHNHYTQKSLSLSPGGGGSGSAHPIPDSSPLLQFGGQVRQRYLYTDDACQTEAHLEIREDGTVGGAADQSPESLLQLKALKPGVIQILGVKTSRFLCQRPDGALYGSLHFDPEACSFRELLLEDGYNVYQSEAHGLPLHLCGNKSPHRDPAPRGPARFLPLPGLPPAPPEPPGILAPQPPDVGSSDPLSMVGSQGRSPSYAS

SEQ ID NO: 634 - protein, 472 aa, Artificial Sequence
  Fusion Protein
HGEGTFTSDLSIQLDEEAVRLFIEWLEATGPVSGAPPPSGGGGGGGSGGGGSGGGGSADKTHTCPPCPAPELLGGPSVFLFPPKPKDTLMISRTPEVTCVVVDVSHEDPEVKFNWYVDGVEVHNAKTKPREEQYNNASRVVSVLTVLHQDWLNGKEYKCKVSNKALPAPIEKTISKAKGQPREPQVYTLPPSRDELTKNQVSLTCLVKGFYPSDIAVEWESNGQPENNYKTTPPVLDSDGSFFLYSKLTVDKSRWQQGNVFSCSVMHEALHNHYTQKSLSLSPGGGGSGSAHPIPDSSPLLQFGGQVRQRYLYTDDACQTEAHLEIREDGTVGGAADQSPESLLQLKALKPGVIQILGVKTSRFLCQRPDGALYGSLHFDPEACSFRELLLEDGYNVYQSEAHGLPLHLCGNKSPHRDPAPRGPARFLPLPGLPPAPPEPPGILAPQPPDVGSSDPLSMVYPSQGRSPSYAS

SEQ ID NO: 635 - protein, 473 aa, Artificial Sequence
  Fusion Protein
HGEGTFTSDLSIQLDEEAVRLFIEWLEATGPVSGAPPPSGGGGGGGSGGGGSGGGGSAESKYGPPCPPCPAPEFEGGPSVFLFPPKPKDTLMISRTPEVTCVVVDVSQEDPEVQFNWYVDGVEVHNAKTKPREEQFNSTYRVVSVLTVLHQDWLNGKEYKCKVSNKGLPSSIEKTISKAKGQPREPQVYTLPPSQEEMTKNQVSLTCLVKGFYPSDIAVEWESNGQPENNYKTTPPVLDSDGSFFLYSRLTVDKSRWQEGNVFSCSVMHEALHNHYTQKSLSLSLGGGGSGSAHPIPDSSPLLQFGGQVRQRYLYTDDACQTEAHLEIREDGTVGGAADQSPESLLQLKALKPGVIQILGVKTSRFLCQRPDGALYGSLHFDPEACSFRELLLEDGYNVYQSEAHGLPLHLPGCKSPHRDPAPRGPARFLPLPGLPPAPPEPPGILAPQPPDVGSSDPLSMVGSQGRSPSYAS

SEQ ID NO: 636 - protein, 474 aa, Artificial Sequence
  Fusion Protein
HGEGTFTSDLSIQLDEEAVRLFIEWLEATGPVSGAPPPSGGGGGGGSGGGGSGGGGSAESKYGPPCPPCPAPEFEGGPSVFLFPPKPKDTLMISRTPEVTCVVVDVSQEDPEVQFNWYVDGVEVHNAKTKPREEQFNSTYRVVSVLTVLHQDWLNGKEYKCKVSNKGLPSSIEKTISKAKGQPREPQVYTLPPSQEEMTKNQVSLTCLVKGFYPSDIAVEWESNGQPENNYKTTPPVLDSDGSFFLYSRLTVDKSRWQEGNVFSCSVMHEALHNHYTQKSLSLSLGGGGSGSAHPIPDSSPLLQFGGQVRQRYLYTDDACQTEAHLEIREDGTVGGAADQSPESLLQLKALKPGVIQILGVKTSRFLCQRPDGALYGSLHFDPEACSFRELLLEDGYNVYQSEAHGLPLHLPGCKSPHRDPAPRGPARFLPLPGLPPAPPEPPGILAPQPPDVGSSDPLSMVYPSQGRSPSYAS

SEQ ID NO: 637 - protein, 473 aa, Artificial Sequence
  Fusion Protein
HGEGTFTSDLSIQLDEEAVRLFIEWLEATGPVSGAPPPSGGGGGGGSGGGGSGGGGSAESKYGPPCPPCPAPEFEGGPSVFLFPPKPKDTLMISRTPEVTCVVVDVSQEDPEVQFNWYVDGVEVHNAKTKPREEQFNSTYRVVSVLTVLHQDWLNGKEYKCKVSNKGLPSSIEKTISKAKGQPREPQVYTLPPSQEEMTKNQVSLTCLVKGFYPSDIAVEWESNGQPENNYKTTPPVLDSDGSFFLYSRLTVDKSRWQEGNVFSCSVMHEALHNHYTQKSLSLSLGGGGSGSAHPIPDSSPLLQFGGQVRQRYLYTDDACQTEAHLEIREDGTVGGAADQSPESLLQLKALKPGVIQILGVKTSRFLCQRPDGALYGSLHFDPEACSFRELLLEDGYNVYQSEAHGLPLHLCGNKSPHRDPAPRGPARFLPLPGLPPAPPEPPGILAPQPPDVGSSDPLSMVGSQGRSPSYAS

SEQ ID NO: 638 - protein, 474 aa, Artificial Sequence
  Fusion Protein
HGEGTFTSDLSIQLDEEAVRLFIEWLEATGPVSGAPPPSGGGGGGGSGGGGSGGGGSAESKYGPPCPPCPAPEFEGGPSVFLFPPKPKDTLMISRTPEVTCVVVDVSQEDPEVQFNWYVDGVEVHNAKTKPREEQFNSTYRVVSVLTVLHQDWLNGKEYKCKVSNKGLPSSIEKTISKAKGQPREPQVYTLPPSQEEMTKNQVSLTCLVKGFYPSDIAVEWESNGQPENNYKTTPPVLDSDGSFFLYSRLTVDKSRWQEGNVFSCSVMHEALHNHYTQKSLSLSLGGGGSGSAHPIPDSSPLLQFGGQVRQRYLYTDDACQTEAHLEIREDGTVGGAADQSPESLLQLKALKPGVIQILGVKTSRFLCQRPDGALYGSLHFDPEACSFRELLLEDGYNVYQSEAHGLPLHLCGNKSPHRDPAPRGPARFLPLPGLPPAPPEPPGILAPQPPDVGSSDPLSMVYPSQGRSPSYAS

SEQ ID NO: 639 - protein, 472 aa, Artificial Sequence
  Fusion Protein
HGEGTFTSDLSILLDEEAVREFIEWLLATGPVSGAPPPSGGGGGGGSGGGGSGGGGSADKTHTCPPCPAPEAAGGPSVFLFPPKPKDTLMISRTPEVTCVVVDVSHEDPEVKFNWYVDGVEVHNAKTKPREEQYNSTYRVVSVLTVLHQDWLNGKEYKCKVSNKALPAPIEKTISKAKGQPREPQVYTLPPSRDELTKNQVSLTCLVKGFYPSDIAVEWESNGQPENNYKTTPPVLDSDGSFFLYSKLTVDKSRWQQGNVFSCSVMHEALHNHYTQKSLSLSPGGGGSGSAHPIPDSSPLLQFGGQVRQRYLYTDDACQTEAHLEIREDGTVGGAADQSPESLLQLKALKPGVIQILGVKTSRFLCQRPDGALYGSLHFDPEACSFRELLLEDGYNVYQSEAHGLPLHLPGCKSPHRDPAPRGPARFLPLPGLPPAPPEPPGILAPQPPDVGSSDPLSMVYPSQGRSPSYAS

SEQ ID NO: 640 - protein, 471 aa, Artificial Sequence
  Fusion Protein
HGEGTFTSDLSILLDEEAVREFIEWLLATGPVSGAPPPSGGGGGGGSGGGGSGGGGSADKTHTCPPCPAPEAAGGPSVFLFPPKPKDTLMISRTPEVTCVVVDVSHEDPEVKFNWYVDGVEVHNAKTKPREEQYNSTYRVVSVLTVLHQDWLNGKEYKCKVSNKALPAPIEKTISKAKGQPREPQVYTLPPSRDELTKNQVSLTCLVKGFYPSDIAVEWESNGQPENNYKTTPPVLDSDGSFFLYSKLTVDKSRWQQGNVFSCSVMHEALHNHYTQKSLSLSPGGGGSGSAHPIPDSSPLLQFGGQVRQRYLYTDDACQTEAHLEIREDGTVGGAADQSPESLLQLKALKPGVIQILGVKTSRFLCQRPDGALYGSLHFDPEACSFRELLLEDGYNVYQSEAHGLPLHLCGNKSPHRDPAPRGPARFLPLPGLPPAPPEPPGILAPQPPDVGSSDPLSMVGSQGRSPSYAS

SEQ ID NO: 641 - protein, 472 aa, Artificial Sequence
  Fusion Protein
HGEGTFTSDLSILLDEEAVREFIEWLLATGPVSGAPPPSGGGGGGGSGGGGSGGGGSADKTHTCPPCPAPEAAGGPSVFLFPPKPKDTLMISRTPEVTCVVVDVSHEDPEVKFNWYVDGVEVHNAKTKPREEQYNSTYRVVSVLTVLHQDWLNGKEYKCKVSNKALPAPIEKTISKAKGQPREPQVYTLPPSRDELTKNQVSLTCLVKGFYPSDIAVEWESNGQPENNYKTTPPVLDSDGSFFLYSKLTVDKSRWQQGNVFSCSVMHEALHNHYTQKSLSLSPGGGGSGSAHPIPDSSPLLQFGGQVRQRYLYTDDACQTEAHLEIREDGTVGGAADQSPESLLQLKALKPGVIQILGVKTSRFLCQRPDGALYGSLHFDPEACSFRELLLEDGYNVYQSEAHGLPLHLCGNKSPHRDPAPRGPARFLPLPGLPPAPPEPPGILAPQPPDVGSSDPLSMVYPSQGRSPSYAS

SEQ ID NO: 642 - protein, 471 aa, Artificial Sequence
  Fusion Protein
HGEGTFTSDLSILLDEEAVREFIEWLLATGPVSGAPPPSGGGGGGGSGGGGSGGGGSADKTHTCPPCPAPELLGGPSVFLFPPKPKDTLMISRTPEVTCVVVDVSHEDPEVKFNWYVDGVEVHNAKTKPREEQYNNASRVVSVLTVLHQDWLNGKEYKCKVSNKALPAPIEKTISKAKGQPREPQVYTLPPSRDELTKNQVSLTCLVKGFYPSDIAVEWESNGQPENNYKTTPPVLDSDGSFFLYSKLTVDKSRWQQGNVFSCSVMHEALHNHYTQKSLSLSPGGGGSGSAHPIPDSSPLLQFGGQVRQRYLYTDDACQTEAHLEIREDGTVGGAADQSPESLLQLKALKPGVIQILGVKTSRFLCQRPDGALYGSLHFDPEACSFRELLLEDGYNVYQSEAHGLPLHLPGCKSPHRDPAPRGPARFLPLPGLPPAPPEPPGILAPQPPDVGSSDPLSMVGSQGRSPSYAS

SEQ ID NO: 643 - protein, 472 aa, Artificial Sequence
  Fusion Protein
HGEGTFTSDLSILLDEEAVREFIEWLLATGPVSGAPPPSGGGGGGGSGGGGSGGGGSADKTHTCPPCPAPELLGGPSVFLFPPKPKDTLMISRTPEVTCVVVDVSHEDPEVKFNWYVDGVEVHNAKTKPREEQYNNASRVVSVLTVLHQDWLNGKEYKCKVSNKALPAPIEKTISKAKGQPREPQVYTLPPSRDELTKNQVSLTCLVKGFYPSDIAVEWESNGQPENNYKTTPPVLDSDGSFFLYSKLTVDKSRWQQGNVFSCSVMHEALHNHYTQKSLSLSPGGGGSGSAHPIPDSSPLLQFGGQVRQRYLYTDDACQTEAHLEIREDGTVGGAADQSPESLLQLKALKPGVIQILGVKTSRFLCQRPDGALYGSLHFDPEACSFRELLLEDGYNVYQSEAHGLPLHLPGCKSPHRDPAPRGPARFLPLPGLPPAPPEPPGILAPQPPDVGSSDPLSMVYPSQGRSPSYAS

SEQ ID NO: 644 - protein, 471 aa, Artificial Sequence
  Fusion Protein
HGEGTFTSDLSILLDEEAVREFIEWLLATGPVSGAPPPSGGGGGGGSGGGGSGGGGSADKTHTCPPCPAPELLGGPSVFLFPPKPKDTLMISRTPEVTCVVVDVSHEDPEVKFNWYVDGVEVHNAKTKPREEQYNNASRVVSVLTVLHQDWLNGKEYKCKVSNKALPAPIEKTISKAKGQPREPQVYTLPPSRDELTKNQVSLTCLVKGFYPSDIAVEWESNGQPENNYKTTPPVLDSDGSFFLYSKLTVDKSRWQQGNVFSCSVMHEALHNHYTQKSLSLSPGGGGSGSAHPIPDSSPLLQFGGQVRQRYLYTDDACQTEAHLEIREDGTVGGAADQSPESLLQLKALKPGVIQILGVKTSRFLCQRPDGALYGSLHFDPEACSFRELLLEDGYNVYQSEAHGLPLHLCGNKSPHRDPAPRGPARFLPLPGLPPAPPEPPGILAPQPPDVGSSDPLSMVGSQGRSPSYAS

SEQ ID NO: 645 - protein, 472 aa, Artificial Sequence
  Fusion Protein
HGEGTFTSDLSILLDEEAVREFIEWLLATGPVSGAPPPSGGGGGGGSGGGGSGGGGSADKTHTCPPCPAPELLGGPSVFLFPPKPKDTLMISRTPEVTCVVVDVSHEDPEVKFNWYVDGVEVHNAKTKPREEQYNNASRVVSVLTVLHQDWLNGKEYKCKVSNKALPAPIEKTISKAKGQPREPQVYTLPPSRDELTKNQVSLTCLVKGFYPSDIAVEWESNGQPENNYKTTPPVLDSDGSFFLYSKLTVDKSRWQQGNVFSCSVMHEALHNHYTQKSLSLSPGGGGSGSAHPIPDSSPLLQFGGQVRQRYLYTDDACQTEAHLEIREDGTVGGAADQSPESLLQLKALKPGVIQILGVKTSRFLCQRPDGALYGSLHFDPEACSFRELLLEDGYNVYQSEAHGLPLHLCGNKSPHRDPAPRGPARFLPLPGLPPAPPEPPGILAPQPPDVGSSDPLSMVYPSQGRSPSYAS

SEQ ID NO: 646 - protein, 471 aa, Artificial Sequence
  Fusion Protein
HGEGTFTSDLSKQLEEEAVRLFIEWLKAGGPSSGAPPPSGGGGGGGSGGGGSGGGGSADKTHTCPPCPAPEAAGGPSVFLFPPKPKDTLMISRTPEVTCVVVDVSHEDPEVKFNWYVDGVEVHNAKTKPREEQYNSTYRVVSVLTVLHQDWLNGKEYKCKVSNKALPAPIEKTISKAKGQPREPQVYTLPPSRDELTKNQVSLTCLVKGFYPSDIAVEWESNGQPENNYKTTPPVLDSDGSFFLYSKLTVDKSRWQQGNVFSCSVMHEALHNHYTQKSLSLSPGGGGSGSAHPIPDSSPLLQFGGQVRQRYLYTDDACQTEAHLEIREDGTVGGAADQSPESLLQLKALKPGVIQILGVKTSRFLCQRPDGALYGSLHFDPEACSFRELLLEDGYNVYQSEAHGLPLHLPGCKSPHRDPAPRGPARFLPLPGLPPAPPEPPGILAPQPPDVGSSDPLSMVGSQGRSPSYAS

SEQ ID NO: 647 - protein, 472 aa, Artificial Sequence
  Fusion Protein
HGEGTFTSDLSKQLEEEAVRLFIEWLKAGGPSSGAPPPSGGGGGGGSGGGGSGGGGSADKTHTCPPCPAPEAAGGPSVFLFPPKPKDTLMISRTPEVTCVVVDVSHEDPEVKFNWYVDGVEVHNAKTKPREEQYNSTYRVVSVLTVLHQDWLNGKEYKCKVSNKALPAPIEKTISKAKGQPREPQVYTLPPSRDELTKNQVSLTCLVKGFYPSDIAVEWESNGQPENNYKTTPPVLDSDGSFFLYSKLTVDKSRWQQGNVFSCSVMHEALHNHYTQKSLSLSPGGGGSGSAHPIPDSSPLLQFGGQVRQRYLYTDDACQTEAHLEIREDGTVGGAADQSPESLLQLKALKPGVIQILGVKTSRFLCQRPDGALYGSLHFDPEACSFRELLLEDGYNVYQSEAHGLPLHLPGCKSPHRDPAPRGPARFLPLPGLPPAPPEPPGILAPQPPDVGSSDPLSMVYPSQGRSPSYAS

SEQ ID NO: 648 - protein, 471 aa, Artificial Sequence
  Fusion Protein
HGEGTFTSDLSKQLEEEAVRLFIEWLKAGGPSSGAPPPSGGGGGGGSGGGGSGGGGSADKTHTCPPCPAPEAAGGPSVFLFPPKPKDTLMISRTPEVTCVVVDVSHEDPEVKFNWYVDGVEVHNAKTKPREEQYNSTYRVVSVLTVLHQDWLNGKEYKCKVSNKALPAPIEKTISKAKGQPREPQVYTLPPSRDELTKNQVSLTCLVKGFYPSDIAVEWESNGQPENNYKTTPPVLDSDGSFFLYSKLTVDKSRWQQGNVFSCSVMHEALHNHYTQKSLSLSPGGGGSGSAHPIPDSSPLLQFGGQVRQRYLYTDDACQTEAHLEIREDGTVGGAADQSPESLLQLKALKPGVIQILGVKTSRFLCQRPDGALYGSLHFDPEACSFRELLLEDGYNVYQSEAHGLPLHLCGNKSPHRDPAPRGPARFLPLPGLPPAPPEPPGILAPQPPDVGSSDPLSMVGSQGRSPSYAS

SEQ ID NO: 649 - protein, 472 aa, Artificial Sequence
  Fusion Protein
HGEGTFTSDLSKQLEEEAVRLFIEWLKAGGPSSGAPPPSGGGGGGGSGGGGSGGGGSADKTHTCPPCPAPEAAGGPSVFLFPPKPKDTLMISRTPEVTCVVVDVSHEDPEVKFNWYVDGVEVHNAKTKPREEQYNSTYRVVSVLTVLHQDWLNGKEYKCKVSNKALPAPIEKTISKAKGQPREPQVYTLPPSRDELTKNQVSLTCLVKGFYPSDIAVEWESNGQPENNYKTTPPVLDSDGSFFLYSKLTVDKSRWQQGNVFSCSVMHEALHNHYTQKSLSLSPGGGGSGSAHPIPDSSPLLQFGGQVRQRYLYTDDACQTEAHLEIREDGTVGGAADQSPESLLQLKALKPGVIQILGVKTSRFLCQRPDGALYGSLHFDPEACSFRELLLEDGYNVYQSEAHGLPLHLCGNKSPHRDPAPRGPARFLPLPGLPPAPPEPPGILAPQPPDVGSSDPLSMVYPSQGRSPSYAS

SEQ ID NO: 650 - protein, 471 aa, Artificial Sequence
  Fusion Protein
HGEGTFTSDLSKQLEEEAVRLFIEWLKAGGPSSGAPPPSGGGGGGGSGGGGSGGGGSADKTHTCPPCPAPELLGGPSVFLFPPKPKDTLMISRTPEVTCVVVDVSHEDPEVKFNWYVDGVEVHNAKTKPREEQYNNASRVVSVLTVLHQDWLNGKEYKCKVSNKALPAPIEKTISKAKGQPREPQVYTLPPSRDELTKNQVSLTCLVKGFYPSDIAVEWESNGQPENNYKTTPPVLDSDGSFFLYSKLTVDKSRWQQGNVFSCSVMHEALHNHYTQKSLSLSPGGGGSGSAHPIPDSSPLLQFGGQVRQRYLYTDDACQTEAHLEIREDGTVGGAADQSPESLLQLKALKPGVIQILGVKTSRFLCQRPDGALYGSLHFDPEACSFRELLLEDGYNVYQSEAHGLPLHLPGCKSPHRDPAPRGPARFLPLPGLPPAPPEPPGILAPQPPDVGSSDPLSMVGSQGRSPSYAS

SEQ ID NO: 651 - protein, 472 aa, Artificial Sequence
  Fusion Protein
HGEGTFTSDLSKQLEEEAVRLFIEWLKAGGPSSGAPPPSGGGGGGGSGGGGSGGGGSADKTHTCPPCPAPELLGGPSVFLFPPKPKDTLMISRTPEVTCVVVDVSHEDPEVKFNWYVDGVEVHNAKTKPREEQYNNASRVVSVLTVLHQDWLNGKEYKCKVSNKALPAPIEKTISKAKGQPREPQVYTLPPSRDELTKNQVSLTCLVKGFYPSDIAVEWESNGQPENNYKTTPPVLDSDGSFFLYSKLTVDKSRWQQGNVFSCSVMHEALHNHYTQKSLSLSPGGGGSGSAHPIPDSSPLLQFGGQVRQRYLYTDDACQTEAHLEIREDGTVGGAADQSPESLLQLKALKPGVIQILGVKTSRFLCQRPDGALYGSLHFDPEACSFRELLLEDGYNVYQSEAHGLPLHLPGCKSPHRDPAPRGPARFLPLPGLPPAPPEPPGILAPQPPDVGSSDPLSMVYPSQGRSPSYAS

SEQ ID NO: 652 - protein, 471 aa, Artificial Sequence
  Fusion Protein
HGEGTFTSDLSKQLEEEAVRLFIEWLKAGGPSSGAPPPSGGGGGGGSGGGGSGGGGSADKTHTCPPCPAPELLGGPSVFLFPPKPKDTLMISRTPEVTCVVVDVSHEDPEVKFNWYVDGVEVHNAKTKPREEQYNNASRVVSVLTVLHQDWLNGKEYKCKVSNKALPAPIEKTISKAKGQPREPQVYTLPPSRDELTKNQVSLTCLVKGFYPSDIAVEWESNGQPENNYKTTPPVLDSDGSFFLYSKLTVDKSRWQQGNVFSCSVMHEALHNHYTQKSLSLSPGGGGSGSAHPIPDSSPLLQFGGQVRQRYLYTDDACQTEAHLEIREDGTVGGAADQSPESLLQLKALKPGVIQILGVKTSRFLCQRPDGALYGSLHFDPEACSFRELLLEDGYNVYQSEAHGLPLHLCGNKSPHRDPAPRGPARFLPLPGLPPAPPEPPGILAPQPPDVGSSDPLSMVGSQGRSPSYAS

SEQ ID NO: 653 - protein, 472 aa, Artificial Sequence
  Fusion Protein
HGEGTFTSDLSKQLEEEAVRLFIEWLKAGGPSSGAPPPSGGGGGGGSGGGGSGGGGSADKTHTCPPCPAPELLGGPSVFLFPPKPKDTLMISRTPEVTCVVVDVSHEDPEVKFNWYVDGVEVHNAKTKPREEQYNNASRVVSVLTVLHQDWLNGKEYKCKVSNKALPAPIEKTISKAKGQPREPQVYTLPPSRDELTKNQVSLTCLVKGFYPSDIAVEWESNGQPENNYKTTPPVLDSDGSFFLYSKLTVDKSRWQQGNVFSCSVMHEALHNHYTQKSLSLSPGGGGSGSAHPIPDSSPLLQFGGQVRQRYLYTDDACQTEAHLEIREDGTVGGAADQSPESLLQLKALKPGVIQILGVKTSRFLCQRPDGALYGSLHFDPEACSFRELLLEDGYNVYQSEAHGLPLHLCGNKSPHRDPAPRGPARFLPLPGLPPAPPEPPGILAPQPPDVGSSDPLSMVYPSQGRSPSYAS

SEQ ID NO: 654 - protein, 473 aa, Artificial Sequence
  Fusion Protein
HGEGTFTSDLSKQLEEEAVRLFIEWLKAGGPSSGAPPPSGGGGGGGSGGGGSGGGGSAESKYGPPCPPCPAPEFEGGPSVFLFPPKPKDTLMISRTPEVTCVVVDVSQEDPEVQFNWYVDGVEVHNAKTKPREEQFNSTYRVVSVLTVLHQDWLNGKEYKCKVSNKGLPSSIEKTISKAKGQPREPQVYTLPPSQEEMTKNQVSLTCLVKGFYPSDIAVEWESNGQPENNYKTTPPVLDSDGSFFLYSRLTVDKSRWQEGNVFSCSVMHEALHNHYTQKSLSLSLGGGGSGSAHPIPDSSPLLQFGGQVRQRYLYTDDACQTEAHLEIREDGTVGGAADQSPESLLQLKALKPGVIQILGVKTSRFLCQRPDGALYGSLHFDPEACSFRELLLEDGYNVYQSEAHGLPLHLPGCKSPHRDPAPRGPARFLPLPGLPPAPPEPPGILAPQPPDVGSSDPLSMVGSQGRSPSYAS

SEQ ID NO: 655 - protein, 474 aa, Artificial Sequence
  Fusion Protein
HGEGTFTSDLSKQLEEEAVRLFIEWLKAGGPSSGAPPPSGGGGGGGSGGGGSGGGGSAESKYGPPCPPCPAPEFEGGPSVFLFPPKPKDTLMISRTPEVTCVVVDVSQEDPEVQFNWYVDGVEVHNAKTKPREEQFNSTYRVVSVLTVLHQDWLNGKEYKCKVSNKGLPSSIEKTISKAKGQPREPQVYTLPPSQEEMTKNQVSLTCLVKGFYPSDIAVEWESNGQPENNYKTTPPVLDSDGSFFLYSRLTVDKSRWQEGNVFSCSVMHEALHNHYTQKSLSLSLGGGGSGSAHPIPDSSPLLQFGGQVRQRYLYTDDACQTEAHLEIREDGTVGGAADQSPESLLQLKALKPGVIQILGVKTSRFLCQRPDGALYGSLHFDPEACSFRELLLEDGYNVYQSEAHGLPLHLPGCKSPHRDPAPRGPARFLPLPGLPPAPPEPPGILAPQPPDVGSSDPLSMVYPSQGRSPSYAS

SEQ ID NO: 656 - protein, 473 aa, Artificial Sequence
  Fusion Protein
HGEGTFTSDLSKQLEEEAVRLFIEWLKAGGPSSGAPPPSGGGGGGGSGGGGSGGGGSAESKYGPPCPPCPAPEFEGGPSVFLFPPKPKDTLMISRTPEVTCVVVDVSQEDPEVQFNWYVDGVEVHNAKTKPREEQFNSTYRVVSVLTVLHQDWLNGKEYKCKVSNKGLPSSIEKTISKAKGQPREPQVYTLPPSQEEMTKNQVSLTCLVKGFYPSDIAVEWESNGQPENNYKTTPPVLDSDGSFFLYSRLTVDKSRWQEGNVFSCSVMHEALHNHYTQKSLSLSLGGGGSGSAHPIPDSSPLLQFGGQVRQRYLYTDDACQTEAHLEIREDGTVGGAADQSPESLLQLKALKPGVIQILGVKTSRFLCQRPDGALYGSLHFDPEACSFRELLLEDGYNVYQSEAHGLPLHLCGNKSPHRDPAPRGPARFLPLPGLPPAPPEPPGILAPQPPDVGSSDPLSMVGSQGRSPSYAS

SEQ ID NO: 657 - protein, 474 aa, Artificial Sequence
  Fusion Protein
HGEGTFTSDLSKQLEEEAVRLFIEWLKAGGPSSGAPPPSGGGGGGGSGGGGSGGGGSAESKYGPPCPPCPAPEFEGGPSVFLFPPKPKDTLMISRTPEVTCVVVDVSQEDPEVQFNWYVDGVEVHNAKTKPREEQFNSTYRVVSVLTVLHQDWLNGKEYKCKVSNKGLPSSIEKTISKAKGQPREPQVYTLPPSQEEMTKNQVSLTCLVKGFYPSDIAVEWESNGQPENNYKTTPPVLDSDGSFFLYSRLTVDKSRWQEGNVFSCSVMHEALHNHYTQKSLSLSLGGGGSGSAHPIPDSSPLLQFGGQVRQRYLYTDDACQTEAHLEIREDGTVGGAADQSPESLLQLKALKPGVIQILGVKTSRFLCQRPDGALYGSLHFDPEACSFRELLLEDGYNVYQSEAHGLPLHLCGNKSPHRDPAPRGPARFLPLPGLPPAPPEPPGILAPQPPDVGSSDPLSMVYPSQGRSPSYAS

SEQ ID NO: 658 - protein, 471 aa, Artificial Sequence
  Fusion Protein
HGEGTFTSDLSKQLEEEAVRLFIEWLKATGPSSGAPPPSGGGGGGGSGGGGSGGGGSADKTHTCPPCPAPEAAGGPSVFLFPPKPKDTLMISRTPEVTCVVVDVSHEDPEVKFNWYVDGVEVHNAKTKPREEQYNSTYRVVSVLTVLHQDWLNGKEYKCKVSNKALPAPIEKTISKAKGQPREPQVYTLPPSRDELTKNQVSLTCLVKGFYPSDIAVEWESNGQPENNYKTTPPVLDSDGSFFLYSKLTVDKSRWQQGNVFSCSVMHEALHNHYTQKSLSLSPGGGGSGSAHPIPDSSPLLQFGGQVRQRYLYTDDACQTEAHLEIREDGTVGGAADQSPESLLQLKALKPGVIQILGVKTSRFLCQRPDGALYGSLHFDPEACSFRELLLEDGYNVYQSEAHGLPLHLPGCKSPHRDPAPRGPARFLPLPGLPPAPPEPPGILAPQPPDVGSSDPLSMVGSQGRSPSYAS

SEQ ID NO: 659 - protein, 472 aa, Artificial Sequence
  Fusion Protein
HGEGTFTSDLSKQLEEEAVRLFIEWLKATGPSSGAPPPSGGGGGGGSGGGGSGGGGSADKTHTCPPCPAPEAAGGPSVFLFPPKPKDTLMISRTPEVTCVVVDVSHEDPEVKFNWYVDGVEVHNAKTKPREEQYNSTYRVVSVLTVLHQDWLNGKEYKCKVSNKALPAPIEKTISKAKGQPREPQVYTLPPSRDELTKNQVSLTCLVKGFYPSDIAVEWESNGQPENNYKTTPPVLDSDGSFFLYSKLTVDKSRWQQGNVFSCSVMHEALHNHYTQKSLSLSPGGGGSGSAHPIPDSSPLLQFGGQVRQRYLYTDDACQTEAHLEIREDGTVGGAADQSPESLLQLKALKPGVIQILGVKTSRFLCQRPDGALYGSLHFDPEACSFRELLLEDGYNVYQSEAHGLPLHLPGCKSPHRDPAPRGPARFLPLPGLPPAPPEPPGILAPQPPDVGSSDPLSMVYPSQGRSPSYAS

SEQ ID NO: 660 - protein, 471 aa, Artificial Sequence
  Fusion Protein
HGEGTFTSDLSKQLEEEAVRLFIEWLKATGPSSGAPPPSGGGGGGGSGGGGSGGGGSADKTHTCPPCPAPEAAGGPSVFLFPPKPKDTLMISRTPEVTCVVVDVSHEDPEVKFNWYVDGVEVHNAKTKPREEQYNSTYRVVSVLTVLHQDWLNGKEYKCKVSNKALPAPIEKTISKAKGQPREPQVYTLPPSRDELTKNQVSLTCLVKGFYPSDIAVEWESNGQPENNYKTTPPVLDSDGSFFLYSKLTVDKSRWQQGNVFSCSVMHEALHNHYTQKSLSLSPGGGGSGSAHPIPDSSPLLQFGGQVRQRYLYTDDACQTEAHLEIREDGTVGGAADQSPESLLQLKALKPGVIQILGVKTSRFLCQRPDGALYGSLHFDPEACSFRELLLEDGYNVYQSEAHGLPLHLCGNKSPHRDPAPRGPARFLPLPGLPPAPPEPPGILAPQPPDVGSSDPLSMVGSQGRSPSYAS

SEQ ID NO: 661 - protein, 472 aa, Artificial Sequence
  Fusion Protein
HGEGTFTSDLSKQLEEEAVRLFIEWLKATGPSSGAPPPSGGGGGGGSGGGGSGGGGSADKTHTCPPCPAPEAAGGPSVFLFPPKPKDTLMISRTPEVTCVVVDVSHEDPEVKFNWYVDGVEVHNAKTKPREEQYNSTYRVVSVLTVLHQDWLNGKEYKCKVSNKALPAPIEKTISKAKGQPREPQVYTLPPSRDELTKNQVSLTCLVKGFYPSDIAVEWESNGQPENNYKTTPPVLDSDGSFFLYSKLTVDKSRWQQGNVFSCSVMHEALHNHYTQKSLSLSPGGGGSGSAHPIPDSSPLLQFGGQVRQRYLYTDDACQTEAHLEIREDGTVGGAADQSPESLLQLKALKPGVIQILGVKTSRFLCQRPDGALYGSLHFDPEACSFRELLLEDGYNVYQSEAHGLPLHLCGNKSPHRDPAPRGPARFLPLPGLPPAPPEPPGILAPQPPDVGSSDPLSMVYPSQGRSPSYAS

SEQ ID NO: 662 - protein, 471 aa, Artificial Sequence
  Fusion Protein
HGEGTFTSDLSKQLEEEAVRLFIEWLKATGPSSGAPPPSGGGGGGGSGGGGSGGGGSADKTHTCPPCPAPELLGGPSVFLFPPKPKDTLMISRTPEVTCVVVDVSHEDPEVKFNWYVDGVEVHNAKTKPREEQYNNASRVVSVLTVLHQDWLNGKEYKCKVSNKALPAPIEKTISKAKGQPREPQVYTLPPSRDELTKNQVSLTCLVKGFYPSDIAVEWESNGQPENNYKTTPPVLDSDGSFFLYSKLTVDKSRWQQGNVFSCSVMHEALHNHYTQKSLSLSPGGGGSGSAHPIPDSSPLLQFGGQVRQRYLYTDDACQTEAHLEIREDGTVGGAADQSPESLLQLKALKPGVIQILGVKTSRFLCQRPDGALYGSLHFDPEACSFRELLLEDGYNVYQSEAHGLPLHLPGCKSPHRDPAPRGPARFLPLPGLPPAPPEPPGILAPQPPDVGSSDPLSMVGSQGRSPSYAS

SEQ ID NO: 663 - protein, 472 aa, Artificial Sequence
  Fusion Protein
HGEGTFTSDLSKQLEEEAVRLFIEWLKATGPSSGAPPPSGGGGGGGSGGGGSGGGGSADKTHTCPPCPAPELLGGPSVFLFPPKPKDTLMISRTPEVTCVVVDVSHEDPEVKFNWYVDGVEVHNAKTKPREEQYNNASRVVSVLTVLHQDWLNGKEYKCKVSNKALPAPIEKTISKAKGQPREPQVYTLPPSRDELTKNQVSLTCLVKGFYPSDIAVEWESNGQPENNYKTTPPVLDSDGSFFLYSKLTVDKSRWQQGNVFSCSVMHEALHNHYTQKSLSLSPGGGGSGSAHPIPDSSPLLQFGGQVRQRYLYTDDACQTEAHLEIREDGTVGGAADQSPESLLQLKALKPGVIQILGVKTSRFLCQRPDGALYGSLHFDPEACSFRELLLEDGYNVYQSEAHGLPLHLPGCKSPHRDPAPRGPARFLPLPGLPPAPPEPPGILAPQPPDVGSSDPLSMVYPSQGRSPSYAS

SEQ ID NO: 664 - protein, 471 aa, Artificial Sequence
  Fusion Protein
HGEGTFTSDLSKQLEEEAVRLFIEWLKATGPSSGAPPPSGGGGGGGSGGGGSGGGGSADKTHTCPPCPAPELLGGPSVFLFPPKPKDTLMISRTPEVTCVVVDVSHEDPEVKFNWYVDGVEVHNAKTKPREEQYNNASRVVSVLTVLHQDWLNGKEYKCKVSNKALPAPIEKTISKAKGQPREPQVYTLPPSRDELTKNQVSLTCLVKGFYPSDIAVEWESNGQPENNYKTTPPVLDSDGSFFLYSKLTVDKSRWQQGNVFSCSVMHEALHNHYTQKSLSLSPGGGGSGSAHPIPDSSPLLQFGGQVRQRYLYTDDACQTEAHLEIREDGTVGGAADQSPESLLQLKALKPGVIQILGVKTSRFLCQRPDGALYGSLHFDPEACSFRELLLEDGYNVYQSEAHGLPLHLCGNKSPHRDPAPRGPARFLPLPGLPPAPPEPPGILAPQPPDVGSSDPLSMVGSQGRSPSYAS

SEQ ID NO: 665 - protein, 472 aa, Artificial Sequence
  Fusion Protein
HGEGTFTSDLSKQLEEEAVRLFIEWLKATGPSSGAPPPSGGGGGGGSGGGGSGGGGSADKTHTCPPCPAPELLGGPSVFLFPPKPKDTLMISRTPEVTCVVVDVSHEDPEVKFNWYVDGVEVHNAKTKPREEQYNNASRVVSVLTVLHQDWLNGKEYKCKVSNKALPAPIEKTISKAKGQPREPQVYTLPPSRDELTKNQVSLTCLVKGFYPSDIAVEWESNGQPENNYKTTPPVLDSDGSFFLYSKLTVDKSRWQQGNVFSCSVMHEALHNHYTQKSLSLSPGGGGSGSAHPIPDSSPLLQFGGQVRQRYLYTDDACQTEAHLEIREDGTVGGAADQSPESLLQLKALKPGVIQILGVKTSRFLCQRPDGALYGSLHFDPEACSFRELLLEDGYNVYQSEAHGLPLHLCGNKSPHRDPAPRGPARFLPLPGLPPAPPEPPGILAPQPPDVGSSDPLSMVYPSQGRSPSYAS

SEQ ID NO: 666 - protein, 473 aa, Artificial Sequence
  Fusion Protein
HGEGTFTSDLSKQLEEEAVRLFIEWLKATGPSSGAPPPSGGGGGGGSGGGGSGGGGSAESKYGPPCPPCPAPEFEGGPSVFLFPPKPKDTLMISRTPEVTCVVVDVSQEDPEVQFNWYVDGVEVHNAKTKPREEQFNSTYRVVSVLTVLHQDWLNGKEYKCKVSNKGLPSSIEKTISKAKGQPREPQVYTLPPSQEEMTKNQVSLTCLVKGFYPSDIAVEWESNGQPENNYKTTPPVLDSDGSFFLYSRLTVDKSRWQEGNVFSCSVMHEALHNHYTQKSLSLSLGGGGSGSAHPIPDSSPLLQFGGQVRQRYLYTDDACQTEAHLEIREDGTVGGAADQSPESLLQLKALKPGVIQILGVKTSRFLCQRPDGALYGSLHFDPEACSFRELLLEDGYNVYQSEAHGLPLHLPGCKSPHRDPAPRGPARFLPLPGLPPAPPEPPGILAPQPPDVGSSDPLSMVGSQGRSPSYAS

SEQ ID NO: 667 - protein, 474 aa, Artificial Sequence
  Fusion Protein
HGEGTFTSDLSKQLEEEAVRLFIEWLKATGPSSGAPPPSGGGGGGGSGGGGSGGGGSAESKYGPPCPPCPAPEFEGGPSVFLFPPKPKDTLMISRTPEVTCVVVDVSQEDPEVQFNWYVDGVEVHNAKTKPREEQFNSTYRVVSVLTVLHQDWLNGKEYKCKVSNKGLPSSIEKTISKAKGQPREPQVYTLPPSQEEMTKNQVSLTCLVKGFYPSDIAVEWESNGQPENNYKTTPPVLDSDGSFFLYSRLTVDKSRWQEGNVFSCSVMHEALHNHYTQKSLSLSLGGGGSGSAHPIPDSSPLLQFGGQVRQRYLYTDDACQTEAHLEIREDGTVGGAADQSPESLLQLKALKPGVIQILGVKTSRFLCQRPDGALYGSLHFDPEACSFRELLLEDGYNVYQSEAHGLPLHLPGCKSPHRDPAPRGPARFLPLPGLPPAPPEPPGILAPQPPDVGSSDPLSMVYPSQGRSPSYAS

SEQ ID NO: 668 - protein, 473 aa, Artificial Sequence
  Fusion Protein
HGEGTFTSDLSKQLEEEAVRLFIEWLKATGPSSGAPPPSGGGGGGGSGGGGSGGGGSAESKYGPPCPPCPAPEFEGGPSVFLFPPKPKDTLMISRTPEVTCVVVDVSQEDPEVQFNWYVDGVEVHNAKTKPREEQFNSTYRVVSVLTVLHQDWLNGKEYKCKVSNKGLPSSIEKTISKAKGQPREPQVYTLPPSQEEMTKNQVSLTCLVKGFYPSDIAVEWESNGQPENNYKTTPPVLDSDGSFFLYSRLTVDKSRWQEGNVFSCSVMHEALHNHYTQKSLSLSLGGGGSGSAHPIPDSSPLLQFGGQVRQRYLYTDDACQTEAHLEIREDGTVGGAADQSPESLLQLKALKPGVIQILGVKTSRFLCQRPDGALYGSLHFDPEACSFRELLLEDGYNVYQSEAHGLPLHLCGNKSPHRDPAPRGPARFLPLPGLPPAPPEPPGILAPQPPDVGSSDPLSMVGSQGRSPSYAS

SEQ ID NO: 669 - protein, 474 aa, Artificial Sequence
  Fusion Protein
HGEGTFTSDLSKQLEEEAVRLFIEWLKATGPSSGAPPPSGGGGGGGSGGGGSGGGGSAESKYGPPCPPCPAPEFEGGPSVFLFPPKPKDTLMISRTPEVTCVVVDVSQEDPEVQFNWYVDGVEVHNAKTKPREEQFNSTYRVVSVLTVLHQDWLNGKEYKCKVSNKGLPSSIEKTISKAKGQPREPQVYTLPPSQEEMTKNQVSLTCLVKGFYPSDIAVEWESNGQPENNYKTTPPVLDSDGSFFLYSRLTVDKSRWQEGNVFSCSVMHEALHNHYTQKSLSLSLGGGGSGSAHPIPDSSPLLQFGGQVRQRYLYTDDACQTEAHLEIREDGTVGGAADQSPESLLQLKALKPGVIQILGVKTSRFLCQRPDGALYGSLHFDPEACSFRELLLEDGYNVYQSEAHGLPLHLCGNKSPHRDPAPRGPARFLPLPGLPPAPPEPPGILAPQPPDVGSSDPLSMVYPSQGRSPSYAS

SEQ ID NO: 670 - protein, 471 aa, Artificial Sequence
  Fusion Protein
HGEGTFTSDLSKQLEEEAVQLFIEWLKATGPSSGAPPPSGGGGGGGSGGGGSGGGGSADKTHTCPPCPAPEAAGGPSVFLFPPKPKDTLMISRTPEVTCVVVDVSHEDPEVKFNWYVDGVEVHNAKTKPREEQYNSTYRVVSVLTVLHQDWLNGKEYKCKVSNKALPAPIEKTISKAKGQPREPQVYTLPPSRDELTKNQVSLTCLVKGFYPSDIAVEWESNGQPENNYKTTPPVLDSDGSFFLYSKLTVDKSRWQQGNVFSCSVMHEALHNHYTQKSLSLSPGGGGSGSAHPIPDSSPLLQFGGQVRQRYLYTDDACQTEAHLEIREDGTVGGAADQSPESLLQLKALKPGVIQILGVKTSRFLCQRPDGALYGSLHFDPEACSFRELLLEDGYNVYQSEAHGLPLHLPGCKSPHRDPAPRGPARFLPLPGLPPAPPEPPGILAPQPPDVGSSDPLSMVGSQGRSPSYAS

SEQ ID NO: 671 - protein, 472 aa, Artificial Sequence
  Fusion Protein
HGEGTFTSDLSKQLEEEAVQLFIEWLKATGPSSGAPPPSGGGGGGGSGGGGSGGGGSADKTHTCPPCPAPEAAGGPSVFLFPPKPKDTLMISRTPEVTCVVVDVSHEDPEVKFNWYVDGVEVHNAKTKPREEQYNSTYRVVSVLTVLHQDWLNGKEYKCKVSNKALPAPIEKTISKAKGQPREPQVYTLPPSRDELTKNQVSLTCLVKGFYPSDIAVEWESNGQPENNYKTTPPVLDSDGSFFLYSKLTVDKSRWQQGNVFSCSVMHEALHNHYTQKSLSLSPGGGGSGSAHPIPDSSPLLQFGGQVRQRYLYTDDACQTEAHLEIREDGTVGGAADQSPESLLQLKALKPGVIQILGVKTSRFLCQRPDGALYGSLHFDPEACSFRELLLEDGYNVYQSEAHGLPLHLPGCKSPHRDPAPRGPARFLPLPGLPPAPPEPPGILAPQPPDVGSSDPLSMVYPSQGRSPSYAS

SEQ ID NO: 672 - protein, 471 aa, Artificial Sequence
  Fusion Protein
HGEGTFTSDLSKQLEEEAVQLFIEWLKATGPSSGAPPPSGGGGGGGSGGGGSGGGGSADKTHTCPPCPAPEAAGGPSVFLFPPKPKDTLMISRTPEVTCVVVDVSHEDPEVKFNWYVDGVEVHNAKTKPREEQYNSTYRVVSVLTVLHQDWLNGKEYKCKVSNKALPAPIEKTISKAKGQPREPQVYTLPPSRDELTKNQVSLTCLVKGFYPSDIAVEWESNGQPENNYKTTPPVLDSDGSFFLYSKLTVDKSRWQQGNVFSCSVMHEALHNHYTQKSLSLSPGGGGSGSAHPIPDSSPLLQFGGQVRQRYLYTDDACQTEAHLEIREDGTVGGAADQSPESLLQLKALKPGVIQILGVKTSRFLCQRPDGALYGSLHFDPEACSFRELLLEDGYNVYQSEAHGLPLHLCGNKSPHRDPAPRGPARFLPLPGLPPAPPEPPGILAPQPPDVGSSDPLSMVGSQGRSPSYAS

SEQ ID NO: 673 - protein, 472 aa, Artificial Sequence
  Fusion Protein
HGEGTFTSDLSKQLEEEAVQLFIEWLKATGPSSGAPPPSGGGGGGGSGGGGSGGGGSADKTHTCPPCPAPEAAGGPSVFLFPPKPKDTLMISRTPEVTCVVVDVSHEDPEVKFNWYVDGVEVHNAKTKPREEQYNSTYRVVSVLTVLHQDWLNGKEYKCKVSNKALPAPIEKTISKAKGQPREPQVYTLPPSRDELTKNQVSLTCLVKGFYPSDIAVEWESNGQPENNYKTTPPVLDSDGSFFLYSKLTVDKSRWQQGNVFSCSVMHEALHNHYTQKSLSLSPGGGGSGSAHPIPDSSPLLQFGGQVRQRYLYTDDACQTEAHLEIREDGTVGGAADQSPESLLQLKALKPGVIQILGVKTSRFLCQRPDGALYGSLHFDPEACSFRELLLEDGYNVYQSEAHGLPLHLCGNKSPHRDPAPRGPARFLPLPGLPPAPPEPPGILAPQPPDVGSSDPLSMVYPSQGRSPSYAS

SEQ ID NO: 674 - protein, 471 aa, Artificial Sequence
  Fusion Protein
HGEGTFTSDLSKQLEEEAVQLFIEWLKATGPSSGAPPPSGGGGGGGSGGGGSGGGGSADKTHTCPPCPAPELLGGPSVFLFPPKPKDTLMISRTPEVTCVVVDVSHEDPEVKFNWYVDGVEVHNAKTKPREEQYNNASRVVSVLTVLHQDWLNGKEYKCKVSNKALPAPIEKTISKAKGQPREPQVYTLPPSRDELTKNQVSLTCLVKGFYPSDIAVEWESNGQPENNYKTTPPVLDSDGSFFLYSKLTVDKSRWQQGNVFSCSVMHEALHNHYTQKSLSLSPGGGGSGSAHPIPDSSPLLQFGGQVRQRYLYTDDACQTEAHLEIREDGTVGGAADQSPESLLQLKALKPGVIQILGVKTSRFLCQRPDGALYGSLHFDPEACSFRELLLEDGYNVYQSEAHGLPLHLPGCKSPHRDPAPRGPARFLPLPGLPPAPPEPPGILAPQPPDVGSSDPLSMVGSQGRSPSYAS

SEQ ID NO: 675 - protein, 472 aa, Artificial Sequence
  Fusion Protein
HGEGTFTSDLSKQLEEEAVQLFIEWLKATGPSSGAPPPSGGGGGGGSGGGGSGGGGSADKTHTCPPCPAPELLGGPSVFLFPPKPKDTLMISRTPEVTCVVVDVSHEDPEVKFNWYVDGVEVHNAKTKPREEQYNNASRVVSVLTVLHQDWLNGKEYKCKVSNKALPAPIEKTISKAKGQPREPQVYTLPPSRDELTKNQVSLTCLVKGFYPSDIAVEWESNGQPENNYKTTPPVLDSDGSFFLYSKLTVDKSRWQQGNVFSCSVMHEALHNHYTQKSLSLSPGGGGSGSAHPIPDSSPLLQFGGQVRQRYLYTDDACQTEAHLEIREDGTVGGAADQSPESLLQLKALKPGVIQILGVKTSRFLCQRPDGALYGSLHFDPEACSFRELLLEDGYNVYQSEAHGLPLHLPGCKSPHRDPAPRGPARFLPLPGLPPAPPEPPGILAPQPPDVGSSDPLSMVYPSQGRSPSYAS

SEQ ID NO: 676 - protein, 471 aa, Artificial Sequence
  Fusion Protein
HGEGTFTSDLSKQLEEEAVQLFIEWLKATGPSSGAPPPSGGGGGGGSGGGGSGGGGSADKTHTCPPCPAPELLGGPSVFLFPPKPKDTLMISRTPEVTCVVVDVSHEDPEVKFNWYVDGVEVHNAKTKPREEQYNNASRVVSVLTVLHQDWLNGKEYKCKVSNKALPAPIEKTISKAKGQPREPQVYTLPPSRDELTKNQVSLTCLVKGFYPSDIAVEWESNGQPENNYKTTPPVLDSDGSFFLYSKLTVDKSRWQQGNVFSCSVMHEALHNHYTQKSLSLSPGGGGSGSAHPIPDSSPLLQFGGQVRQRYLYTDDACQTEAHLEIREDGTVGGAADQSPESLLQLKALKPGVIQILGVKTSRFLCQRPDGALYGSLHFDPEACSFRELLLEDGYNVYQSEAHGLPLHLCGNKSPHRDPAPRGPARFLPLPGLPPAPPEPPGILAPQPPDVGSSDPLSMVGSQGRSPSYAS

SEQ ID NO: 677 - protein, 472 aa, Artificial Sequence
  Fusion Protein
HGEGTFTSDLSKQLEEEAVQLFIEWLKATGPSSGAPPPSGGGGGGGSGGGGSGGGGSADKTHTCPPCPAPELLGGPSVFLFPPKPKDTLMISRTPEVTCVVVDVSHEDPEVKFNWYVDGVEVHNAKTKPREEQYNNASRVVSVLTVLHQDWLNGKEYKCKVSNKALPAPIEKTISKAKGQPREPQVYTLPPSRDELTKNQVSLTCLVKGFYPSDIAVEWESNGQPENNYKTTPPVLDSDGSFFLYSKLTVDKSRWQQGNVFSCSVMHEALHNHYTQKSLSLSPGGGGSGSAHPIPDSSPLLQFGGQVRQRYLYTDDACQTEAHLEIREDGTVGGAADQSPESLLQLKALKPGVIQILGVKTSRFLCQRPDGALYGSLHFDPEACSFRELLLEDGYNVYQSEAHGLPLHLCGNKSPHRDPAPRGPARFLPLPGLPPAPPEPPGILAPQPPDVGSSDPLSMVYPSQGRSPSYAS

SEQ ID NO: 678 - protein, 473 aa, Artificial Sequence
  Fusion Protein
HGEGTFTSDLSKQLEEEAVQLFIEWLKATGPSSGAPPPSGGGGGGGSGGGGSGGGGSAESKYGPPCPPCPAPEFEGGPSVFLFPPKPKDTLMISRTPEVTCVVVDVSQEDPEVQFNWYVDGVEVHNAKTKPREEQFNSTYRVVSVLTVLHQDWLNGKEYKCKVSNKGLPSSIEKTISKAKGQPREPQVYTLPPSQEEMTKNQVSLTCLVKGFYPSDIAVEWESNGQPENNYKTTPPVLDSDGSFFLYSRLTVDKSRWQEGNVFSCSVMHEALHNHYTQKSLSLSLGGGGSGSAHPIPDSSPLLQFGGQVRQRYLYTDDACQTEAHLEIREDGTVGGAADQSPESLLQLKALKPGVIQILGVKTSRFLCQRPDGALYGSLHFDPEACSFRELLLEDGYNVYQSEAHGLPLHLPGCKSPHRDPAPRGPARFLPLPGLPPAPPEPPGILAPQPPDVGSSDPLSMVGSQGRSPSYAS

SEQ ID NO: 679 - protein, 474 aa, Artificial Sequence
  Fusion Protein
HGEGTFTSDLSKQLEEEAVQLFIEWLKATGPSSGAPPPSGGGGGGGSGGGGSGGGGSAESKYGPPCPPCPAPEFEGGPSVFLFPPKPKDTLMISRTPEVTCVVVDVSQEDPEVQFNWYVDGVEVHNAKTKPREEQFNSTYRVVSVLTVLHQDWLNGKEYKCKVSNKGLPSSIEKTISKAKGQPREPQVYTLPPSQEEMTKNQVSLTCLVKGFYPSDIAVEWESNGQPENNYKTTPPVLDSDGSFFLYSRLTVDKSRWQEGNVFSCSVMHEALHNHYTQKSLSLSLGGGGSGSAHPIPDSSPLLQFGGQVRQRYLYTDDACQTEAHLEIREDGTVGGAADQSPESLLQLKALKPGVIQILGVKTSRFLCQRPDGALYGSLHFDPEACSFRELLLEDGYNVYQSEAHGLPLHLPGCKSPHRDPAPRGPARFLPLPGLPPAPPEPPGILAPQPPDVGSSDPLSMVYPSQGRSPSYAS

SEQ ID NO: 680 - protein, 473 aa, Artificial Sequence
  Fusion Protein
HGEGTFTSDLSKQLEEEAVQLFIEWLKATGPSSGAPPPSGGGGGGGSGGGGSGGGGSAESKYGPPCPPCPAPEFEGGPSVFLFPPKPKDTLMISRTPEVTCVVVDVSQEDPEVQFNWYVDGVEVHNAKTKPREEQFNSTYRVVSVLTVLHQDWLNGKEYKCKVSNKGLPSSIEKTISKAKGQPREPQVYTLPPSQEEMTKNQVSLTCLVKGFYPSDIAVEWESNGQPENNYKTTPPVLDSDGSFFLYSRLTVDKSRWQEGNVFSCSVMHEALHNHYTQKSLSLSLGGGGSGSAHPIPDSSPLLQFGGQVRQRYLYTDDACQTEAHLEIREDGTVGGAADQSPESLLQLKALKPGVIQILGVKTSRFLCQRPDGALYGSLHFDPEACSFRELLLEDGYNVYQSEAHGLPLHLCGNKSPHRDPAPRGPARFLPLPGLPPAPPEPPGILAPQPPDVGSSDPLSMVGSQGRSPSYAS

SEQ ID NO: 681 - protein, 474 aa, Artificial Sequence
  Fusion Protein
HGEGTFTSDLSKQLEEEAVQLFIEWLKATGPSSGAPPPSGGGGGGGSGGGGSGGGGSAESKYGPPCPPCPAPEFEGGPSVFLFPPKPKDTLMISRTPEVTCVVVDVSQEDPEVQFNWYVDGVEVHNAKTKPREEQFNSTYRVVSVLTVLHQDWLNGKEYKCKVSNKGLPSSIEKTISKAKGQPREPQVYTLPPSQEEMTKNQVSLTCLVKGFYPSDIAVEWESNGQPENNYKTTPPVLDSDGSFFLYSRLTVDKSRWQEGNVFSCSVMHEALHNHYTQKSLSLSLGGGGSGSAHPIPDSSPLLQFGGQVRQRYLYTDDACQTEAHLEIREDGTVGGAADQSPESLLQLKALKPGVIQILGVKTSRFLCQRPDGALYGSLHFDPEACSFRELLLEDGYNVYQSEAHGLPLHLCGNKSPHRDPAPRGPARFLPLPGLPPAPPEPPGILAPQPPDVGSSDPLSMVYPSQGRSPSYAS

SEQ ID NO: 682 - protein, 471 aa, Artificial Sequence
  Fusion Protein
HGEGTFTSDLSKQLEEERVQLFIEWLKATGPSSGAPPPSGGGGGGGSGGGGSGGGGSADKTHTCPPCPAPELLGGPSVFLFPPKPKDTLMISRTPEVTCVVVDVSHEDPEVKFNWYVDGVEVHNAKTKPREEQYNNASRVVSVLTVLHQDWLNGKEYKCKVSNKALPAPIEKTISKAKGQPREPQVYTLPPSRDELTKNQVSLTCLVKGFYPSDIAVEWESNGQPENNYKTTPPVLDSDGSFFLYSKLTVDKSRWQQGNVFSCSVMHEALHNHYTQKSLSLSPGGGGSGSAHPIPDSSPLLQFGGQVRQRYLYTDDACQTEAHLEIREDGTVGGAADQSPESLLQLKALKPGVIQILGVKTSRFLCQRPDGALYGSLHFDPEACSFRELLLEDGYNVYQSEAHGLPLHLPGCKSPHRDPAPRGPARFLPLPGLPPAPPEPPGILAPQPPDVGSSDPLSMVGSQGRSPSYAS

SEQ ID NO: 683 - protein, 472 aa, Artificial Sequence
  Fusion Protein
HGEGTFTSDLSKQLEEERVQLFIEWLKATGPSSGAPPPSGGGGGGGSGGGGSGGGGSADKTHTCPPCPAPELLGGPSVFLFPPKPKDTLMISRTPEVTCVVVDVSHEDPEVKFNWYVDGVEVHNAKTKPREEQYNNASRVVSVLTVLHQDWLNGKEYKCKVSNKALPAPIEKTISKAKGQPREPQVYTLPPSRDELTKNQVSLTCLVKGFYPSDIAVEWESNGQPENNYKTTPPVLDSDGSFFLYSKLTVDKSRWQQGNVFSCSVMHEALHNHYTQKSLSLSPGGGGSGSAHPIPDSSPLLQFGGQVRQRYLYTDDACQTEAHLEIREDGTVGGAADQSPESLLQLKALKPGVIQILGVKTSRFLCQRPDGALYGSLHFDPEACSFRELLLEDGYNVYQSEAHGLPLHLPGCKSPHRDPAPRGPARFLPLPGLPPAPPEPPGILAPQPPDVGSSDPLSMVYPSQGRSPSYAS

SEQ ID NO: 684 - protein, 471 aa, Artificial Sequence
  Fusion Protein
HGEGTFTSDLSKQLEEERVQLFIEWLKATGPSSGAPPPSGGGGGGGSGGGGSGGGGSADKTHTCPPCPAPELLGGPSVFLFPPKPKDTLMISRTPEVTCVVVDVSHEDPEVKFNWYVDGVEVHNAKTKPREEQYNNASRVVSVLTVLHQDWLNGKEYKCKVSNKALPAPIEKTISKAKGQPREPQVYTLPPSRDELTKNQVSLTCLVKGFYPSDIAVEWESNGQPENNYKTTPPVLDSDGSFFLYSKLTVDKSRWQQGNVFSCSVMHEALHNHYTQKSLSLSPGGGGSGSAHPIPDSSPLLQFGGQVRQRYLYTDDACQTEAHLEIREDGTVGGAADQSPESLLQLKALKPGVIQILGVKTSRFLCQRPDGALYGSLHFDPEACSFRELLLEDGYNVYQSEAHGLPLHLCGNKSPHRDPAPRGPARFLPLPGLPPAPPEPPGILAPQPPDVGSSDPLSMVGSQGRSPSYAS

SEQ ID NO: 685 - protein, 472 aa, Artificial Sequence
  Fusion Protein
HGEGTFTSDLSKQLEEERVQLFIEWLKATGPSSGAPPPSGGGGGGGSGGGGSGGGGSADKTHTCPPCPAPELLGGPSVFLFPPKPKDTLMISRTPEVTCVVVDVSHEDPEVKFNWYVDGVEVHNAKTKPREEQYNNASRVVSVLTVLHQDWLNGKEYKCKVSNKALPAPIEKTISKAKGQPREPQVYTLPPSRDELTKNQVSLTCLVKGFYPSDIAVEWESNGQPENNYKTTPPVLDSDGSFFLYSKLTVDKSRWQQGNVFSCSVMHEALHNHYTQKSLSLSPGGGGSGSAHPIPDSSPLLQFGGQVRQRYLYTDDACQTEAHLEIREDGTVGGAADQSPESLLQLKALKPGVIQILGVKTSRFLCQRPDGALYGSLHFDPEACSFRELLLEDGYNVYQSEAHGLPLHLCGNKSPHRDPAPRGPARFLPLPGLPPAPPEPPGILAPQPPDVGSSDPLSMVYPSQGRSPSYAS

SEQ ID NO: 686 - protein, 471 aa, Artificial Sequence
  Fusion Protein
HGEGTFTSDLSKQLEEEAVQEFIEWLKAGGPSSGAPPPSGGGGGGGSGGGGSGGGGSADKTHTCPPCPAPEAAGGPSVFLFPPKPKDTLMISRTPEVTCVVVDVSHEDPEVKFNWYVDGVEVHNAKTKPREEQYNSTYRVVSVLTVLHQDWLNGKEYKCKVSNKALPAPIEKTISKAKGQPREPQVYTLPPSRDELTKNQVSLTCLVKGFYPSDIAVEWESNGQPENNYKTTPPVLDSDGSFFLYSKLTVDKSRWQQGNVFSCSVMHEALHNHYTQKSLSLSPGGGGSGSAHPIPDSSPLLQFGGQVRQRYLYTDDACQTEAHLEIREDGTVGGAADQSPESLLQLKALKPGVIQILGVKTSRFLCQRPDGALYGSLHFDPEACSFRELLLEDGYNVYQSEAHGLPLHLPGCKSPHRDPAPRGPARFLPLPGLPPAPPEPPGILAPQPPDVGSSDPLSMVGSQGRSPSYAS

SEQ ID NO: 687 - protein, 472 aa, Artificial Sequence
  Fusion Protein
HGEGTFTSDLSKQLEEEAVQEFIEWLKAGGPSSGAPPPSGGGGGGGSGGGGSGGGGSADKTHTCPPCPAPEAAGGPSVFLFPPKPKDTLMISRTPEVTCVVVDVSHEDPEVKFNWYVDGVEVHNAKTKPREEQYNSTYRVVSVLTVLHQDWLNGKEYKCKVSNKALPAPIEKTISKAKGQPREPQVYTLPPSRDELTKNQVSLTCLVKGFYPSDIAVEWESNGQPENNYKTTPPVLDSDGSFFLYSKLTVDKSRWQQGNVFSCSVMHEALHNHYTQKSLSLSPGGGGSGSAHPIPDSSPLLQFGGQVRQRYLYTDDACQTEAHLEIREDGTVGGAADQSPESLLQLKALKPGVIQILGVKTSRFLCQRPDGALYGSLHFDPEACSFRELLLEDGYNVYQSEAHGLPLHLPGCKSPHRDPAPRGPARFLPLPGLPPAPPEPPGILAPQPPDVGSSDPLSMVYPSQGRSPSYAS

SEQ ID NO: 688 - protein, 471 aa, Artificial Sequence
  Fusion Protein
HGEGTFTSDLSKQLEEEAVQEFIEWLKAGGPSSGAPPPSGGGGGGGSGGGGSGGGGSADKTHTCPPCPAPEAAGGPSVFLFPPKPKDTLMISRTPEVTCVVVDVSHEDPEVKFNWYVDGVEVHNAKTKPREEQYNSTYRVVSVLTVLHQDWLNGKEYKCKVSNKALPAPIEKTISKAKGQPREPQVYTLPPSRDELTKNQVSLTCLVKGFYPSDIAVEWESNGQPENNYKTTPPVLDSDGSFFLYSKLTVDKSRWQQGNVFSCSVMHEALHNHYTQKSLSLSPGGGGSGSAHPIPDSSPLLQFGGQVRQRYLYTDDACQTEAHLEIREDGTVGGAADQSPESLLQLKALKPGVIQILGVKTSRFLCQRPDGALYGSLHFDPEACSFRELLLEDGYNVYQSEAHGLPLHLCGNKSPHRDPAPRGPARFLPLPGLPPAPPEPPGILAPQPPDVGSSDPLSMVGSQGRSPSYAS

SEQ ID NO: 689 - protein, 472 aa, Artificial Sequence
  Fusion Protein
HGEGTFTSDLSKQLEEEAVQEFIEWLKAGGPSSGAPPPSGGGGGGGSGGGGSGGGGSADKTHTCPPCPAPEAAGGPSVFLFPPKPKDTLMISRTPEVTCVVVDVSHEDPEVKFNWYVDGVEVHNAKTKPREEQYNSTYRVVSVLTVLHQDWLNGKEYKCKVSNKALPAPIEKTISKAKGQPREPQVYTLPPSRDELTKNQVSLTCLVKGFYPSDIAVEWESNGQPENNYKTTPPVLDSDGSFFLYSKLTVDKSRWQQGNVFSCSVMHEALHNHYTQKSLSLSPGGGGSGSAHPIPDSSPLLQFGGQVRQRYLYTDDACQTEAHLEIREDGTVGGAADQSPESLLQLKALKPGVIQILGVKTSRFLCQRPDGALYGSLHFDPEACSFRELLLEDGYNVYQSEAHGLPLHLCGNKSPHRDPAPRGPARFLPLPGLPPAPPEPPGILAPQPPDVGSSDPLSMVYPSQGRSPSYAS

SEQ ID NO: 690 - protein, 471 aa, Artificial Sequence
  Fusion Protein
HGEGTFTSDLSKQLEEEAVQEFIEWLKAGGPSSGAPPPSGGGGGGGSGGGGSGGGGSADKTHTCPPCPAPELLGGPSVFLFPPKPKDTLMISRTPEVTCVVVDVSHEDPEVKFNWYVDGVEVHNAKTKPREEQYNNASRVVSVLTVLHQDWLNGKEYKCKVSNKALPAPIEKTISKAKGQPREPQVYTLPPSRDELTKNQVSLTCLVKGFYPSDIAVEWESNGQPENNYKTTPPVLDSDGSFFLYSKLTVDKSRWQQGNVFSCSVMHEALHNHYTQKSLSLSPGGGGSGSAHPIPDSSPLLQFGGQVRQRYLYTDDACQTEAHLEIREDGTVGGAADQSPESLLQLKALKPGVIQILGVKTSRFLCQRPDGALYGSLHFDPEACSFRELLLEDGYNVYQSEAHGLPLHLPGCKSPHRDPAPRGPARFLPLPGLPPAPPEPPGILAPQPPDVGSSDPLSMVGSQGRSPSYAS

SEQ ID NO: 691 - protein, 472 aa, Artificial Sequence
  Fusion Protein
HGEGTFTSDLSKQLEEEAVQEFIEWLKAGGPSSGAPPPSGGGGGGGSGGGGSGGGGSADKTHTCPPCPAPELLGGPSVFLFPPKPKDTLMISRTPEVTCVVVDVSHEDPEVKFNWYVDGVEVHNAKTKPREEQYNNASRVVSVLTVLHQDWLNGKEYKCKVSNKALPAPIEKTISKAKGQPREPQVYTLPPSRDELTKNQVSLTCLVKGFYPSDIAVEWESNGQPENNYKTTPPVLDSDGSFFLYSKLTVDKSRWQQGNVFSCSVMHEALHNHYTQKSLSLSPGGGGSGSAHPIPDSSPLLQFGGQVRQRYLYTDDACQTEAHLEIREDGTVGGAADQSPESLLQLKALKPGVIQILGVKTSRFLCQRPDGALYGSLHFDPEACSFRELLLEDGYNVYQSEAHGLPLHLPGCKSPHRDPAPRGPARFLPLPGLPPAPPEPPGILAPQPPDVGSSDPLSMVYPSQGRSPSYAS

SEQ ID NO: 692 - protein, 471 aa, Artificial Sequence
  Fusion Protein
HGEGTFTSDLSKQLEEEAVQEFIEWLKAGGPSSGAPPPSGGGGGGGSGGGGSGGGGSADKTHTCPPCPAPELLGGPSVFLFPPKPKDTLMISRTPEVTCVVVDVSHEDPEVKFNWYVDGVEVHNAKTKPREEQYNNASRVVSVLTVLHQDWLNGKEYKCKVSNKALPAPIEKTISKAKGQPREPQVYTLPPSRDELTKNQVSLTCLVKGFYPSDIAVEWESNGQPENNYKTTPPVLDSDGSFFLYSKLTVDKSRWQQGNVFSCSVMHEALHNHYTQKSLSLSPGGGGSGSAHPIPDSSPLLQFGGQVRQRYLYTDDACQTEAHLEIREDGTVGGAADQSPESLLQLKALKPGVIQILGVKTSRFLCQRPDGALYGSLHFDPEACSFRELLLEDGYNVYQSEAHGLPLHLCGNKSPHRDPAPRGPARFLPLPGLPPAPPEPPGILAPQPPDVGSSDPLSMVGSQGRSPSYAS

SEQ ID NO: 693 - protein, 472 aa, Artificial Sequence
  Fusion Protein
HGEGTFTSDLSKQLEEEAVQEFIEWLKAGGPSSGAPPPSGGGGGGGSGGGGSGGGGSADKTHTCPPCPAPELLGGPSVFLFPPKPKDTLMISRTPEVTCVVVDVSHEDPEVKFNWYVDGVEVHNAKTKPREEQYNNASRVVSVLTVLHQDWLNGKEYKCKVSNKALPAPIEKTISKAKGQPREPQVYTLPPSRDELTKNQVSLTCLVKGFYPSDIAVEWESNGQPENNYKTTPPVLDSDGSFFLYSKLTVDKSRWQQGNVFSCSVMHEALHNHYTQKSLSLSPGGGGSGSAHPIPDSSPLLQFGGQVRQRYLYTDDACQTEAHLEIREDGTVGGAADQSPESLLQLKALKPGVIQILGVKTSRFLCQRPDGALYGSLHFDPEACSFRELLLEDGYNVYQSEAHGLPLHLCGNKSPHRDPAPRGPARFLPLPGLPPAPPEPPGILAPQPPDVGSSDPLSMVYPSQGRSPSYAS

SEQ ID NO: 694 - protein, 473 aa, Artificial Sequence
  Fusion Protein
HGEGTFTSDLSKQLEEEAVQEFIEWLKAGGPSSGAPPPSGGGGGGGSGGGGSGGGGSAESKYGPPCPPCPAPEFEGGPSVFLFPPKPKDTLMISRTPEVTCVVVDVSQEDPEVQFNWYVDGVEVHNAKTKPREEQFNSTYRVVSVLTVLHQDWLNGKEYKCKVSNKGLPSSIEKTISKAKGQPREPQVYTLPPSQEEMTKNQVSLTCLVKGFYPSDIAVEWESNGQPENNYKTTPPVLDSDGSFFLYSRLTVDKSRWQEGNVFSCSVMHEALHNHYTQKSLSLSLGGGGSGSAHPIPDSSPLLQFGGQVRQRYLYTDDACQTEAHLEIREDGTVGGAADQSPESLLQLKALKPGVIQILGVKTSRFLCQRPDGALYGSLHFDPEACSFRELLLEDGYNVYQSEAHGLPLHLPGCKSPHRDPAPRGPARFLPLPGLPPAPPEPPGILAPQPPDVGSSDPLSMVGSQGRSPSYAS

SEQ ID NO: 695 - protein, 474 aa, Artificial Sequence
  Fusion Protein
HGEGTFTSDLSKQLEEEAVQEFIEWLKAGGPSSGAPPPSGGGGGGGSGGGGSGGGGSAESKYGPPCPPCPAPEFEGGPSVFLFPPKPKDTLMISRTPEVTCVVVDVSQEDPEVQFNWYVDGVEVHNAKTKPREEQFNSTYRVVSVLTVLHQDWLNGKEYKCKVSNKGLPSSIEKTISKAKGQPREPQVYTLPPSQEEMTKNQVSLTCLVKGFYPSDIAVEWESNGQPENNYKTTPPVLDSDGSFFLYSRLTVDKSRWQEGNVFSCSVMHEALHNHYTQKSLSLSLGGGGSGSAHPIPDSSPLLQFGGQVRQRYLYTDDACQTEAHLEIREDGTVGGAADQSPESLLQLKALKPGVIQILGVKTSRFLCQRPDGALYGSLHFDPEACSFRELLLEDGYNVYQSEAHGLPLHLPGCKSPHRDPAPRGPARFLPLPGLPPAPPEPPGILAPQPPDVGSSDPLSMVYPSQGRSPSYAS

SEQ ID NO: 696 - protein, 473 aa, Artificial Sequence
  Fusion Protein
HGEGTFTSDLSKQLEEEAVQEFIEWLKAGGPSSGAPPPSGGGGGGGSGGGGSGGGGSAESKYGPPCPPCPAPEFEGGPSVFLFPPKPKDTLMISRTPEVTCVVVDVSQEDPEVQFNWYVDGVEVHNAKTKPREEQFNSTYRVVSVLTVLHQDWLNGKEYKCKVSNKGLPSSIEKTISKAKGQPREPQVYTLPPSQEEMTKNQVSLTCLVKGFYPSDIAVEWESNGQPENNYKTTPPVLDSDGSFFLYSRLTVDKSRWQEGNVFSCSVMHEALHNHYTQKSLSLSLGGGGSGSAHPIPDSSPLLQFGGQVRQRYLYTDDACQTEAHLEIREDGTVGGAADQSPESLLQLKALKPGVIQILGVKTSRFLCQRPDGALYGSLHFDPEACSFRELLLEDGYNVYQSEAHGLPLHLCGNKSPHRDPAPRGPARFLPLPGLPPAPPEPPGILAPQPPDVGSSDPLSMVGSQGRSPSYAS

SEQ ID NO: 697 - protein, 474 aa, Artificial Sequence
  Fusion Protein
HGEGTFTSDLSKQLEEEAVQEFIEWLKAGGPSSGAPPPSGGGGGGGSGGGGSGGGGSAESKYGPPCPPCPAPEFEGGPSVFLFPPKPKDTLMISRTPEVTCVVVDVSQEDPEVQFNWYVDGVEVHNAKTKPREEQFNSTYRVVSVLTVLHQDWLNGKEYKCKVSNKGLPSSIEKTISKAKGQPREPQVYTLPPSQEEMTKNQVSLTCLVKGFYPSDIAVEWESNGQPENNYKTTPPVLDSDGSFFLYSRLTVDKSRWQEGNVFSCSVMHEALHNHYTQKSLSLSLGGGGSGSAHPIPDSSPLLQFGGQVRQRYLYTDDACQTEAHLEIREDGTVGGAADQSPESLLQLKALKPGVIQILGVKTSRFLCQRPDGALYGSLHFDPEACSFRELLLEDGYNVYQSEAHGLPLHLCGNKSPHRDPAPRGPARFLPLPGLPPAPPEPPGILAPQPPDVGSSDPLSMVYPSQGRSPSYAS

SEQ ID NO: 698 - protein, 472 aa, Artificial Sequence
  Fusion Protein
HGEGTFTSDLSKQLEEERVQEFIEWLKAGGPSSGAPPPSGGGGGGGSGGGGSGGGGSADKTHTCPPCPAPEAAGGPSVFLFPPKPKDTLMISRTPEVTCVVVDVSHEDPEVKFNWYVDGVEVHNAKTKPREEQYNSTYRVVSVLTVLHQDWLNGKEYKCKVSNKALPAPIEKTISKAKGQPREPQVYTLPPSRDELTKNQVSLTCLVKGFYPSDIAVEWESNGQPENNYKTTPPVLDSDGSFFLYSKLTVDKSRWQQGNVFSCSVMHEALHNHYTQKSLSLSPGGGGSGSAHPIPDSSPLLQFGGQVRQRYLYTDDACQTEAHLEIREDGTVGGAADQSPESLLQLKALKPGVIQILGVKTSRFLCQRPDGALYGSLHFDPEACSFRELLLEDGYNVYQSEAHGLPLHLPGCKSPHRDPAPRGPARFLPLPGLPPAPPEPPGILAPQPPDVGSSDPLSMVYPSQGRSPSYAS

SEQ ID NO: 699 - protein, 471 aa, Artificial Sequence
  Fusion Protein
HGEGTFTSDLSKQLEEERVQEFIEWLKAGGPSSGAPPPSGGGGGGGSGGGGSGGGGSADKTHTCPPCPAPELLGGPSVFLFPPKPKDTLMISRTPEVTCVVVDVSHEDPEVKFNWYVDGVEVHNAKTKPREEQYNNASRVVSVLTVLHQDWLNGKEYKCKVSNKALPAPIEKTISKAKGQPREPQVYTLPPSRDELTKNQVSLTCLVKGFYPSDIAVEWESNGQPENNYKTTPPVLDSDGSFFLYSKLTVDKSRWQQGNVFSCSVMHEALHNHYTQKSLSLSPGGGGSGSAHPIPDSSPLLQFGGQVRQRYLYTDDACQTEAHLEIREDGTVGGAADQSPESLLQLKALKPGVIQILGVKTSRFLCQRPDGALYGSLHFDPEACSFRELLLEDGYNVYQSEAHGLPLHLPGCKSPHRDPAPRGPARFLPLPGLPPAPPEPPGILAPQPPDVGSSDPLSMVGSQGRSPSYAS

SEQ ID NO: 700 - protein, 472 aa, Artificial Sequence
  Fusion Protein
HGEGTFTSDLSKQLEEERVQEFIEWLKAGGPSSGAPPPSGGGGGGGSGGGGSGGGGSADKTHTCPPCPAPELLGGPSVFLFPPKPKDTLMISRTPEVTCVVVDVSHEDPEVKFNWYVDGVEVHNAKTKPREEQYNNASRVVSVLTVLHQDWLNGKEYKCKVSNKALPAPIEKTISKAKGQPREPQVYTLPPSRDELTKNQVSLTCLVKGFYPSDIAVEWESNGQPENNYKTTPPVLDSDGSFFLYSKLTVDKSRWQQGNVFSCSVMHEALHNHYTQKSLSLSPGGGGSGSAHPIPDSSPLLQFGGQVRQRYLYTDDACQTEAHLEIREDGTVGGAADQSPESLLQLKALKPGVIQILGVKTSRFLCQRPDGALYGSLHFDPEACSFRELLLEDGYNVYQSEAHGLPLHLPGCKSPHRDPAPRGPARFLPLPGLPPAPPEPPGILAPQPPDVGSSDPLSMVYPSQGRSPSYAS

SEQ ID NO: 701 - protein, 471 aa, Artificial Sequence
  Fusion Protein
HGEGTFTSDLSKQLEEERVQEFIEWLKAGGPSSGAPPPSGGGGGGGSGGGGSGGGGSADKTHTCPPCPAPELLGGPSVFLFPPKPKDTLMISRTPEVTCVVVDVSHEDPEVKFNWYVDGVEVHNAKTKPREEQYNNASRVVSVLTVLHQDWLNGKEYKCKVSNKALPAPIEKTISKAKGQPREPQVYTLPPSRDELTKNQVSLTCLVKGFYPSDIAVEWESNGQPENNYKTTPPVLDSDGSFFLYSKLTVDKSRWQQGNVFSCSVMHEALHNHYTQKSLSLSPGGGGSGSAHPIPDSSPLLQFGGQVRQRYLYTDDACQTEAHLEIREDGTVGGAADQSPESLLQLKALKPGVIQILGVKTSRFLCQRPDGALYGSLHFDPEACSFRELLLEDGYNVYQSEAHGLPLHLCGNKSPHRDPAPRGPARFLPLPGLPPAPPEPPGILAPQPPDVGSSDPLSMVGSQGRSPSYAS

SEQ ID NO: 702 - protein, 472 aa, Artificial Sequence
  Fusion Protein
HGEGTFTSDLSKQLEEERVQEFIEWLKAGGPSSGAPPPSGGGGGGGSGGGGSGGGGSADKTHTCPPCPAPELLGGPSVFLFPPKPKDTLMISRTPEVTCVVVDVSHEDPEVKFNWYVDGVEVHNAKTKPREEQYNNASRVVSVLTVLHQDWLNGKEYKCKVSNKALPAPIEKTISKAKGQPREPQVYTLPPSRDELTKNQVSLTCLVKGFYPSDIAVEWESNGQPENNYKTTPPVLDSDGSFFLYSKLTVDKSRWQQGNVFSCSVMHEALHNHYTQKSLSLSPGGGGSGSAHPIPDSSPLLQFGGQVRQRYLYTDDACQTEAHLEIREDGTVGGAADQSPESLLQLKALKPGVIQILGVKTSRFLCQRPDGALYGSLHFDPEACSFRELLLEDGYNVYQSEAHGLPLHLCGNKSPHRDPAPRGPARFLPLPGLPPAPPEPPGILAPQPPDVGSSDPLSMVYPSQGRSPSYAS

SEQ ID NO: 703 - protein, 472 aa, Artificial Sequence
  Fusion Protein
HGEGTFTSDLSKQLEEEAVQLFIEWLLATGPSSGAPPPSGGGGGGGSGGGGSGGGGSADKTHTCPPCPAPEAAGGPSVFLFPPKPKDTLMISRTPEVTCVVVDVSHEDPEVKFNWYVDGVEVHNAKTKPREEQYNSTYRVVSVLTVLHQDWLNGKEYKCKVSNKALPAPIEKTISKAKGQPREPQVYTLPPSRDELTKNQVSLTCLVKGFYPSDIAVEWESNGQPENNYKTTPPVLDSDGSFFLYSKLTVDKSRWQQGNVFSCSVMHEALHNHYTQKSLSLSPGGGGSGSAHPIPDSSPLLQFGGQVRQRYLYTDDACQTEAHLEIREDGTVGGAADQSPESLLQLKALKPGVIQILGVKTSRFLCQRPDGALYGSLHFDPEACSFRELLLEDGYNVYQSEAHGLPLHLPGCKSPHRDPAPRGPARFLPLPGLPPAPPEPPGILAPQPPDVGSSDPLSMVYPSQGRSPSYAS

SEQ ID NO: 704 - protein, 471 aa, Artificial Sequence
  Fusion Protein
HGEGTFTSDLSKQLEEEAVQLFIEWLLATGPSSGAPPPSGGGGGGGSGGGGSGGGGSADKTHTCPPCPAPEAAGGPSVFLFPPKPKDTLMISRTPEVTCVVVDVSHEDPEVKFNWYVDGVEVHNAKTKPREEQYNSTYRVVSVLTVLHQDWLNGKEYKCKVSNKALPAPIEKTISKAKGQPREPQVYTLPPSRDELTKNQVSLTCLVKGFYPSDIAVEWESNGQPENNYKTTPPVLDSDGSFFLYSKLTVDKSRWQQGNVFSCSVMHEALHNHYTQKSLSLSPGGGGSGSAHPIPDSSPLLQFGGQVRQRYLYTDDACQTEAHLEIREDGTVGGAADQSPESLLQLKALKPGVIQILGVKTSRFLCQRPDGALYGSLHFDPEACSFRELLLEDGYNVYQSEAHGLPLHLCGNKSPHRDPAPRGPARFLPLPGLPPAPPEPPGILAPQPPDVGSSDPLSMVGSQGRSPSYAS

SEQ ID NO: 705 - protein, 472 aa, Artificial Sequence
  Fusion Protein
HGEGTFTSDLSKQLEEEAVQLFIEWLLATGPSSGAPPPSGGGGGGGSGGGGSGGGGSADKTHTCPPCPAPEAAGGPSVFLFPPKPKDTLMISRTPEVTCVVVDVSHEDPEVKFNWYVDGVEVHNAKTKPREEQYNSTYRVVSVLTVLHQDWLNGKEYKCKVSNKALPAPIEKTISKAKGQPREPQVYTLPPSRDELTKNQVSLTCLVKGFYPSDIAVEWESNGQPENNYKTTPPVLDSDGSFFLYSKLTVDKSRWQQGNVFSCSVMHEALHNHYTQKSLSLSPGGGGSGSAHPIPDSSPLLQFGGQVRQRYLYTDDACQTEAHLEIREDGTVGGAADQSPESLLQLKALKPGVIQILGVKTSRFLCQRPDGALYGSLHFDPEACSFRELLLEDGYNVYQSEAHGLPLHLCGNKSPHRDPAPRGPARFLPLPGLPPAPPEPPGILAPQPPDVGSSDPLSMVYPSQGRSPSYAS

SEQ ID NO: 706 - protein, 471 aa, Artificial Sequence
  Fusion Protein
HGEGTFTSDLSKQLEEEAVQLFIEWLLATGPSSGAPPPSGGGGGGGSGGGGSGGGGSADKTHTCPPCPAPELLGGPSVFLFPPKPKDTLMISRTPEVTCVVVDVSHEDPEVKFNWYVDGVEVHNAKTKPREEQYNNASRVVSVLTVLHQDWLNGKEYKCKVSNKALPAPIEKTISKAKGQPREPQVYTLPPSRDELTKNQVSLTCLVKGFYPSDIAVEWESNGQPENNYKTTPPVLDSDGSFFLYSKLTVDKSRWQQGNVFSCSVMHEALHNHYTQKSLSLSPGGGGSGSAHPIPDSSPLLQFGGQVRQRYLYTDDACQTEAHLEIREDGTVGGAADQSPESLLQLKALKPGVIQILGVKTSRFLCQRPDGALYGSLHFDPEACSFRELLLEDGYNVYQSEAHGLPLHLPGCKSPHRDPAPRGPARFLPLPGLPPAPPEPPGILAPQPPDVGSSDPLSMVGSQGRSPSYAS

SEQ ID NO: 707 - protein, 472 aa, Artificial Sequence
  Fusion Protein
HGEGTFTSDLSKQLEEEAVQLFIEWLLATGPSSGAPPPSGGGGGGGSGGGGSGGGGSADKTHTCPPCPAPELLGGPSVFLFPPKPKDTLMISRTPEVTCVVVDVSHEDPEVKFNWYVDGVEVHNAKTKPREEQYNNASRVVSVLTVLHQDWLNGKEYKCKVSNKALPAPIEKTISKAKGQPREPQVYTLPPSRDELTKNQVSLTCLVKGFYPSDIAVEWESNGQPENNYKTTPPVLDSDGSFFLYSKLTVDKSRWQQGNVFSCSVMHEALHNHYTQKSLSLSPGGGGSGSAHPIPDSSPLLQFGGQVRQRYLYTDDACQTEAHLEIREDGTVGGAADQSPESLLQLKALKPGVIQILGVKTSRFLCQRPDGALYGSLHFDPEACSFRELLLEDGYNVYQSEAHGLPLHLPGCKSPHRDPAPRGPARFLPLPGLPPAPPEPPGILAPQPPDVGSSDPLSMVYPSQGRSPSYAS

SEQ ID NO: 708 - protein, 471 aa, Artificial Sequence
  Fusion Protein
HGEGTFTSDLSKQLEEEAVQLFIEWLLATGPSSGAPPPSGGGGGGGSGGGGSGGGGSADKTHTCPPCPAPELLGGPSVFLFPPKPKDTLMISRTPEVTCVVVDVSHEDPEVKFNWYVDGVEVHNAKTKPREEQYNNASRVVSVLTVLHQDWLNGKEYKCKVSNKALPAPIEKTISKAKGQPREPQVYTLPPSRDELTKNQVSLTCLVKGFYPSDIAVEWESNGQPENNYKTTPPVLDSDGSFFLYSKLTVDKSRWQQGNVFSCSVMHEALHNHYTQKSLSLSPGGGGSGSAHPIPDSSPLLQFGGQVRQRYLYTDDACQTEAHLEIREDGTVGGAADQSPESLLQLKALKPGVIQILGVKTSRFLCQRPDGALYGSLHFDPEACSFRELLLEDGYNVYQSEAHGLPLHLCGNKSPHRDPAPRGPARFLPLPGLPPAPPEPPGILAPQPPDVGSSDPLSMVGSQGRSPSYAS

SEQ ID NO: 709 - protein, 472 aa, Artificial Sequence
  Fusion Protein
HGEGTFTSDLSKQLEEEAVQLFIEWLLATGPSSGAPPPSGGGGGGGSGGGGSGGGGSADKTHTCPPCPAPELLGGPSVFLFPPKPKDTLMISRTPEVTCVVVDVSHEDPEVKFNWYVDGVEVHNAKTKPREEQYNNASRVVSVLTVLHQDWLNGKEYKCKVSNKALPAPIEKTISKAKGQPREPQVYTLPPSRDELTKNQVSLTCLVKGFYPSDIAVEWESNGQPENNYKTTPPVLDSDGSFFLYSKLTVDKSRWQQGNVFSCSVMHEALHNHYTQKSLSLSPGGGGSGSAHPIPDSSPLLQFGGQVRQRYLYTDDACQTEAHLEIREDGTVGGAADQSPESLLQLKALKPGVIQILGVKTSRFLCQRPDGALYGSLHFDPEACSFRELLLEDGYNVYQSEAHGLPLHLCGNKSPHRDPAPRGPARFLPLPGLPPAPPEPPGILAPQPPDVGSSDPLSMVYPSQGRSPSYAS

SEQ ID NO: 710 - protein, 473 aa, Artificial Sequence
  Fusion Protein
HGEGTFTSDLSKQLEEEAVQLFIEWLLATGPSSGAPPPSGGGGGGGSGGGGSGGGGSAESKYGPPCPPCPAPEFEGGPSVFLFPPKPKDTLMISRTPEVTCVVVDVSQEDPEVQFNWYVDGVEVHNAKTKPREEQFNSTYRVVSVLTVLHQDWLNGKEYKCKVSNKGLPSSIEKTISKAKGQPREPQVYTLPPSQEEMTKNQVSLTCLVKGFYPSDIAVEWESNGQPENNYKTTPPVLDSDGSFFLYSRLTVDKSRWQEGNVFSCSVMHEALHNHYTQKSLSLSLGGGGSGSAHPIPDSSPLLQFGGQVRQRYLYTDDACQTEAHLEIREDGTVGGAADQSPESLLQLKALKPGVIQILGVKTSRFLCQRPDGALYGSLHFDPEACSFRELLLEDGYNVYQSEAHGLPLHLPGCKSPHRDPAPRGPARFLPLPGLPPAPPEPPGILAPQPPDVGSSDPLSMVGSQGRSPSYAS

SEQ ID NO: 711 - protein, 474 aa, Artificial Sequence
  Fusion Protein
HGEGTFTSDLSKQLEEEAVQLFIEWLLATGPSSGAPPPSGGGGGGGSGGGGSGGGGSAESKYGPPCPPCPAPEFEGGPSVFLFPPKPKDTLMISRTPEVTCVVVDVSQEDPEVQFNWYVDGVEVHNAKTKPREEQFNSTYRVVSVLTVLHQDWLNGKEYKCKVSNKGLPSSIEKTISKAKGQPREPQVYTLPPSQEEMTKNQVSLTCLVKGFYPSDIAVEWESNGQPENNYKTTPPVLDSDGSFFLYSRLTVDKSRWQEGNVFSCSVMHEALHNHYTQKSLSLSLGGGGSGSAHPIPDSSPLLQFGGQVRQRYLYTDDACQTEAHLEIREDGTVGGAADQSPESLLQLKALKPGVIQILGVKTSRFLCQRPDGALYGSLHFDPEACSFRELLLEDGYNVYQSEAHGLPLHLPGCKSPHRDPAPRGPARFLPLPGLPPAPPEPPGILAPQPPDVGSSDPLSMVYPSQGRSPSYAS

SEQ ID NO: 712 - protein, 473 aa, Artificial Sequence
  Fusion Protein
HGEGTFTSDLSKQLEEEAVQLFIEWLLATGPSSGAPPPSGGGGGGGSGGGGSGGGGSAESKYGPPCPPCPAPEFEGGPSVFLFPPKPKDTLMISRTPEVTCVVVDVSQEDPEVQFNWYVDGVEVHNAKTKPREEQFNSTYRVVSVLTVLHQDWLNGKEYKCKVSNKGLPSSIEKTISKAKGQPREPQVYTLPPSQEEMTKNQVSLTCLVKGFYPSDIAVEWESNGQPENNYKTTPPVLDSDGSFFLYSRLTVDKSRWQEGNVFSCSVMHEALHNHYTQKSLSLSLGGGGSGSAHPIPDSSPLLQFGGQVRQRYLYTDDACQTEAHLEIREDGTVGGAADQSPESLLQLKALKPGVIQILGVKTSRFLCQRPDGALYGSLHFDPEACSFRELLLEDGYNVYQSEAHGLPLHLCGNKSPHRDPAPRGPARFLPLPGLPPAPPEPPGILAPQPPDVGSSDPLSMVGSQGRSPSYAS

SEQ ID NO: 713 - protein, 474 aa, Artificial Sequence
  Fusion Protein
HGEGTFTSDLSKQLEEEAVQLFIEWLLATGPSSGAPPPSGGGGGGGSGGGGSGGGGSAESKYGPPCPPCPAPEFEGGPSVFLFPPKPKDTLMISRTPEVTCVVVDVSQEDPEVQFNWYVDGVEVHNAKTKPREEQFNSTYRVVSVLTVLHQDWLNGKEYKCKVSNKGLPSSIEKTISKAKGQPREPQVYTLPPSQEEMTKNQVSLTCLVKGFYPSDIAVEWESNGQPENNYKTTPPVLDSDGSFFLYSRLTVDKSRWQEGNVFSCSVMHEALHNHYTQKSLSLSLGGGGSGSAHPIPDSSPLLQFGGQVRQRYLYTDDACQTEAHLEIREDGTVGGAADQSPESLLQLKALKPGVIQILGVKTSRFLCQRPDGALYGSLHFDPEACSFRELLLEDGYNVYQSEAHGLPLHLCGNKSPHRDPAPRGPARFLPLPGLPPAPPEPPGILAPQPPDVGSSDPLSMVYPSQGRSPSYAS

SEQ ID NO: 714 - protein, 472 aa, Artificial Sequence
  Fusion Protein
HGEGTFTSDLSKQLEEEAVQLFIEWLLATGPSSGEPPPKSGGGGGGGSGGGGSGGGGSADKTHTCPPCPAPEAAGGPSVFLFPPKPKDTLMISRTPEVTCVVVDVSHEDPEVKFNWYVDGVEVHNAKTKPREEQYNSTYRVVSVLTVLHQDWLNGKEYKCKVSNKALPAPIEKTISKAKGQPREPQVYTLPPSRDELTKNQVSLTCLVKGFYPSDIAVEWESNGQPENNYKTTPPVLDSDGSFFLYSKLTVDKSRWQQGNVFSCSVMHEALHNHYTQKSLSLSPGGGGSGSAHPIPDSSPLLQFGGQVRQRYLYTDDACQTEAHLEIREDGTVGGAADQSPESLLQLKALKPGVIQILGVKTSRFLCQRPDGALYGSLHFDPEACSFRELLLEDGYNVYQSEAHGLPLHLPGCKSPHRDPAPRGPARFLPLPGLPPAPPEPPGILAPQPPDVGSSDPLSMVGSQGRSPSYAS

SEQ ID NO: 715 - protein, 473 aa, Artificial Sequence
  Fusion Protein
HGEGTFTSDLSKQLEEEAVQLFIEWLLATGPSSGEPPPKSGGGGGGGSGGGGSGGGGSADKTHTCPPCPAPEAAGGPSVFLFPPKPKDTLMISRTPEVTCVVVDVSHEDPEVKFNWYVDGVEVHNAKTKPREEQYNSTYRVVSVLTVLHQDWLNGKEYKCKVSNKALPAPIEKTISKAKGQPREPQVYTLPPSRDELTKNQVSLTCLVKGFYPSDIAVEWESNGQPENNYKTTPPVLDSDGSFFLYSKLTVDKSRWQQGNVFSCSVMHEALHNHYTQKSLSLSPGGGGSGSAHPIPDSSPLLQFGGQVRQRYLYTDDACQTEAHLEIREDGTVGGAADQSPESLLQLKALKPGVIQILGVKTSRFLCQRPDGALYGSLHFDPEACSFRELLLEDGYNVYQSEAHGLPLHLPGCKSPHRDPAPRGPARFLPLPGLPPAPPEPPGILAPQPPDVGSSDPLSMVYPSQGRSPSYAS

SEQ ID NO: 716 - protein, 472 aa, Artificial Sequence
  Fusion Protein
HGEGTFTSDLSKQLEEEAVQLFIEWLLATGPSSGEPPPKSGGGGGGGSGGGGSGGGGSADKTHTCPPCPAPEAAGGPSVFLFPPKPKDTLMISRTPEVTCVVVDVSHEDPEVKFNWYVDGVEVHNAKTKPREEQYNSTYRVVSVLTVLHQDWLNGKEYKCKVSNKALPAPIEKTISKAKGQPREPQVYTLPPSRDELTKNQVSLTCLVKGFYPSDIAVEWESNGQPENNYKTTPPVLDSDGSFFLYSKLTVDKSRWQQGNVFSCSVMHEALHNHYTQKSLSLSPGGGGSGSAHPIPDSSPLLQFGGQVRQRYLYTDDACQTEAHLEIREDGTVGGAADQSPESLLQLKALKPGVIQILGVKTSRFLCQRPDGALYGSLHFDPEACSFRELLLEDGYNVYQSEAHGLPLHLCGNKSPHRDPAPRGPARFLPLPGLPPAPPEPPGILAPQPPDVGSSDPLSMVGSQGRSPSYAS

SEQ ID NO: 717 - protein, 473 aa, Artificial Sequence
  Fusion Protein
HGEGTFTSDLSKQLEEEAVQLFIEWLLATGPSSGEPPPKSGGGGGGGSGGGGSGGGGSADKTHTCPPCPAPEAAGGPSVFLFPPKPKDTLMISRTPEVTCVVVDVSHEDPEVKFNWYVDGVEVHNAKTKPREEQYNSTYRVVSVLTVLHQDWLNGKEYKCKVSNKALPAPIEKTISKAKGQPREPQVYTLPPSRDELTKNQVSLTCLVKGFYPSDIAVEWESNGQPENNYKTTPPVLDSDGSFFLYSKLTVDKSRWQQGNVFSCSVMHEALHNHYTQKSLSLSPGGGGSGSAHPIPDSSPLLQFGGQVRQRYLYTDDACQTEAHLEIREDGTVGGAADQSPESLLQLKALKPGVIQILGVKTSRFLCQRPDGALYGSLHFDPEACSFRELLLEDGYNVYQSEAHGLPLHLCGNKSPHRDPAPRGPARFLPLPGLPPAPPEPPGILAPQPPDVGSSDPLSMVYPSQGRSPSYAS

SEQ ID NO: 718 - protein, 472 aa, Artificial Sequence
  Fusion Protein
HGEGTFTSDLSKQLEEEAVQLFIEWLLATGPSSGEPPPKSGGGGGGGSGGGGSGGGGSADKTHTCPPCPAPELLGGPSVFLFPPKPKDTLMISRTPEVTCVVVDVSHEDPEVKFNWYVDGVEVHNAKTKPREEQYNNASRVVSVLTVLHQDWLNGKEYKCKVSNKALPAPIEKTISKAKGQPREPQVYTLPPSRDELTKNQVSLTCLVKGFYPSDIAVEWESNGQPENNYKTTPPVLDSDGSFFLYSKLTVDKSRWQQGNVFSCSVMHEALHNHYTQKSLSLSPGGGGSGSAHPIPDSSPLLQFGGQVRQRYLYTDDACQTEAHLEIREDGTVGGAADQSPESLLQLKALKPGVIQILGVKTSRFLCQRPDGALYGSLHFDPEACSFRELLLEDGYNVYQSEAHGLPLHLPGCKSPHRDPAPRGPARFLPLPGLPPAPPEPPGILAPQPPDVGSSDPLSMVGSQGRSPSYAS

SEQ ID NO: 719 - protein, 473 aa, Artificial Sequence
  Fusion Protein
HGEGTFTSDLSKQLEEEAVQLFIEWLLATGPSSGEPPPKSGGGGGGGSGGGGSGGGGSADKTHTCPPCPAPELLGGPSVFLFPPKPKDTLMISRTPEVTCVVVDVSHEDPEVKFNWYVDGVEVHNAKTKPREEQYNNASRVVSVLTVLHQDWLNGKEYKCKVSNKALPAPIEKTISKAKGQPREPQVYTLPPSRDELTKNQVSLTCLVKGFYPSDIAVEWESNGQPENNYKTTPPVLDSDGSFFLYSKLTVDKSRWQQGNVFSCSVMHEALHNHYTQKSLSLSPGGGGSGSAHPIPDSSPLLQFGGQVRQRYLYTDDACQTEAHLEIREDGTVGGAADQSPESLLQLKALKPGVIQILGVKTSRFLCQRPDGALYGSLHFDPEACSFRELLLEDGYNVYQSEAHGLPLHLPGCKSPHRDPAPRGPARFLPLPGLPPAPPEPPGILAPQPPDVGSSDPLSMVYPSQGRSPSYAS

SEQ ID NO: 720 - protein, 472 aa, Artificial Sequence
  Fusion Protein
HGEGTFTSDLSKQLEEEAVQLFIEWLLATGPSSGEPPPKSGGGGGGGSGGGGSGGGGSADKTHTCPPCPAPELLGGPSVFLFPPKPKDTLMISRTPEVTCVVVDVSHEDPEVKFNWYVDGVEVHNAKTKPREEQYNNASRVVSVLTVLHQDWLNGKEYKCKVSNKALPAPIEKTISKAKGQPREPQVYTLPPSRDELTKNQVSLTCLVKGFYPSDIAVEWESNGQPENNYKTTPPVLDSDGSFFLYSKLTVDKSRWQQGNVFSCSVMHEALHNHYTQKSLSLSPGGGGSGSAHPIPDSSPLLQFGGQVRQRYLYTDDACQTEAHLEIREDGTVGGAADQSPESLLQLKALKPGVIQILGVKTSRFLCQRPDGALYGSLHFDPEACSFRELLLEDGYNVYQSEAHGLPLHLCGNKSPHRDPAPRGPARFLPLPGLPPAPPEPPGILAPQPPDVGSSDPLSMVGSQGRSPSYAS

SEQ ID NO: 721 - protein, 473 aa, Artificial Sequence
  Fusion Protein
HGEGTFTSDLSKQLEEEAVQLFIEWLLATGPSSGEPPPKSGGGGGGGSGGGGSGGGGSADKTHTCPPCPAPELLGGPSVFLFPPKPKDTLMISRTPEVTCVVVDVSHEDPEVKFNWYVDGVEVHNAKTKPREEQYNNASRVVSVLTVLHQDWLNGKEYKCKVSNKALPAPIEKTISKAKGQPREPQVYTLPPSRDELTKNQVSLTCLVKGFYPSDIAVEWESNGQPENNYKTTPPVLDSDGSFFLYSKLTVDKSRWQQGNVFSCSVMHEALHNHYTQKSLSLSPGGGGSGSAHPIPDSSPLLQFGGQVRQRYLYTDDACQTEAHLEIREDGTVGGAADQSPESLLQLKALKPGVIQILGVKTSRFLCQRPDGALYGSLHFDPEACSFRELLLEDGYNVYQSEAHGLPLHLCGNKSPHRDPAPRGPARFLPLPGLPPAPPEPPGILAPQPPDVGSSDPLSMVYPSQGRSPSYAS

SEQ ID NO: 722 - protein, 474 aa, Artificial Sequence
  Fusion Protein
HGEGTFTSDLSKQLEEEAVQLFIEWLLATGPSSGEPPPKSGGGGGGGSGGGGSGGGGSAESKYGPPCPPCPAPEFEGGPSVFLFPPKPKDTLMISRTPEVTCVVVDVSQEDPEVQFNWYVDGVEVHNAKTKPREEQFNSTYRVVSVLTVLHQDWLNGKEYKCKVSNKGLPSSIEKTISKAKGQPREPQVYTLPPSQEEMTKNQVSLTCLVKGFYPSDIAVEWESNGQPENNYKTTPPVLDSDGSFFLYSRLTVDKSRWQEGNVFSCSVMHEALHNHYTQKSLSLSLGGGGSGSAHPIPDSSPLLQFGGQVRQRYLYTDDACQTEAHLEIREDGTVGGAADQSPESLLQLKALKPGVIQILGVKTSRFLCQRPDGALYGSLHFDPEACSFRELLLEDGYNVYQSEAHGLPLHLPGCKSPHRDPAPRGPARFLPLPGLPPAPPEPPGILAPQPPDVGSSDPLSMVGSQGRSPSYAS

SEQ ID NO: 723 - protein, 474 aa, Artificial Sequence
  Fusion Protein
HGEGTFTSDLSKQLEEEAVQLFIEWLLATGPSSGEPPPKSGGGGGGGSGGGGSGGGGSAESKYGPPCPPCPAPEFEGGPSVFLFPPKPKDTLMISRTPEVTCVVVDVSQEDPEVQFNWYVDGVEVHNAKTKPREEQFNSTYRVVSVLTVLHQDWLNGKEYKCKVSNKGLPSSIEKTISKAKGQPREPQVYTLPPSQEEMTKNQVSLTCLVKGFYPSDIAVEWESNGQPENNYKTTPPVLDSDGSFFLYSRLTVDKSRWQEGNVFSCSVMHEALHNHYTQKSLSLSLGGGGSGSAHPIPDSSPLLQFGGQVRQRYLYTDDACQTEAHLEIREDGTVGGAADQSPESLLQLKALKPGVIQILGVKTSRFLCQRPDGALYGSLHFDPEACSFRELLLEDGYNVYQSEAHGLPLHLCGNKSPHRDPAPRGPARFLPLPGLPPAPPEPPGILAPQPPDVGSSDPLSMVGSQGRSPSYAS

SEQ ID NO: 724 - protein, 475 aa, Artificial Sequence
  Fusion Protein
HGEGTFTSDLSKQLEEEAVQLFIEWLLATGPSSGEPPPKSGGGGGGGSGGGGSGGGGSAESKYGPPCPPCPAPEFEGGPSVFLFPPKPKDTLMISRTPEVTCVVVDVSQEDPEVQFNWYVDGVEVHNAKTKPREEQFNSTYRVVSVLTVLHQDWLNGKEYKCKVSNKGLPSSIEKTISKAKGQPREPQVYTLPPSQEEMTKNQVSLTCLVKGFYPSDIAVEWESNGQPENNYKTTPPVLDSDGSFFLYSRLTVDKSRWQEGNVFSCSVMHEALHNHYTQKSLSLSLGGGGSGSAHPIPDSSPLLQFGGQVRQRYLYTDDACQTEAHLEIREDGTVGGAADQSPESLLQLKALKPGVIQILGVKTSRFLCQRPDGALYGSLHFDPEACSFRELLLEDGYNVYQSEAHGLPLHLCGNKSPHRDPAPRGPARFLPLPGLPPAPPEPPGILAPQPPDVGSSDPLSMVYPSQGRSPSYAS

SEQ ID NO: 725 - protein, 472 aa, Artificial Sequence
  Fusion Protein
HGEGTFTSDLSKQLEEEAVQLFIEWLLATGPSSGKPPPESGGGGGGGSGGGGSGGGGSADKTHTCPPCPAPEAAGGPSVFLFPPKPKDTLMISRTPEVTCVVVDVSHEDPEVKFNWYVDGVEVHNAKTKPREEQYNSTYRVVSVLTVLHQDWLNGKEYKCKVSNKALPAPIEKTISKAKGQPREPQVYTLPPSRDELTKNQVSLTCLVKGFYPSDIAVEWESNGQPENNYKTTPPVLDSDGSFFLYSKLTVDKSRWQQGNVFSCSVMHEALHNHYTQKSLSLSPGGGGSGSAHPIPDSSPLLQFGGQVRQRYLYTDDACQTEAHLEIREDGTVGGAADQSPESLLQLKALKPGVIQILGVKTSRFLCQRPDGALYGSLHFDPEACSFRELLLEDGYNVYQSEAHGLPLHLPGCKSPHRDPAPRGPARFLPLPGLPPAPPEPPGILAPQPPDVGSSDPLSMVGSQGRSPSYAS

SEQ ID NO: 726 - protein, 473 aa, Artificial Sequence
  Fusion Protein
HGEGTFTSDLSKQLEEEAVQLFIEWLLATGPSSGKPPPESGGGGGGGSGGGGSGGGGSADKTHTCPPCPAPEAAGGPSVFLFPPKPKDTLMISRTPEVTCVVVDVSHEDPEVKFNWYVDGVEVHNAKTKPREEQYNSTYRVVSVLTVLHQDWLNGKEYKCKVSNKALPAPIEKTISKAKGQPREPQVYTLPPSRDELTKNQVSLTCLVKGFYPSDIAVEWESNGQPENNYKTTPPVLDSDGSFFLYSKLTVDKSRWQQGNVFSCSVMHEALHNHYTQKSLSLSPGGGGSGSAHPIPDSSPLLQFGGQVRQRYLYTDDACQTEAHLEIREDGTVGGAADQSPESLLQLKALKPGVIQILGVKTSRFLCQRPDGALYGSLHFDPEACSFRELLLEDGYNVYQSEAHGLPLHLPGCKSPHRDPAPRGPARFLPLPGLPPAPPEPPGILAPQPPDVGSSDPLSMVYPSQGRSPSYAS

SEQ ID NO: 727 - protein, 472 aa, Artificial Sequence
  Fusion Protein
HGEGTFTSDLSKQLEEEAVQLFIEWLLATGPSSGKPPPESGGGGGGGSGGGGSGGGGSADKTHTCPPCPAPEAAGGPSVFLFPPKPKDTLMISRTPEVTCVVVDVSHEDPEVKFNWYVDGVEVHNAKTKPREEQYNSTYRVVSVLTVLHQDWLNGKEYKCKVSNKALPAPIEKTISKAKGQPREPQVYTLPPSRDELTKNQVSLTCLVKGFYPSDIAVEWESNGQPENNYKTTPPVLDSDGSFFLYSKLTVDKSRWQQGNVFSCSVMHEALHNHYTQKSLSLSPGGGGSGSAHPIPDSSPLLQFGGQVRQRYLYTDDACQTEAHLEIREDGTVGGAADQSPESLLQLKALKPGVIQILGVKTSRFLCQRPDGALYGSLHFDPEACSFRELLLEDGYNVYQSEAHGLPLHLCGNKSPHRDPAPRGPARFLPLPGLPPAPPEPPGILAPQPPDVGSSDPLSMVGSQGRSPSYAS

SEQ ID NO: 728 - protein, 473 aa, Artificial Sequence
  Fusion Protein
HGEGTFTSDLSKQLEEEAVQLFIEWLLATGPSSGKPPPESGGGGGGGSGGGGSGGGGSADKTHTCPPCPAPEAAGGPSVFLFPPKPKDTLMISRTPEVTCVVVDVSHEDPEVKFNWYVDGVEVHNAKTKPREEQYNSTYRVVSVLTVLHQDWLNGKEYKCKVSNKALPAPIEKTISKAKGQPREPQVYTLPPSRDELTKNQVSLTCLVKGFYPSDIAVEWESNGQPENNYKTTPPVLDSDGSFFLYSKLTVDKSRWQQGNVFSCSVMHEALHNHYTQKSLSLSPGGGGSGSAHPIPDSSPLLQFGGQVRQRYLYTDDACQTEAHLEIREDGTVGGAADQSPESLLQLKALKPGVIQILGVKTSRFLCQRPDGALYGSLHFDPEACSFRELLLEDGYNVYQSEAHGLPLHLCGNKSPHRDPAPRGPARFLPLPGLPPAPPEPPGILAPQPPDVGSSDPLSMVYPSQGRSPSYAS

SEQ ID NO: 729 - protein, 472 aa, Artificial Sequence
  Fusion Protein
HGEGTFTSDLSKQLEEEAVQLFIEWLLATGPSSGKPPPESGGGGGGGSGGGGSGGGGSADKTHTCPPCPAPELLGGPSVFLFPPKPKDTLMISRTPEVTCVVVDVSHEDPEVKFNWYVDGVEVHNAKTKPREEQYNNASRVVSVLTVLHQDWLNGKEYKCKVSNKALPAPIEKTISKAKGQPREPQVYTLPPSRDELTKNQVSLTCLVKGFYPSDIAVEWESNGQPENNYKTTPPVLDSDGSFFLYSKLTVDKSRWQQGNVFSCSVMHEALHNHYTQKSLSLSPGGGGSGSAHPIPDSSPLLQFGGQVRQRYLYTDDACQTEAHLEIREDGTVGGAADQSPESLLQLKALKPGVIQILGVKTSRFLCQRPDGALYGSLHFDPEACSFRELLLEDGYNVYQSEAHGLPLHLPGCKSPHRDPAPRGPARFLPLPGLPPAPPEPPGILAPQPPDVGSSDPLSMVGSQGRSPSYAS

SEQ ID NO: 730 - protein, 473 aa, Artificial Sequence
  Fusion Protein
HGEGTFTSDLSKQLEEEAVQLFIEWLLATGPSSGKPPPESGGGGGGGSGGGGSGGGGSADKTHTCPPCPAPELLGGPSVFLFPPKPKDTLMISRTPEVTCVVVDVSHEDPEVKFNWYVDGVEVHNAKTKPREEQYNNASRVVSVLTVLHQDWLNGKEYKCKVSNKALPAPIEKTISKAKGQPREPQVYTLPPSRDELTKNQVSLTCLVKGFYPSDIAVEWESNGQPENNYKTTPPVLDSDGSFFLYSKLTVDKSRWQQGNVFSCSVMHEALHNHYTQKSLSLSPGGGGSGSAHPIPDSSPLLQFGGQVRQRYLYTDDACQTEAHLEIREDGTVGGAADQSPESLLQLKALKPGVIQILGVKTSRFLCQRPDGALYGSLHFDPEACSFRELLLEDGYNVYQSEAHGLPLHLPGCKSPHRDPAPRGPARFLPLPGLPPAPPEPPGILAPQPPDVGSSDPLSMVYPSQGRSPSYAS

SEQ ID NO: 731 - protein, 472 aa, Artificial Sequence
  Fusion Protein
HGEGTFTSDLSKQLEEEAVQLFIEWLLATGPSSGKPPPESGGGGGGGSGGGGSGGGGSADKTHTCPPCPAPELLGGPSVFLFPPKPKDTLMISRTPEVTCVVVDVSHEDPEVKFNWYVDGVEVHNAKTKPREEQYNNASRVVSVLTVLHQDWLNGKEYKCKVSNKALPAPIEKTISKAKGQPREPQVYTLPPSRDELTKNQVSLTCLVKGFYPSDIAVEWESNGQPENNYKTTPPVLDSDGSFFLYSKLTVDKSRWQQGNVFSCSVMHEALHNHYTQKSLSLSPGGGGSGSAHPIPDSSPLLQFGGQVRQRYLYTDDACQTEAHLEIREDGTVGGAADQSPESLLQLKALKPGVIQILGVKTSRFLCQRPDGALYGSLHFDPEACSFRELLLEDGYNVYQSEAHGLPLHLCGNKSPHRDPAPRGPARFLPLPGLPPAPPEPPGILAPQPPDVGSSDPLSMVGSQGRSPSYAS

SEQ ID NO: 732 - protein, 473 aa, Artificial Sequence
  Fusion Protein
HGEGTFTSDLSKQLEEEAVQLFIEWLLATGPSSGKPPPESGGGGGGGSGGGGSGGGGSADKTHTCPPCPAPELLGGPSVFLFPPKPKDTLMISRTPEVTCVVVDVSHEDPEVKFNWYVDGVEVHNAKTKPREEQYNNASRVVSVLTVLHQDWLNGKEYKCKVSNKALPAPIEKTISKAKGQPREPQVYTLPPSRDELTKNQVSLTCLVKGFYPSDIAVEWESNGQPENNYKTTPPVLDSDGSFFLYSKLTVDKSRWQQGNVFSCSVMHEALHNHYTQKSLSLSPGGGGSGSAHPIPDSSPLLQFGGQVRQRYLYTDDACQTEAHLEIREDGTVGGAADQSPESLLQLKALKPGVIQILGVKTSRFLCQRPDGALYGSLHFDPEACSFRELLLEDGYNVYQSEAHGLPLHLCGNKSPHRDPAPRGPARFLPLPGLPPAPPEPPGILAPQPPDVGSSDPLSMVYPSQGRSPSYAS

SEQ ID NO: 733 - protein, 474 aa, Artificial Sequence
  Fusion Protein
HGEGTFTSDLSKQLEEEAVQLFIEWLLATGPSSGKPPPESGGGGGGGSGGGGSGGGGSAESKYGPPCPPCPAPEFEGGPSVFLFPPKPKDTLMISRTPEVTCVVVDVSQEDPEVQFNWYVDGVEVHNAKTKPREEQFNSTYRVVSVLTVLHQDWLNGKEYKCKVSNKGLPSSIEKTISKAKGQPREPQVYTLPPSQEEMTKNQVSLTCLVKGFYPSDIAVEWESNGQPENNYKTTPPVLDSDGSFFLYSRLTVDKSRWQEGNVFSCSVMHEALHNHYTQKSLSLSLGGGGSGSAHPIPDSSPLLQFGGQVRQRYLYTDDACQTEAHLEIREDGTVGGAADQSPESLLQLKALKPGVIQILGVKTSRFLCQRPDGALYGSLHFDPEACSFRELLLEDGYNVYQSEAHGLPLHLPGCKSPHRDPAPRGPARFLPLPGLPPAPPEPPGILAPQPPDVGSSDPLSMVGSQGRSPSYAS

SEQ ID NO: 734 - protein, 474 aa, Artificial Sequence
  Fusion Protein
HGEGTFTSDLSKQLEEEAVQLFIEWLLATGPSSGKPPPESGGGGGGGSGGGGSGGGGSAESKYGPPCPPCPAPEFEGGPSVFLFPPKPKDTLMISRTPEVTCVVVDVSQEDPEVQFNWYVDGVEVHNAKTKPREEQFNSTYRVVSVLTVLHQDWLNGKEYKCKVSNKGLPSSIEKTISKAKGQPREPQVYTLPPSQEEMTKNQVSLTCLVKGFYPSDIAVEWESNGQPENNYKTTPPVLDSDGSFFLYSRLTVDKSRWQEGNVFSCSVMHEALHNHYTQKSLSLSLGGGGSGSAHPIPDSSPLLQFGGQVRQRYLYTDDACQTEAHLEIREDGTVGGAADQSPESLLQLKALKPGVIQILGVKTSRFLCQRPDGALYGSLHFDPEACSFRELLLEDGYNVYQSEAHGLPLHLCGNKSPHRDPAPRGPARFLPLPGLPPAPPEPPGILAPQPPDVGSSDPLSMVGSQGRSPSYAS

SEQ ID NO: 735 - protein, 475 aa, Artificial Sequence
  Fusion Protein
HGEGTFTSDLSKQLEEEAVQLFIEWLLATGPSSGKPPPESGGGGGGGSGGGGSGGGGSAESKYGPPCPPCPAPEFEGGPSVFLFPPKPKDTLMISRTPEVTCVVVDVSQEDPEVQFNWYVDGVEVHNAKTKPREEQFNSTYRVVSVLTVLHQDWLNGKEYKCKVSNKGLPSSIEKTISKAKGQPREPQVYTLPPSQEEMTKNQVSLTCLVKGFYPSDIAVEWESNGQPENNYKTTPPVLDSDGSFFLYSRLTVDKSRWQEGNVFSCSVMHEALHNHYTQKSLSLSLGGGGSGSAHPIPDSSPLLQFGGQVRQRYLYTDDACQTEAHLEIREDGTVGGAADQSPESLLQLKALKPGVIQILGVKTSRFLCQRPDGALYGSLHFDPEACSFRELLLEDGYNVYQSEAHGLPLHLCGNKSPHRDPAPRGPARFLPLPGLPPAPPEPPGILAPQPPDVGSSDPLSMVYPSQGRSPSYAS

SEQ ID NO: 736 - protein, 472 aa, Artificial Sequence
  Fusion Protein
HGEGTFTSDLSKQLEEEAVQLFIEWLLATGPSSGKPPPKSGGGGGGGSGGGGSGGGGSADKTHTCPPCPAPEAAGGPSVFLFPPKPKDTLMISRTPEVTCVVVDVSHEDPEVKFNWYVDGVEVHNAKTKPREEQYNSTYRVVSVLTVLHQDWLNGKEYKCKVSNKALPAPIEKTISKAKGQPREPQVYTLPPSRDELTKNQVSLTCLVKGFYPSDIAVEWESNGQPENNYKTTPPVLDSDGSFFLYSKLTVDKSRWQQGNVFSCSVMHEALHNHYTQKSLSLSPGGGGSGSAHPIPDSSPLLQFGGQVRQRYLYTDDACQTEAHLEIREDGTVGGAADQSPESLLQLKALKPGVIQILGVKTSRFLCQRPDGALYGSLHFDPEACSFRELLLEDGYNVYQSEAHGLPLHLPGCKSPHRDPAPRGPARFLPLPGLPPAPPEPPGILAPQPPDVGSSDPLSMVGSQGRSPSYAS

SEQ ID NO: 737 - protein, 473 aa, Artificial Sequence
  Fusion Protein
HGEGTFTSDLSKQLEEEAVQLFIEWLLATGPSSGKPPPKSGGGGGGGSGGGGSGGGGSADKTHTCPPCPAPEAAGGPSVFLFPPKPKDTLMISRTPEVTCVVVDVSHEDPEVKFNWYVDGVEVHNAKTKPREEQYNSTYRVVSVLTVLHQDWLNGKEYKCKVSNKALPAPIEKTISKAKGQPREPQVYTLPPSRDELTKNQVSLTCLVKGFYPSDIAVEWESNGQPENNYKTTPPVLDSDGSFFLYSKLTVDKSRWQQGNVFSCSVMHEALHNHYTQKSLSLSPGGGGSGSAHPIPDSSPLLQFGGQVRQRYLYTDDACQTEAHLEIREDGTVGGAADQSPESLLQLKALKPGVIQILGVKTSRFLCQRPDGALYGSLHFDPEACSFRELLLEDGYNVYQSEAHGLPLHLPGCKSPHRDPAPRGPARFLPLPGLPPAPPEPPGILAPQPPDVGSSDPLSMVYPSQGRSPSYAS

SEQ ID NO: 738 - protein, 472 aa, Artificial Sequence
  Fusion Protein
HGEGTFTSDLSKQLEEEAVQLFIEWLLATGPSSGKPPPKSGGGGGGGSGGGGSGGGGSADKTHTCPPCPAPEAAGGPSVFLFPPKPKDTLMISRTPEVTCVVVDVSHEDPEVKFNWYVDGVEVHNAKTKPREEQYNSTYRVVSVLTVLHQDWLNGKEYKCKVSNKALPAPIEKTISKAKGQPREPQVYTLPPSRDELTKNQVSLTCLVKGFYPSDIAVEWESNGQPENNYKTTPPVLDSDGSFFLYSKLTVDKSRWQQGNVFSCSVMHEALHNHYTQKSLSLSPGGGGSGSAHPIPDSSPLLQFGGQVRQRYLYTDDACQTEAHLEIREDGTVGGAADQSPESLLQLKALKPGVIQILGVKTSRFLCQRPDGALYGSLHFDPEACSFRELLLEDGYNVYQSEAHGLPLHLCGNKSPHRDPAPRGPARFLPLPGLPPAPPEPPGILAPQPPDVGSSDPLSMVGSQGRSPSYAS

SEQ ID NO: 739 - protein, 473 aa, Artificial Sequence
  Fusion Protein
HGEGTFTSDLSKQLEEEAVQLFIEWLLATGPSSGKPPPKSGGGGGGGSGGGGSGGGGSADKTHTCPPCPAPEAAGGPSVFLFPPKPKDTLMISRTPEVTCVVVDVSHEDPEVKFNWYVDGVEVHNAKTKPREEQYNSTYRVVSVLTVLHQDWLNGKEYKCKVSNKALPAPIEKTISKAKGQPREPQVYTLPPSRDELTKNQVSLTCLVKGFYPSDIAVEWESNGQPENNYKTTPPVLDSDGSFFLYSKLTVDKSRWQQGNVFSCSVMHEALHNHYTQKSLSLSPGGGGSGSAHPIPDSSPLLQFGGQVRQRYLYTDDACQTEAHLEIREDGTVGGAADQSPESLLQLKALKPGVIQILGVKTSRFLCQRPDGALYGSLHFDPEACSFRELLLEDGYNVYQSEAHGLPLHLCGNKSPHRDPAPRGPARFLPLPGLPPAPPEPPGILAPQPPDVGSSDPLSMVYPSQGRSPSYAS

SEQ ID NO: 740 - protein, 472 aa, Artificial Sequence
  Fusion Protein
HGEGTFTSDLSKQLEEEAVQLFIEWLLATGPSSGKPPPKSGGGGGGGSGGGGSGGGGSADKTHTCPPCPAPELLGGPSVFLFPPKPKDTLMISRTPEVTCVVVDVSHEDPEVKFNWYVDGVEVHNAKTKPREEQYNNASRVVSVLTVLHQDWLNGKEYKCKVSNKALPAPIEKTISKAKGQPREPQVYTLPPSRDELTKNQVSLTCLVKGFYPSDIAVEWESNGQPENNYKTTPPVLDSDGSFFLYSKLTVDKSRWQQGNVFSCSVMHEALHNHYTQKSLSLSPGGGGSGSAHPIPDSSPLLQFGGQVRQRYLYTDDACQTEAHLEIREDGTVGGAADQSPESLLQLKALKPGVIQILGVKTSRFLCQRPDGALYGSLHFDPEACSFRELLLEDGYNVYQSEAHGLPLHLPGCKSPHRDPAPRGPARFLPLPGLPPAPPEPPGILAPQPPDVGSSDPLSMVGSQGRSPSYAS

SEQ ID NO: 741 - protein, 473 aa, Artificial Sequence
  Fusion Protein
HGEGTFTSDLSKQLEEEAVQLFIEWLLATGPSSGKPPPKSGGGGGGGSGGGGSGGGGSADKTHTCPPCPAPELLGGPSVFLFPPKPKDTLMISRTPEVTCVVVDVSHEDPEVKFNWYVDGVEVHNAKTKPREEQYNNASRVVSVLTVLHQDWLNGKEYKCKVSNKALPAPIEKTISKAKGQPREPQVYTLPPSRDELTKNQVSLTCLVKGFYPSDIAVEWESNGQPENNYKTTPPVLDSDGSFFLYSKLTVDKSRWQQGNVFSCSVMHEALHNHYTQKSLSLSPGGGGSGSAHPIPDSSPLLQFGGQVRQRYLYTDDACQTEAHLEIREDGTVGGAADQSPESLLQLKALKPGVIQILGVKTSRFLCQRPDGALYGSLHFDPEACSFRELLLEDGYNVYQSEAHGLPLHLPGCKSPHRDPAPRGPARFLPLPGLPPAPPEPPGILAPQPPDVGSSDPLSMVYPSQGRSPSYAS

SEQ ID NO: 742 - protein, 472 aa, Artificial Sequence
  Fusion Protein
HGEGTFTSDLSKQLEEEAVQLFIEWLLATGPSSGKPPPKSGGGGGGGSGGGGSGGGGSADKTHTCPPCPAPELLGGPSVFLFPPKPKDTLMISRTPEVTCVVVDVSHEDPEVKFNWYVDGVEVHNAKTKPREEQYNNASRVVSVLTVLHQDWLNGKEYKCKVSNKALPAPIEKTISKAKGQPREPQVYTLPPSRDELTKNQVSLTCLVKGFYPSDIAVEWESNGQPENNYKTTPPVLDSDGSFFLYSKLTVDKSRWQQGNVFSCSVMHEALHNHYTQKSLSLSPGGGGSGSAHPIPDSSPLLQFGGQVRQRYLYTDDACQTEAHLEIREDGTVGGAADQSPESLLQLKALKPGVIQILGVKTSRFLCQRPDGALYGSLHFDPEACSFRELLLEDGYNVYQSEAHGLPLHLCGNKSPHRDPAPRGPARFLPLPGLPPAPPEPPGILAPQPPDVGSSDPLSMVGSQGRSPSYAS

SEQ ID NO: 743 - protein, 473 aa, Artificial Sequence
  Fusion Protein
HGEGTFTSDLSKQLEEEAVQLFIEWLLATGPSSGKPPPKSGGGGGGGSGGGGSGGGGSADKTHTCPPCPAPELLGGPSVFLFPPKPKDTLMISRTPEVTCVVVDVSHEDPEVKFNWYVDGVEVHNAKTKPREEQYNNASRVVSVLTVLHQDWLNGKEYKCKVSNKALPAPIEKTISKAKGQPREPQVYTLPPSRDELTKNQVSLTCLVKGFYPSDIAVEWESNGQPENNYKTTPPVLDSDGSFFLYSKLTVDKSRWQQGNVFSCSVMHEALHNHYTQKSLSLSPGGGGSGSAHPIPDSSPLLQFGGQVRQRYLYTDDACQTEAHLEIREDGTVGGAADQSPESLLQLKALKPGVIQILGVKTSRFLCQRPDGALYGSLHFDPEACSFRELLLEDGYNVYQSEAHGLPLHLCGNKSPHRDPAPRGPARFLPLPGLPPAPPEPPGILAPQPPDVGSSDPLSMVYPSQGRSPSYAS

SEQ ID NO: 744 - protein, 474 aa, Artificial Sequence
  Fusion Protein
HGEGTFTSDLSKQLEEEAVQLFIEWLLATGPSSGKPPPKSGGGGGGGSGGGGSGGGGSAESKYGPPCPPCPAPEFEGGPSVFLFPPKPKDTLMISRTPEVTCVVVDVSQEDPEVQFNWYVDGVEVHNAKTKPREEQFNSTYRVVSVLTVLHQDWLNGKEYKCKVSNKGLPSSIEKTISKAKGQPREPQVYTLPPSQEEMTKNQVSLTCLVKGFYPSDIAVEWESNGQPENNYKTTPPVLDSDGSFFLYSRLTVDKSRWQEGNVFSCSVMHEALHNHYTQKSLSLSLGGGGSGSAHPIPDSSPLLQFGGQVRQRYLYTDDACQTEAHLEIREDGTVGGAADQSPESLLQLKALKPGVIQILGVKTSRFLCQRPDGALYGSLHFDPEACSFRELLLEDGYNVYQSEAHGLPLHLPGCKSPHRDPAPRGPARFLPLPGLPPAPPEPPGILAPQPPDVGSSDPLSMVGSQGRSPSYAS

SEQ ID NO: 745 - protein, 474 aa, Artificial Sequence
  Fusion Protein
HGEGTFTSDLSKQLEEEAVQLFIEWLLATGPSSGKPPPKSGGGGGGGSGGGGSGGGGSAESKYGPPCPPCPAPEFEGGPSVFLFPPKPKDTLMISRTPEVTCVVVDVSQEDPEVQFNWYVDGVEVHNAKTKPREEQFNSTYRVVSVLTVLHQDWLNGKEYKCKVSNKGLPSSIEKTISKAKGQPREPQVYTLPPSQEEMTKNQVSLTCLVKGFYPSDIAVEWESNGQPENNYKTTPPVLDSDGSFFLYSRLTVDKSRWQEGNVFSCSVMHEALHNHYTQKSLSLSLGGGGSGSAHPIPDSSPLLQFGGQVRQRYLYTDDACQTEAHLEIREDGTVGGAADQSPESLLQLKALKPGVIQILGVKTSRFLCQRPDGALYGSLHFDPEACSFRELLLEDGYNVYQSEAHGLPLHLCGNKSPHRDPAPRGPARFLPLPGLPPAPPEPPGILAPQPPDVGSSDPLSMVGSQGRSPSYAS

SEQ ID NO: 746 - protein, 475 aa, Artificial Sequence
  Fusion Protein
HGEGTFTSDLSKQLEEEAVQLFIEWLLATGPSSGKPPPKSGGGGGGGSGGGGSGGGGSAESKYGPPCPPCPAPEFEGGPSVFLFPPKPKDTLMISRTPEVTCVVVDVSQEDPEVQFNWYVDGVEVHNAKTKPREEQFNSTYRVVSVLTVLHQDWLNGKEYKCKVSNKGLPSSIEKTISKAKGQPREPQVYTLPPSQEEMTKNQVSLTCLVKGFYPSDIAVEWESNGQPENNYKTTPPVLDSDGSFFLYSRLTVDKSRWQEGNVFSCSVMHEALHNHYTQKSLSLSLGGGGSGSAHPIPDSSPLLQFGGQVRQRYLYTDDACQTEAHLEIREDGTVGGAADQSPESLLQLKALKPGVIQILGVKTSRFLCQRPDGALYGSLHFDPEACSFRELLLEDGYNVYQSEAHGLPLHLCGNKSPHRDPAPRGPARFLPLPGLPPAPPEPPGILAPQPPDVGSSDPLSMVYPSQGRSPSYAS

SEQ ID NO: 747 - protein, 471 aa, Artificial Sequence
  Fusion Protein
HGEGTFTSDLSIQLEEEAVRLFIEWLLATGPVSGAPPPSGGGGGGGSGGGGSGGGGSADKTHTCPPCPAPEAAGGPSVFLFPPKPKDTLMISRTPEVTCVVVDVSHEDPEVKFNWYVDGVEVHNAKTKPREEQYNSTYRVVSVLTVLHQDWLNGKEYKCKVSNKALPAPIEKTISKAKGQPREPQVYTLPPSRDELTKNQVSLTCLVKGFYPSDIAVEWESNGQPENNYKTTPPVLDSDGSFFLYSKLTVDKSRWQQGNVFSCSVMHEALHNHYTQKSLSLSPGGGGSGSAHPIPDSSPLLQFGGQVRQRYLYTDDACQTEAHLEIREDGTVGGAADQSPESLLQLKALKPGVIQILGVKTSRFLCQRPDGALYGSLHFDPEACSFRELLLEDGYNVYQSEAHGLPLHLPGCKSPHRDPAPRGPARFLPLPGLPPAPPEPPGILAPQPPDVGSSDPLSMVGSQGRSPSYAS

SEQ ID NO: 748 - protein, 472 aa, Artificial Sequence
  Fusion Protein
HGEGTFTSDLSIQLEEEAVRLFIEWLLATGPVSGAPPPSGGGGGGGSGGGGSGGGGSADKTHTCPPCPAPEAAGGPSVFLFPPKPKDTLMISRTPEVTCVVVDVSHEDPEVKFNWYVDGVEVHNAKTKPREEQYNSTYRVVSVLTVLHQDWLNGKEYKCKVSNKALPAPIEKTISKAKGQPREPQVYTLPPSRDELTKNQVSLTCLVKGFYPSDIAVEWESNGQPENNYKTTPPVLDSDGSFFLYSKLTVDKSRWQQGNVFSCSVMHEALHNHYTQKSLSLSPGGGGSGSAHPIPDSSPLLQFGGQVRQRYLYTDDACQTEAHLEIREDGTVGGAADQSPESLLQLKALKPGVIQILGVKTSRFLCQRPDGALYGSLHFDPEACSFRELLLEDGYNVYQSEAHGLPLHLPGCKSPHRDPAPRGPARFLPLPGLPPAPPEPPGILAPQPPDVGSSDPLSMVYPSQGRSPSYAS

SEQ ID NO: 749 - protein, 471 aa, Artificial Sequence
  Fusion Protein
HGEGTFTSDLSIQLEEEAVRLFIEWLLATGPVSGAPPPSGGGGGGGSGGGGSGGGGSADKTHTCPPCPAPEAAGGPSVFLFPPKPKDTLMISRTPEVTCVVVDVSHEDPEVKFNWYVDGVEVHNAKTKPREEQYNSTYRVVSVLTVLHQDWLNGKEYKCKVSNKALPAPIEKTISKAKGQPREPQVYTLPPSRDELTKNQVSLTCLVKGFYPSDIAVEWESNGQPENNYKTTPPVLDSDGSFFLYSKLTVDKSRWQQGNVFSCSVMHEALHNHYTQKSLSLSPGGGGSGSAHPIPDSSPLLQFGGQVRQRYLYTDDACQTEAHLEIREDGTVGGAADQSPESLLQLKALKPGVIQILGVKTSRFLCQRPDGALYGSLHFDPEACSFRELLLEDGYNVYQSEAHGLPLHLCGNKSPHRDPAPRGPARFLPLPGLPPAPPEPPGILAPQPPDVGSSDPLSMVGSQGRSPSYAS

SEQ ID NO: 750 - protein, 472 aa, Artificial Sequence
  Fusion Protein
HGEGTFTSDLSIQLEEEAVRLFIEWLLATGPVSGAPPPSGGGGGGGSGGGGSGGGGSADKTHTCPPCPAPEAAGGPSVFLFPPKPKDTLMISRTPEVTCVVVDVSHEDPEVKFNWYVDGVEVHNAKTKPREEQYNSTYRVVSVLTVLHQDWLNGKEYKCKVSNKALPAPIEKTISKAKGQPREPQVYTLPPSRDELTKNQVSLTCLVKGFYPSDIAVEWESNGQPENNYKTTPPVLDSDGSFFLYSKLTVDKSRWQQGNVFSCSVMHEALHNHYTQKSLSLSPGGGGSGSAHPIPDSSPLLQFGGQVRQRYLYTDDACQTEAHLEIREDGTVGGAADQSPESLLQLKALKPGVIQILGVKTSRFLCQRPDGALYGSLHFDPEACSFRELLLEDGYNVYQSEAHGLPLHLCGNKSPHRDPAPRGPARFLPLPGLPPAPPEPPGILAPQPPDVGSSDPLSMVYPSQGRSPSYAS

SEQ ID NO: 751 - protein, 471 aa, Artificial Sequence
  Fusion Protein
HGEGTFTSDLSIQLEEEAVRLFIEWLLATGPVSGAPPPSGGGGGGGSGGGGSGGGGSADKTHTCPPCPAPELLGGPSVFLFPPKPKDTLMISRTPEVTCVVVDVSHEDPEVKFNWYVDGVEVHNAKTKPREEQYNNASRVVSVLTVLHQDWLNGKEYKCKVSNKALPAPIEKTISKAKGQPREPQVYTLPPSRDELTKNQVSLTCLVKGFYPSDIAVEWESNGQPENNYKTTPPVLDSDGSFFLYSKLTVDKSRWQQGNVFSCSVMHEALHNHYTQKSLSLSPGGGGSGSAHPIPDSSPLLQFGGQVRQRYLYTDDACQTEAHLEIREDGTVGGAADQSPESLLQLKALKPGVIQILGVKTSRFLCQRPDGALYGSLHFDPEACSFRELLLEDGYNVYQSEAHGLPLHLPGCKSPHRDPAPRGPARFLPLPGLPPAPPEPPGILAPQPPDVGSSDPLSMVGSQGRSPSYAS

SEQ ID NO: 752 - protein, 472 aa, Artificial Sequence
  Fusion Protein
HGEGTFTSDLSIQLEEEAVRLFIEWLLATGPVSGAPPPSGGGGGGGSGGGGSGGGGSADKTHTCPPCPAPELLGGPSVFLFPPKPKDTLMISRTPEVTCVVVDVSHEDPEVKFNWYVDGVEVHNAKTKPREEQYNNASRVVSVLTVLHQDWLNGKEYKCKVSNKALPAPIEKTISKAKGQPREPQVYTLPPSRDELTKNQVSLTCLVKGFYPSDIAVEWESNGQPENNYKTTPPVLDSDGSFFLYSKLTVDKSRWQQGNVFSCSVMHEALHNHYTQKSLSLSPGGGGSGSAHPIPDSSPLLQFGGQVRQRYLYTDDACQTEAHLEIREDGTVGGAADQSPESLLQLKALKPGVIQILGVKTSRFLCQRPDGALYGSLHFDPEACSFRELLLEDGYNVYQSEAHGLPLHLPGCKSPHRDPAPRGPARFLPLPGLPPAPPEPPGILAPQPPDVGSSDPLSMVYPSQGRSPSYAS

SEQ ID NO: 753 - protein, 471 aa, Artificial Sequence
  Fusion Protein
HGEGTFTSDLSIQLEEEAVRLFIEWLLATGPVSGAPPPSGGGGGGGSGGGGSGGGGSADKTHTCPPCPAPELLGGPSVFLFPPKPKDTLMISRTPEVTCVVVDVSHEDPEVKFNWYVDGVEVHNAKTKPREEQYNNASRVVSVLTVLHQDWLNGKEYKCKVSNKALPAPIEKTISKAKGQPREPQVYTLPPSRDELTKNQVSLTCLVKGFYPSDIAVEWESNGQPENNYKTTPPVLDSDGSFFLYSKLTVDKSRWQQGNVFSCSVMHEALHNHYTQKSLSLSPGGGGSGSAHPIPDSSPLLQFGGQVRQRYLYTDDACQTEAHLEIREDGTVGGAADQSPESLLQLKALKPGVIQILGVKTSRFLCQRPDGALYGSLHFDPEACSFRELLLEDGYNVYQSEAHGLPLHLCGNKSPHRDPAPRGPARFLPLPGLPPAPPEPPGILAPQPPDVGSSDPLSMVGSQGRSPSYAS

SEQ ID NO: 754 - protein, 472 aa, Artificial Sequence
  Fusion Protein
HGEGTFTSDLSIQLEEEAVRLFIEWLLATGPVSGAPPPSGGGGGGGSGGGGSGGGGSADKTHTCPPCPAPELLGGPSVFLFPPKPKDTLMISRTPEVTCVVVDVSHEDPEVKFNWYVDGVEVHNAKTKPREEQYNNASRVVSVLTVLHQDWLNGKEYKCKVSNKALPAPIEKTISKAKGQPREPQVYTLPPSRDELTKNQVSLTCLVKGFYPSDIAVEWESNGQPENNYKTTPPVLDSDGSFFLYSKLTVDKSRWQQGNVFSCSVMHEALHNHYTQKSLSLSPGGGGSGSAHPIPDSSPLLQFGGQVRQRYLYTDDACQTEAHLEIREDGTVGGAADQSPESLLQLKALKPGVIQILGVKTSRFLCQRPDGALYGSLHFDPEACSFRELLLEDGYNVYQSEAHGLPLHLCGNKSPHRDPAPRGPARFLPLPGLPPAPPEPPGILAPQPPDVGSSDPLSMVYPSQGRSPSYAS

SEQ ID NO: 755 - protein, 474 aa, Artificial Sequence
  Fusion Protein
HGEGTFTSDLSIQLEEEAVRLFIEWLLATGPVSGAPPPSGGGGGGGSGGGGSGGGGSAESKYGPPCPPCPAPEFEGGPSVFLFPPKPKDTLMISRTPEVTCVVVDVSQEDPEVQFNWYVDGVEVHNAKTKPREEQFNSTYRVVSVLTVLHQDWLNGKEYKCKVSNKGLPSSIEKTISKAKGQPREPQVYTLPPSQEEMTKNQVSLTCLVKGFYPSDIAVEWESNGQPENNYKTTPPVLDSDGSFFLYSRLTVDKSRWQEGNVFSCSVMHEALHNHYTQKSLSLSLGGGGSGSAHPIPDSSPLLQFGGQVRQRYLYTDDACQTEAHLEIREDGTVGGAADQSPESLLQLKALKPGVIQILGVKTSRFLCQRPDGALYGSLHFDPEACSFRELLLEDGYNVYQSEAHGLPLHLPGCKSPHRDPAPRGPARFLPLPGLPPAPPEPPGILAPQPPDVGSSDPLSMVYPSQGRSPSYAS

SEQ ID NO: 756 - protein, 473 aa, Artificial Sequence
  Fusion Protein
HGEGTFTSDLSIQLEEEAVRLFIEWLLATGPVSGAPPPSGGGGGGGSGGGGSGGGGSAESKYGPPCPPCPAPEFEGGPSVFLFPPKPKDTLMISRTPEVTCVVVDVSQEDPEVQFNWYVDGVEVHNAKTKPREEQFNSTYRVVSVLTVLHQDWLNGKEYKCKVSNKGLPSSIEKTISKAKGQPREPQVYTLPPSQEEMTKNQVSLTCLVKGFYPSDIAVEWESNGQPENNYKTTPPVLDSDGSFFLYSRLTVDKSRWQEGNVFSCSVMHEALHNHYTQKSLSLSLGGGGSGSAHPIPDSSPLLQFGGQVRQRYLYTDDACQTEAHLEIREDGTVGGAADQSPESLLQLKALKPGVIQILGVKTSRFLCQRPDGALYGSLHFDPEACSFRELLLEDGYNVYQSEAHGLPLHLCGNKSPHRDPAPRGPARFLPLPGLPPAPPEPPGILAPQPPDVGSSDPLSMVGSQGRSPSYAS

SEQ ID NO: 757 - protein, 474 aa, Artificial Sequence
  Fusion Protein
HGEGTFTSDLSIQLEEEAVRLFIEWLLATGPVSGAPPPSGGGGGGGSGGGGSGGGGSAESKYGPPCPPCPAPEFEGGPSVFLFPPKPKDTLMISRTPEVTCVVVDVSQEDPEVQFNWYVDGVEVHNAKTKPREEQFNSTYRVVSVLTVLHQDWLNGKEYKCKVSNKGLPSSIEKTISKAKGQPREPQVYTLPPSQEEMTKNQVSLTCLVKGFYPSDIAVEWESNGQPENNYKTTPPVLDSDGSFFLYSRLTVDKSRWQEGNVFSCSVMHEALHNHYTQKSLSLSLGGGGSGSAHPIPDSSPLLQFGGQVRQRYLYTDDACQTEAHLEIREDGTVGGAADQSPESLLQLKALKPGVIQILGVKTSRFLCQRPDGALYGSLHFDPEACSFRELLLEDGYNVYQSEAHGLPLHLCGNKSPHRDPAPRGPARFLPLPGLPPAPPEPPGILAPQPPDVGSSDPLSMVYPSQGRSPSYAS

SEQ ID NO: 758 - protein, 471 aa, Artificial Sequence
  Fusion Protein
HGEGTFTSDLSIQLEEEAVQLFIEWLLATGPSSGAPPPSGGGGGGGSGGGGSGGGGSADKTHTCPPCPAPEAAGGPSVFLFPPKPKDTLMISRTPEVTCVVVDVSHEDPEVKFNWYVDGVEVHNAKTKPREEQYNSTYRVVSVLTVLHQDWLNGKEYKCKVSNKALPAPIEKTISKAKGQPREPQVYTLPPSRDELTKNQVSLTCLVKGFYPSDIAVEWESNGQPENNYKTTPPVLDSDGSFFLYSKLTVDKSRWQQGNVFSCSVMHEALHNHYTQKSLSLSPGGGGSGSAHPIPDSSPLLQFGGQVRQRYLYTDDACQTEAHLEIREDGTVGGAADQSPESLLQLKALKPGVIQILGVKTSRFLCQRPDGALYGSLHFDPEACSFRELLLEDGYNVYQSEAHGLPLHLPGCKSPHRDPAPRGPARFLPLPGLPPAPPEPPGILAPQPPDVGSSDPLSMVGSQGRSPSYAS

SEQ ID NO: 759 - protein, 472 aa, Artificial Sequence
  Fusion Protein
HGEGTFTSDLSIQLEEEAVQLFIEWLLATGPSSGAPPPSGGGGGGGSGGGGSGGGGSADKTHTCPPCPAPEAAGGPSVFLFPPKPKDTLMISRTPEVTCVVVDVSHEDPEVKFNWYVDGVEVHNAKTKPREEQYNSTYRVVSVLTVLHQDWLNGKEYKCKVSNKALPAPIEKTISKAKGQPREPQVYTLPPSRDELTKNQVSLTCLVKGFYPSDIAVEWESNGQPENNYKTTPPVLDSDGSFFLYSKLTVDKSRWQQGNVFSCSVMHEALHNHYTQKSLSLSPGGGGSGSAHPIPDSSPLLQFGGQVRQRYLYTDDACQTEAHLEIREDGTVGGAADQSPESLLQLKALKPGVIQILGVKTSRFLCQRPDGALYGSLHFDPEACSFRELLLEDGYNVYQSEAHGLPLHLPGCKSPHRDPAPRGPARFLPLPGLPPAPPEPPGILAPQPPDVGSSDPLSMVYPSQGRSPSYAS

SEQ ID NO: 760 - protein, 471 aa, Artificial Sequence
  Fusion Protein
HGEGTFTSDLSIQLEEEAVQLFIEWLLATGPSSGAPPPSGGGGGGGSGGGGSGGGGSADKTHTCPPCPAPEAAGGPSVFLFPPKPKDTLMISRTPEVTCVVVDVSHEDPEVKFNWYVDGVEVHNAKTKPREEQYNSTYRVVSVLTVLHQDWLNGKEYKCKVSNKALPAPIEKTISKAKGQPREPQVYTLPPSRDELTKNQVSLTCLVKGFYPSDIAVEWESNGQPENNYKTTPPVLDSDGSFFLYSKLTVDKSRWQQGNVFSCSVMHEALHNHYTQKSLSLSPGGGGSGSAHPIPDSSPLLQFGGQVRQRYLYTDDACQTEAHLEIREDGTVGGAADQSPESLLQLKALKPGVIQILGVKTSRFLCQRPDGALYGSLHFDPEACSFRELLLEDGYNVYQSEAHGLPLHLCGNKSPHRDPAPRGPARFLPLPGLPPAPPEPPGILAPQPPDVGSSDPLSMVGSQGRSPSYAS

SEQ ID NO: 761 - protein, 472 aa, Artificial Sequence
  Fusion Protein
HGEGTFTSDLSIQLEEEAVQLFIEWLLATGPSSGAPPPSGGGGGGGSGGGGSGGGGSADKTHTCPPCPAPEAAGGPSVFLFPPKPKDTLMISRTPEVTCVVVDVSHEDPEVKFNWYVDGVEVHNAKTKPREEQYNSTYRVVSVLTVLHQDWLNGKEYKCKVSNKALPAPIEKTISKAKGQPREPQVYTLPPSRDELTKNQVSLTCLVKGFYPSDIAVEWESNGQPENNYKTTPPVLDSDGSFFLYSKLTVDKSRWQQGNVFSCSVMHEALHNHYTQKSLSLSPGGGGSGSAHPIPDSSPLLQFGGQVRQRYLYTDDACQTEAHLEIREDGTVGGAADQSPESLLQLKALKPGVIQILGVKTSRFLCQRPDGALYGSLHFDPEACSFRELLLEDGYNVYQSEAHGLPLHLCGNKSPHRDPAPRGPARFLPLPGLPPAPPEPPGILAPQPPDVGSSDPLSMVYPSQGRSPSYAS

SEQ ID NO: 762 - protein, 471 aa, Artificial Sequence
  Fusion Protein
HGEGTFTSDLSIQLEEEAVQLFIEWLLATGPSSGAPPPSGGGGGGGSGGGGSGGGGSADKTHTCPPCPAPELLGGPSVFLFPPKPKDTLMISRTPEVTCVVVDVSHEDPEVKFNWYVDGVEVHNAKTKPREEQYNNASRVVSVLTVLHQDWLNGKEYKCKVSNKALPAPIEKTISKAKGQPREPQVYTLPPSRDELTKNQVSLTCLVKGFYPSDIAVEWESNGQPENNYKTTPPVLDSDGSFFLYSKLTVDKSRWQQGNVFSCSVMHEALHNHYTQKSLSLSPGGGGSGSAHPIPDSSPLLQFGGQVRQRYLYTDDACQTEAHLEIREDGTVGGAADQSPESLLQLKALKPGVIQILGVKTSRFLCQRPDGALYGSLHFDPEACSFRELLLEDGYNVYQSEAHGLPLHLPGCKSPHRDPAPRGPARFLPLPGLPPAPPEPPGILAPQPPDVGSSDPLSMVGSQGRSPSYAS

SEQ ID NO: 763 - protein, 472 aa, Artificial Sequence
  Fusion Protein
HGEGTFTSDLSIQLEEEAVQLFIEWLLATGPSSGAPPPSGGGGGGGSGGGGSGGGGSADKTHTCPPCPAPELLGGPSVFLFPPKPKDTLMISRTPEVTCVVVDVSHEDPEVKFNWYVDGVEVHNAKTKPREEQYNNASRVVSVLTVLHQDWLNGKEYKCKVSNKALPAPIEKTISKAKGQPREPQVYTLPPSRDELTKNQVSLTCLVKGFYPSDIAVEWESNGQPENNYKTTPPVLDSDGSFFLYSKLTVDKSRWQQGNVFSCSVMHEALHNHYTQKSLSLSPGGGGSGSAHPIPDSSPLLQFGGQVRQRYLYTDDACQTEAHLEIREDGTVGGAADQSPESLLQLKALKPGVIQILGVKTSRFLCQRPDGALYGSLHFDPEACSFRELLLEDGYNVYQSEAHGLPLHLPGCKSPHRDPAPRGPARFLPLPGLPPAPPEPPGILAPQPPDVGSSDPLSMVYPSQGRSPSYAS

SEQ ID NO: 764 - protein, 471 aa, Artificial Sequence
  Fusion Protein
HGEGTFTSDLSIQLEEEAVQLFIEWLLATGPSSGAPPPSGGGGGGGSGGGGSGGGGSADKTHTCPPCPAPELLGGPSVFLFPPKPKDTLMISRTPEVTCVVVDVSHEDPEVKFNWYVDGVEVHNAKTKPREEQYNNASRVVSVLTVLHQDWLNGKEYKCKVSNKALPAPIEKTISKAKGQPREPQVYTLPPSRDELTKNQVSLTCLVKGFYPSDIAVEWESNGQPENNYKTTPPVLDSDGSFFLYSKLTVDKSRWQQGNVFSCSVMHEALHNHYTQKSLSLSPGGGGSGSAHPIPDSSPLLQFGGQVRQRYLYTDDACQTEAHLEIREDGTVGGAADQSPESLLQLKALKPGVIQILGVKTSRFLCQRPDGALYGSLHFDPEACSFRELLLEDGYNVYQSEAHGLPLHLCGNKSPHRDPAPRGPARFLPLPGLPPAPPEPPGILAPQPPDVGSSDPLSMVGSQGRSPSYAS

SEQ ID NO: 765 - protein, 472 aa, Artificial Sequence
  Fusion Protein
HGEGTFTSDLSIQLEEEAVQLFIEWLLATGPSSGAPPPSGGGGGGGSGGGGSGGGGSADKTHTCPPCPAPELLGGPSVFLFPPKPKDTLMISRTPEVTCVVVDVSHEDPEVKFNWYVDGVEVHNAKTKPREEQYNNASRVVSVLTVLHQDWLNGKEYKCKVSNKALPAPIEKTISKAKGQPREPQVYTLPPSRDELTKNQVSLTCLVKGFYPSDIAVEWESNGQPENNYKTTPPVLDSDGSFFLYSKLTVDKSRWQQGNVFSCSVMHEALHNHYTQKSLSLSPGGGGSGSAHPIPDSSPLLQFGGQVRQRYLYTDDACQTEAHLEIREDGTVGGAADQSPESLLQLKALKPGVIQILGVKTSRFLCQRPDGALYGSLHFDPEACSFRELLLEDGYNVYQSEAHGLPLHLCGNKSPHRDPAPRGPARFLPLPGLPPAPPEPPGILAPQPPDVGSSDPLSMVYPSQGRSPSYAS

SEQ ID NO: 766 - protein, 473 aa, Artificial Sequence
  Fusion Protein
HGEGTFTSDLSIQLEEEAVQLFIEWLLATGPSSGAPPPSGGGGGGGSGGGGSGGGGSAESKYGPPCPPCPAPEFEGGPSVFLFPPKPKDTLMISRTPEVTCVVVDVSQEDPEVQFNWYVDGVEVHNAKTKPREEQFNSTYRVVSVLTVLHQDWLNGKEYKCKVSNKGLPSSIEKTISKAKGQPREPQVYTLPPSQEEMTKNQVSLTCLVKGFYPSDIAVEWESNGQPENNYKTTPPVLDSDGSFFLYSRLTVDKSRWQEGNVFSCSVMHEALHNHYTQKSLSLSLGGGGSGSAHPIPDSSPLLQFGGQVRQRYLYTDDACQTEAHLEIREDGTVGGAADQSPESLLQLKALKPGVIQILGVKTSRFLCQRPDGALYGSLHFDPEACSFRELLLEDGYNVYQSEAHGLPLHLPGCKSPHRDPAPRGPARFLPLPGLPPAPPEPPGILAPQPPDVGSSDPLSMVGSQGRSPSYAS

SEQ ID NO: 767 - protein, 474 aa, Artificial Sequence
  Fusion Protein
HGEGTFTSDLSIQLEEEAVQLFIEWLLATGPSSGAPPPSGGGGGGGSGGGGSGGGGSAESKYGPPCPPCPAPEFEGGPSVFLFPPKPKDTLMISRTPEVTCVVVDVSQEDPEVQFNWYVDGVEVHNAKTKPREEQFNSTYRVVSVLTVLHQDWLNGKEYKCKVSNKGLPSSIEKTISKAKGQPREPQVYTLPPSQEEMTKNQVSLTCLVKGFYPSDIAVEWESNGQPENNYKTTPPVLDSDGSFFLYSRLTVDKSRWQEGNVFSCSVMHEALHNHYTQKSLSLSLGGGGSGSAHPIPDSSPLLQFGGQVRQRYLYTDDACQTEAHLEIREDGTVGGAADQSPESLLQLKALKPGVIQILGVKTSRFLCQRPDGALYGSLHFDPEACSFRELLLEDGYNVYQSEAHGLPLHLPGCKSPHRDPAPRGPARFLPLPGLPPAPPEPPGILAPQPPDVGSSDPLSMVYPSQGRSPSYAS

SEQ ID NO: 768 - protein, 473 aa, Artificial Sequence
  Fusion Protein
HGEGTFTSDLSIQLEEEAVQLFIEWLLATGPSSGAPPPSGGGGGGGSGGGGSGGGGSAESKYGPPCPPCPAPEFEGGPSVFLFPPKPKDTLMISRTPEVTCVVVDVSQEDPEVQFNWYVDGVEVHNAKTKPREEQFNSTYRVVSVLTVLHQDWLNGKEYKCKVSNKGLPSSIEKTISKAKGQPREPQVYTLPPSQEEMTKNQVSLTCLVKGFYPSDIAVEWESNGQPENNYKTTPPVLDSDGSFFLYSRLTVDKSRWQEGNVFSCSVMHEALHNHYTQKSLSLSLGGGGSGSAHPIPDSSPLLQFGGQVRQRYLYTDDACQTEAHLEIREDGTVGGAADQSPESLLQLKALKPGVIQILGVKTSRFLCQRPDGALYGSLHFDPEACSFRELLLEDGYNVYQSEAHGLPLHLCGNKSPHRDPAPRGPARFLPLPGLPPAPPEPPGILAPQPPDVGSSDPLSMVGSQGRSPSYAS

SEQ ID NO: 769 - protein, 474 aa, Artificial Sequence
  Fusion Protein
HGEGTFTSDLSIQLEEEAVQLFIEWLLATGPSSGAPPPSGGGGGGGSGGGGSGGGGSAESKYGPPCPPCPAPEFEGGPSVFLFPPKPKDTLMISRTPEVTCVVVDVSQEDPEVQFNWYVDGVEVHNAKTKPREEQFNSTYRVVSVLTVLHQDWLNGKEYKCKVSNKGLPSSIEKTISKAKGQPREPQVYTLPPSQEEMTKNQVSLTCLVKGFYPSDIAVEWESNGQPENNYKTTPPVLDSDGSFFLYSRLTVDKSRWQEGNVFSCSVMHEALHNHYTQKSLSLSLGGGGSGSAHPIPDSSPLLQFGGQVRQRYLYTDDACQTEAHLEIREDGTVGGAADQSPESLLQLKALKPGVIQILGVKTSRFLCQRPDGALYGSLHFDPEACSFRELLLEDGYNVYQSEAHGLPLHLCGNKSPHRDPAPRGPARFLPLPGLPPAPPEPPGILAPQPPDVGSSDPLSMVYPSQGRSPSYAS

SEQ ID NO: 770 - protein, 471 aa, Artificial Sequence
  Fusion Protein
HGEGTFTSDLSIQLEEEAVRLFIEWLLATGPESGAPPPSGGGGGGGSGGGGSGGGGSADKTHTCPPCPAPEAAGGPSVFLFPPKPKDTLMISRTPEVTCVVVDVSHEDPEVKFNWYVDGVEVHNAKTKPREEQYNSTYRVVSVLTVLHQDWLNGKEYKCKVSNKALPAPIEKTISKAKGQPREPQVYTLPPSRDELTKNQVSLTCLVKGFYPSDIAVEWESNGQPENNYKTTPPVLDSDGSFFLYSKLTVDKSRWQQGNVFSCSVMHEALHNHYTQKSLSLSPGGGGSGSAHPIPDSSPLLQFGGQVRQRYLYTDDACQTEAHLEIREDGTVGGAADQSPESLLQLKALKPGVIQILGVKTSRFLCQRPDGALYGSLHFDPEACSFRELLLEDGYNVYQSEAHGLPLHLPGCKSPHRDPAPRGPARFLPLPGLPPAPPEPPGILAPQPPDVGSSDPLSMVGSQGRSPSYAS

SEQ ID NO: 771 - protein, 472 aa, Artificial Sequence
  Fusion Protein
HGEGTFTSDLSIQLEEEAVRLFIEWLLATGPESGAPPPSGGGGGGGSGGGGSGGGGSADKTHTCPPCPAPEAAGGPSVFLFPPKPKDTLMISRTPEVTCVVVDVSHEDPEVKFNWYVDGVEVHNAKTKPREEQYNSTYRVVSVLTVLHQDWLNGKEYKCKVSNKALPAPIEKTISKAKGQPREPQVYTLPPSRDELTKNQVSLTCLVKGFYPSDIAVEWESNGQPENNYKTTPPVLDSDGSFFLYSKLTVDKSRWQQGNVFSCSVMHEALHNHYTQKSLSLSPGGGGSGSAHPIPDSSPLLQFGGQVRQRYLYTDDACQTEAHLEIREDGTVGGAADQSPESLLQLKALKPGVIQILGVKTSRFLCQRPDGALYGSLHFDPEACSFRELLLEDGYNVYQSEAHGLPLHLPGCKSPHRDPAPRGPARFLPLPGLPPAPPEPPGILAPQPPDVGSSDPLSMVYPSQGRSPSYAS

SEQ ID NO: 772 - protein, 471 aa, Artificial Sequence
  Fusion Protein
HGEGTFTSDLSIQLEEEAVRLFIEWLLATGPESGAPPPSGGGGGGGSGGGGSGGGGSADKTHTCPPCPAPEAAGGPSVFLFPPKPKDTLMISRTPEVTCVVVDVSHEDPEVKFNWYVDGVEVHNAKTKPREEQYNSTYRVVSVLTVLHQDWLNGKEYKCKVSNKALPAPIEKTISKAKGQPREPQVYTLPPSRDELTKNQVSLTCLVKGFYPSDIAVEWESNGQPENNYKTTPPVLDSDGSFFLYSKLTVDKSRWQQGNVFSCSVMHEALHNHYTQKSLSLSPGGGGSGSAHPIPDSSPLLQFGGQVRQRYLYTDDACQTEAHLEIREDGTVGGAADQSPESLLQLKALKPGVIQILGVKTSRFLCQRPDGALYGSLHFDPEACSFRELLLEDGYNVYQSEAHGLPLHLCGNKSPHRDPAPRGPARFLPLPGLPPAPPEPPGILAPQPPDVGSSDPLSMVGSQGRSPSYAS

SEQ ID NO: 773 - protein, 472 aa, Artificial Sequence
  Fusion Protein
HGEGTFTSDLSIQLEEEAVRLFIEWLLATGPESGAPPPSGGGGGGGSGGGGSGGGGSADKTHTCPPCPAPEAAGGPSVFLFPPKPKDTLMISRTPEVTCVVVDVSHEDPEVKFNWYVDGVEVHNAKTKPREEQYNSTYRVVSVLTVLHQDWLNGKEYKCKVSNKALPAPIEKTISKAKGQPREPQVYTLPPSRDELTKNQVSLTCLVKGFYPSDIAVEWESNGQPENNYKTTPPVLDSDGSFFLYSKLTVDKSRWQQGNVFSCSVMHEALHNHYTQKSLSLSPGGGGSGSAHPIPDSSPLLQFGGQVRQRYLYTDDACQTEAHLEIREDGTVGGAADQSPESLLQLKALKPGVIQILGVKTSRFLCQRPDGALYGSLHFDPEACSFRELLLEDGYNVYQSEAHGLPLHLCGNKSPHRDPAPRGPARFLPLPGLPPAPPEPPGILAPQPPDVGSSDPLSMVYPSQGRSPSYAS

SEQ ID NO: 774 - protein, 471 aa, Artificial Sequence
  Fusion Protein
HGEGTFTSDLSIQLEEEAVRLFIEWLLATGPESGAPPPSGGGGGGGSGGGGSGGGGSADKTHTCPPCPAPELLGGPSVFLFPPKPKDTLMISRTPEVTCVVVDVSHEDPEVKFNWYVDGVEVHNAKTKPREEQYNNASRVVSVLTVLHQDWLNGKEYKCKVSNKALPAPIEKTISKAKGQPREPQVYTLPPSRDELTKNQVSLTCLVKGFYPSDIAVEWESNGQPENNYKTTPPVLDSDGSFFLYSKLTVDKSRWQQGNVFSCSVMHEALHNHYTQKSLSLSPGGGGSGSAHPIPDSSPLLQFGGQVRQRYLYTDDACQTEAHLEIREDGTVGGAADQSPESLLQLKALKPGVIQILGVKTSRFLCQRPDGALYGSLHFDPEACSFRELLLEDGYNVYQSEAHGLPLHLPGCKSPHRDPAPRGPARFLPLPGLPPAPPEPPGILAPQPPDVGSSDPLSMVGSQGRSPSYAS

SEQ ID NO: 775 - protein, 472 aa, Artificial Sequence
  Fusion Protein
HGEGTFTSDLSIQLEEEAVRLFIEWLLATGPESGAPPPSGGGGGGGSGGGGSGGGGSADKTHTCPPCPAPELLGGPSVFLFPPKPKDTLMISRTPEVTCVVVDVSHEDPEVKFNWYVDGVEVHNAKTKPREEQYNNASRVVSVLTVLHQDWLNGKEYKCKVSNKALPAPIEKTISKAKGQPREPQVYTLPPSRDELTKNQVSLTCLVKGFYPSDIAVEWESNGQPENNYKTTPPVLDSDGSFFLYSKLTVDKSRWQQGNVFSCSVMHEALHNHYTQKSLSLSPGGGGSGSAHPIPDSSPLLQFGGQVRQRYLYTDDACQTEAHLEIREDGTVGGAADQSPESLLQLKALKPGVIQILGVKTSRFLCQRPDGALYGSLHFDPEACSFRELLLEDGYNVYQSEAHGLPLHLPGCKSPHRDPAPRGPARFLPLPGLPPAPPEPPGILAPQPPDVGSSDPLSMVYPSQGRSPSYAS

SEQ ID NO: 776 - protein, 471 aa, Artificial Sequence
  Fusion Protein
HGEGTFTSDLSIQLEEEAVRLFIEWLLATGPESGAPPPSGGGGGGGSGGGGSGGGGSADKTHTCPPCPAPELLGGPSVFLFPPKPKDTLMISRTPEVTCVVVDVSHEDPEVKFNWYVDGVEVHNAKTKPREEQYNNASRVVSVLTVLHQDWLNGKEYKCKVSNKALPAPIEKTISKAKGQPREPQVYTLPPSRDELTKNQVSLTCLVKGFYPSDIAVEWESNGQPENNYKTTPPVLDSDGSFFLYSKLTVDKSRWQQGNVFSCSVMHEALHNHYTQKSLSLSPGGGGSGSAHPIPDSSPLLQFGGQVRQRYLYTDDACQTEAHLEIREDGTVGGAADQSPESLLQLKALKPGVIQILGVKTSRFLCQRPDGALYGSLHFDPEACSFRELLLEDGYNVYQSEAHGLPLHLCGNKSPHRDPAPRGPARFLPLPGLPPAPPEPPGILAPQPPDVGSSDPLSMVGSQGRSPSYAS

SEQ ID NO: 777 - protein, 472 aa, Artificial Sequence
  Fusion Protein
HGEGTFTSDLSIQLEEEAVRLFIEWLLATGPESGAPPPSGGGGGGGSGGGGSGGGGSADKTHTCPPCPAPELLGGPSVFLFPPKPKDTLMISRTPEVTCVVVDVSHEDPEVKFNWYVDGVEVHNAKTKPREEQYNNASRVVSVLTVLHQDWLNGKEYKCKVSNKALPAPIEKTISKAKGQPREPQVYTLPPSRDELTKNQVSLTCLVKGFYPSDIAVEWESNGQPENNYKTTPPVLDSDGSFFLYSKLTVDKSRWQQGNVFSCSVMHEALHNHYTQKSLSLSPGGGGSGSAHPIPDSSPLLQFGGQVRQRYLYTDDACQTEAHLEIREDGTVGGAADQSPESLLQLKALKPGVIQILGVKTSRFLCQRPDGALYGSLHFDPEACSFRELLLEDGYNVYQSEAHGLPLHLCGNKSPHRDPAPRGPARFLPLPGLPPAPPEPPGILAPQPPDVGSSDPLSMVYPSQGRSPSYAS

SEQ ID NO: 778 - protein, 473 aa, Artificial Sequence
  Fusion Protein
HGEGTFTSDLSIQLEEEAVRLFIEWLLATGPESGAPPPSGGGGGGGSGGGGSGGGGSAESKYGPPCPPCPAPEFEGGPSVFLFPPKPKDTLMISRTPEVTCVVVDVSQEDPEVQFNWYVDGVEVHNAKTKPREEQFNSTYRVVSVLTVLHQDWLNGKEYKCKVSNKGLPSSIEKTISKAKGQPREPQVYTLPPSQEEMTKNQVSLTCLVKGFYPSDIAVEWESNGQPENNYKTTPPVLDSDGSFFLYSRLTVDKSRWQEGNVFSCSVMHEALHNHYTQKSLSLSLGGGGSGSAHPIPDSSPLLQFGGQVRQRYLYTDDACQTEAHLEIREDGTVGGAADQSPESLLQLKALKPGVIQILGVKTSRFLCQRPDGALYGSLHFDPEACSFRELLLEDGYNVYQSEAHGLPLHLPGCKSPHRDPAPRGPARFLPLPGLPPAPPEPPGILAPQPPDVGSSDPLSMVGSQGRSPSYAS

SEQ ID NO: 779 - protein, 474 aa, Artificial Sequence
  Fusion Protein
HGEGTFTSDLSIQLEEEAVRLFIEWLLATGPESGAPPPSGGGGGGGSGGGGSGGGGSAESKYGPPCPPCPAPEFEGGPSVFLFPPKPKDTLMISRTPEVTCVVVDVSQEDPEVQFNWYVDGVEVHNAKTKPREEQFNSTYRVVSVLTVLHQDWLNGKEYKCKVSNKGLPSSIEKTISKAKGQPREPQVYTLPPSQEEMTKNQVSLTCLVKGFYPSDIAVEWESNGQPENNYKTTPPVLDSDGSFFLYSRLTVDKSRWQEGNVFSCSVMHEALHNHYTQKSLSLSLGGGGSGSAHPIPDSSPLLQFGGQVRQRYLYTDDACQTEAHLEIREDGTVGGAADQSPESLLQLKALKPGVIQILGVKTSRFLCQRPDGALYGSLHFDPEACSFRELLLEDGYNVYQSEAHGLPLHLPGCKSPHRDPAPRGPARFLPLPGLPPAPPEPPGILAPQPPDVGSSDPLSMVYPSQGRSPSYAS

SEQ ID NO: 780 - protein, 473 aa, Artificial Sequence
  Fusion Protein
HGEGTFTSDLSIQLEEEAVRLFIEWLLATGPESGAPPPSGGGGGGGSGGGGSGGGGSAESKYGPPCPPCPAPEFEGGPSVFLFPPKPKDTLMISRTPEVTCVVVDVSQEDPEVQFNWYVDGVEVHNAKTKPREEQFNSTYRVVSVLTVLHQDWLNGKEYKCKVSNKGLPSSIEKTISKAKGQPREPQVYTLPPSQEEMTKNQVSLTCLVKGFYPSDIAVEWESNGQPENNYKTTPPVLDSDGSFFLYSRLTVDKSRWQEGNVFSCSVMHEALHNHYTQKSLSLSLGGGGSGSAHPIPDSSPLLQFGGQVRQRYLYTDDACQTEAHLEIREDGTVGGAADQSPESLLQLKALKPGVIQILGVKTSRFLCQRPDGALYGSLHFDPEACSFRELLLEDGYNVYQSEAHGLPLHLCGNKSPHRDPAPRGPARFLPLPGLPPAPPEPPGILAPQPPDVGSSDPLSMVGSQGRSPSYAS

SEQ ID NO: 781 - protein, 474 aa, Artificial Sequence
  Fusion Protein
HGEGTFTSDLSIQLEEEAVRLFIEWLLATGPESGAPPPSGGGGGGGSGGGGSGGGGSAESKYGPPCPPCPAPEFEGGPSVFLFPPKPKDTLMISRTPEVTCVVVDVSQEDPEVQFNWYVDGVEVHNAKTKPREEQFNSTYRVVSVLTVLHQDWLNGKEYKCKVSNKGLPSSIEKTISKAKGQPREPQVYTLPPSQEEMTKNQVSLTCLVKGFYPSDIAVEWESNGQPENNYKTTPPVLDSDGSFFLYSRLTVDKSRWQEGNVFSCSVMHEALHNHYTQKSLSLSLGGGGSGSAHPIPDSSPLLQFGGQVRQRYLYTDDACQTEAHLEIREDGTVGGAADQSPESLLQLKALKPGVIQILGVKTSRFLCQRPDGALYGSLHFDPEACSFRELLLEDGYNVYQSEAHGLPLHLCGNKSPHRDPAPRGPARFLPLPGLPPAPPEPPGILAPQPPDVGSSDPLSMVYPSQGRSPSYAS

SEQ ID NO: 782 - protein, 471 aa, Artificial Sequence
  Fusion Protein
HGEGTFTSDLSIQLEEERVQEFIEWLLAGGPSSGAPPPSGGGGGGGSGGGGSGGGGSADKTHTCPPCPAPEAAGGPSVFLFPPKPKDTLMISRTPEVTCVVVDVSHEDPEVKFNWYVDGVEVHNAKTKPREEQYNSTYRVVSVLTVLHQDWLNGKEYKCKVSNKALPAPIEKTISKAKGQPREPQVYTLPPSRDELTKNQVSLTCLVKGFYPSDIAVEWESNGQPENNYKTTPPVLDSDGSFFLYSKLTVDKSRWQQGNVFSCSVMHEALHNHYTQKSLSLSPGGGGSGSAHPIPDSSPLLQFGGQVRQRYLYTDDACQTEAHLEIREDGTVGGAADQSPESLLQLKALKPGVIQILGVKTSRFLCQRPDGALYGSLHFDPEACSFRELLLEDGYNVYQSEAHGLPLHLPGCKSPHRDPAPRGPARFLPLPGLPPAPPEPPGILAPQPPDVGSSDPLSMVGSQGRSPSYAS

SEQ ID NO: 783 - protein, 472 aa, Artificial Sequence
  Fusion Protein
HGEGTFTSDLSIQLEEERVQEFIEWLLAGGPSSGAPPPSGGGGGGGSGGGGSGGGGSADKTHTCPPCPAPEAAGGPSVFLFPPKPKDTLMISRTPEVTCVVVDVSHEDPEVKFNWYVDGVEVHNAKTKPREEQYNSTYRVVSVLTVLHQDWLNGKEYKCKVSNKALPAPIEKTISKAKGQPREPQVYTLPPSRDELTKNQVSLTCLVKGFYPSDIAVEWESNGQPENNYKTTPPVLDSDGSFFLYSKLTVDKSRWQQGNVFSCSVMHEALHNHYTQKSLSLSPGGGGSGSAHPIPDSSPLLQFGGQVRQRYLYTDDACQTEAHLEIREDGTVGGAADQSPESLLQLKALKPGVIQILGVKTSRFLCQRPDGALYGSLHFDPEACSFRELLLEDGYNVYQSEAHGLPLHLPGCKSPHRDPAPRGPARFLPLPGLPPAPPEPPGILAPQPPDVGSSDPLSMVYPSQGRSPSYAS

SEQ ID NO: 784 - protein, 471 aa, Artificial Sequence
  Fusion Protein
HGEGTFTSDLSIQLEEERVQEFIEWLLAGGPSSGAPPPSGGGGGGGSGGGGSGGGGSADKTHTCPPCPAPEAAGGPSVFLFPPKPKDTLMISRTPEVTCVVVDVSHEDPEVKFNWYVDGVEVHNAKTKPREEQYNSTYRVVSVLTVLHQDWLNGKEYKCKVSNKALPAPIEKTISKAKGQPREPQVYTLPPSRDELTKNQVSLTCLVKGFYPSDIAVEWESNGQPENNYKTTPPVLDSDGSFFLYSKLTVDKSRWQQGNVFSCSVMHEALHNHYTQKSLSLSPGGGGSGSAHPIPDSSPLLQFGGQVRQRYLYTDDACQTEAHLEIREDGTVGGAADQSPESLLQLKALKPGVIQILGVKTSRFLCQRPDGALYGSLHFDPEACSFRELLLEDGYNVYQSEAHGLPLHLCGNKSPHRDPAPRGPARFLPLPGLPPAPPEPPGILAPQPPDVGSSDPLSMVGSQGRSPSYAS

SEQ ID NO: 785 - protein, 472 aa, Artificial Sequence
  Fusion Protein
HGEGTFTSDLSIQLEEERVQEFIEWLLAGGPSSGAPPPSGGGGGGGSGGGGSGGGGSADKTHTCPPCPAPEAAGGPSVFLFPPKPKDTLMISRTPEVTCVVVDVSHEDPEVKFNWYVDGVEVHNAKTKPREEQYNSTYRVVSVLTVLHQDWLNGKEYKCKVSNKALPAPIEKTISKAKGQPREPQVYTLPPSRDELTKNQVSLTCLVKGFYPSDIAVEWESNGQPENNYKTTPPVLDSDGSFFLYSKLTVDKSRWQQGNVFSCSVMHEALHNHYTQKSLSLSPGGGGSGSAHPIPDSSPLLQFGGQVRQRYLYTDDACQTEAHLEIREDGTVGGAADQSPESLLQLKALKPGVIQILGVKTSRFLCQRPDGALYGSLHFDPEACSFRELLLEDGYNVYQSEAHGLPLHLCGNKSPHRDPAPRGPARFLPLPGLPPAPPEPPGILAPQPPDVGSSDPLSMVYPSQGRSPSYAS

SEQ ID NO: 786 - protein, 471 aa, Artificial Sequence
  Fusion Protein
HGEGTFTSDLSIQLEEERVQEFIEWLLAGGPSSGAPPPSGGGGGGGSGGGGSGGGGSADKTHTCPPCPAPELLGGPSVFLFPPKPKDTLMISRTPEVTCVVVDVSHEDPEVKFNWYVDGVEVHNAKTKPREEQYNNASRVVSVLTVLHQDWLNGKEYKCKVSNKALPAPIEKTISKAKGQPREPQVYTLPPSRDELTKNQVSLTCLVKGFYPSDIAVEWESNGQPENNYKTTPPVLDSDGSFFLYSKLTVDKSRWQQGNVFSCSVMHEALHNHYTQKSLSLSPGGGGSGSAHPIPDSSPLLQFGGQVRQRYLYTDDACQTEAHLEIREDGTVGGAADQSPESLLQLKALKPGVIQILGVKTSRFLCQRPDGALYGSLHFDPEACSFRELLLEDGYNVYQSEAHGLPLHLPGCKSPHRDPAPRGPARFLPLPGLPPAPPEPPGILAPQPPDVGSSDPLSMVGSQGRSPSYAS

SEQ ID NO: 787 - protein, 472 aa, Artificial Sequence
  Fusion Protein
HGEGTFTSDLSIQLEEERVQEFIEWLLAGGPSSGAPPPSGGGGGGGSGGGGSGGGGSADKTHTCPPCPAPELLGGPSVFLFPPKPKDTLMISRTPEVTCVVVDVSHEDPEVKFNWYVDGVEVHNAKTKPREEQYNNASRVVSVLTVLHQDWLNGKEYKCKVSNKALPAPIEKTISKAKGQPREPQVYTLPPSRDELTKNQVSLTCLVKGFYPSDIAVEWESNGQPENNYKTTPPVLDSDGSFFLYSKLTVDKSRWQQGNVFSCSVMHEALHNHYTQKSLSLSPGGGGSGSAHPIPDSSPLLQFGGQVRQRYLYTDDACQTEAHLEIREDGTVGGAADQSPESLLQLKALKPGVIQILGVKTSRFLCQRPDGALYGSLHFDPEACSFRELLLEDGYNVYQSEAHGLPLHLPGCKSPHRDPAPRGPARFLPLPGLPPAPPEPPGILAPQPPDVGSSDPLSMVYPSQGRSPSYAS

SEQ ID NO: 788 - protein, 471 aa, Artificial Sequence
  Fusion Protein
HGEGTFTSDLSIQLEEERVQEFIEWLLAGGPSSGAPPPSGGGGGGGSGGGGSGGGGSADKTHTCPPCPAPELLGGPSVFLFPPKPKDTLMISRTPEVTCVVVDVSHEDPEVKFNWYVDGVEVHNAKTKPREEQYNNASRVVSVLTVLHQDWLNGKEYKCKVSNKALPAPIEKTISKAKGQPREPQVYTLPPSRDELTKNQVSLTCLVKGFYPSDIAVEWESNGQPENNYKTTPPVLDSDGSFFLYSKLTVDKSRWQQGNVFSCSVMHEALHNHYTQKSLSLSPGGGGSGSAHPIPDSSPLLQFGGQVRQRYLYTDDACQTEAHLEIREDGTVGGAADQSPESLLQLKALKPGVIQILGVKTSRFLCQRPDGALYGSLHFDPEACSFRELLLEDGYNVYQSEAHGLPLHLCGNKSPHRDPAPRGPARFLPLPGLPPAPPEPPGILAPQPPDVGSSDPLSMVGSQGRSPSYAS

SEQ ID NO: 789 - protein, 472 aa, Artificial Sequence
  Fusion Protein
HGEGTFTSDLSIQLEEERVQEFIEWLLAGGPSSGAPPPSGGGGGGGSGGGGSGGGGSADKTHTCPPCPAPELLGGPSVFLFPPKPKDTLMISRTPEVTCVVVDVSHEDPEVKFNWYVDGVEVHNAKTKPREEQYNNASRVVSVLTVLHQDWLNGKEYKCKVSNKALPAPIEKTISKAKGQPREPQVYTLPPSRDELTKNQVSLTCLVKGFYPSDIAVEWESNGQPENNYKTTPPVLDSDGSFFLYSKLTVDKSRWQQGNVFSCSVMHEALHNHYTQKSLSLSPGGGGSGSAHPIPDSSPLLQFGGQVRQRYLYTDDACQTEAHLEIREDGTVGGAADQSPESLLQLKALKPGVIQILGVKTSRFLCQRPDGALYGSLHFDPEACSFRELLLEDGYNVYQSEAHGLPLHLCGNKSPHRDPAPRGPARFLPLPGLPPAPPEPPGILAPQPPDVGSSDPLSMVYPSQGRSPSYAS

SEQ ID NO: 790 - protein, 473 aa, Artificial Sequence
  Fusion Protein
HGEGTFTSDLSIQLEEERVQEFIEWLLAGGPSSGAPPPSGGGGGGGSGGGGSGGGGSAESKYGPPCPPCPAPEFEGGPSVFLFPPKPKDTLMISRTPEVTCVVVDVSQEDPEVQFNWYVDGVEVHNAKTKPREEQFNSTYRVVSVLTVLHQDWLNGKEYKCKVSNKGLPSSIEKTISKAKGQPREPQVYTLPPSQEEMTKNQVSLTCLVKGFYPSDIAVEWESNGQPENNYKTTPPVLDSDGSFFLYSRLTVDKSRWQEGNVFSCSVMHEALHNHYTQKSLSLSLGGGGSGSAHPIPDSSPLLQFGGQVRQRYLYTDDACQTEAHLEIREDGTVGGAADQSPESLLQLKALKPGVIQILGVKTSRFLCQRPDGALYGSLHFDPEACSFRELLLEDGYNVYQSEAHGLPLHLPGCKSPHRDPAPRGPARFLPLPGLPPAPPEPPGILAPQPPDVGSSDPLSMVGSQGRSPSYAS

SEQ ID NO: 791 - protein, 474 aa, Artificial Sequence
  Fusion Protein
HGEGTFTSDLSIQLEEERVQEFIEWLLAGGPSSGAPPPSGGGGGGGSGGGGSGGGGSAESKYGPPCPPCPAPEFEGGPSVFLFPPKPKDTLMISRTPEVTCVVVDVSQEDPEVQFNWYVDGVEVHNAKTKPREEQFNSTYRVVSVLTVLHQDWLNGKEYKCKVSNKGLPSSIEKTISKAKGQPREPQVYTLPPSQEEMTKNQVSLTCLVKGFYPSDIAVEWESNGQPENNYKTTPPVLDSDGSFFLYSRLTVDKSRWQEGNVFSCSVMHEALHNHYTQKSLSLSLGGGGSGSAHPIPDSSPLLQFGGQVRQRYLYTDDACQTEAHLEIREDGTVGGAADQSPESLLQLKALKPGVIQILGVKTSRFLCQRPDGALYGSLHFDPEACSFRELLLEDGYNVYQSEAHGLPLHLPGCKSPHRDPAPRGPARFLPLPGLPPAPPEPPGILAPQPPDVGSSDPLSMVYPSQGRSPSYAS

SEQ ID NO: 792 - protein, 473 aa, Artificial Sequence
  Fusion Protein
HGEGTFTSDLSIQLEEERVQEFIEWLLAGGPSSGAPPPSGGGGGGGSGGGGSGGGGSAESKYGPPCPPCPAPEFEGGPSVFLFPPKPKDTLMISRTPEVTCVVVDVSQEDPEVQFNWYVDGVEVHNAKTKPREEQFNSTYRVVSVLTVLHQDWLNGKEYKCKVSNKGLPSSIEKTISKAKGQPREPQVYTLPPSQEEMTKNQVSLTCLVKGFYPSDIAVEWESNGQPENNYKTTPPVLDSDGSFFLYSRLTVDKSRWQEGNVFSCSVMHEALHNHYTQKSLSLSLGGGGSGSAHPIPDSSPLLQFGGQVRQRYLYTDDACQTEAHLEIREDGTVGGAADQSPESLLQLKALKPGVIQILGVKTSRFLCQRPDGALYGSLHFDPEACSFRELLLEDGYNVYQSEAHGLPLHLCGNKSPHRDPAPRGPARFLPLPGLPPAPPEPPGILAPQPPDVGSSDPLSMVGSQGRSPSYAS

SEQ ID NO: 793 - protein, 474 aa, Artificial Sequence
  Fusion Protein
HGEGTFTSDLSIQLEEERVQEFIEWLLAGGPSSGAPPPSGGGGGGGSGGGGSGGGGSAESKYGPPCPPCPAPEFEGGPSVFLFPPKPKDTLMISRTPEVTCVVVDVSQEDPEVQFNWYVDGVEVHNAKTKPREEQFNSTYRVVSVLTVLHQDWLNGKEYKCKVSNKGLPSSIEKTISKAKGQPREPQVYTLPPSQEEMTKNQVSLTCLVKGFYPSDIAVEWESNGQPENNYKTTPPVLDSDGSFFLYSRLTVDKSRWQEGNVFSCSVMHEALHNHYTQKSLSLSLGGGGSGSAHPIPDSSPLLQFGGQVRQRYLYTDDACQTEAHLEIREDGTVGGAADQSPESLLQLKALKPGVIQILGVKTSRFLCQRPDGALYGSLHFDPEACSFRELLLEDGYNVYQSEAHGLPLHLCGNKSPHRDPAPRGPARFLPLPGLPPAPPEPPGILAPQPPDVGSSDPLSMVYPSQGRSPSYAS

SEQ ID NO: 794 - protein, 472 aa, Artificial Sequence
  Fusion Protein
HGEGTFTSDLSIQLEEEAVQEFIEWLLATGPSSGAPPPSGGGGGGGSGGGGSGGGGSADKTHTCPPCPAPEAAGGPSVFLFPPKPKDTLMISRTPEVTCVVVDVSHEDPEVKFNWYVDGVEVHNAKTKPREEQYNSTYRVVSVLTVLHQDWLNGKEYKCKVSNKALPAPIEKTISKAKGQPREPQVYTLPPSRDELTKNQVSLTCLVKGFYPSDIAVEWESNGQPENNYKTTPPVLDSDGSFFLYSKLTVDKSRWQQGNVFSCSVMHEALHNHYTQKSLSLSPGGGGSGSAHPIPDSSPLLQFGGQVRQRYLYTDDACQTEAHLEIREDGTVGGAADQSPESLLQLKALKPGVIQILGVKTSRFLCQRPDGALYGSLHFDPEACSFRELLLEDGYNVYQSEAHGLPLHLPGCKSPHRDPAPRGPARFLPLPGLPPAPPEPPGILAPQPPDVGSSDPLSMVYPSQGRSPSYAS

SEQ ID NO: 795 - protein, 471 aa, Artificial Sequence
  Fusion Protein
HGEGTFTSDLSIQLEEEAVQEFIEWLLATGPSSGAPPPSGGGGGGGSGGGGSGGGGSADKTHTCPPCPAPEAAGGPSVFLFPPKPKDTLMISRTPEVTCVVVDVSHEDPEVKFNWYVDGVEVHNAKTKPREEQYNSTYRVVSVLTVLHQDWLNGKEYKCKVSNKALPAPIEKTISKAKGQPREPQVYTLPPSRDELTKNQVSLTCLVKGFYPSDIAVEWESNGQPENNYKTTPPVLDSDGSFFLYSKLTVDKSRWQQGNVFSCSVMHEALHNHYTQKSLSLSPGGGGSGSAHPIPDSSPLLQFGGQVRQRYLYTDDACQTEAHLEIREDGTVGGAADQSPESLLQLKALKPGVIQILGVKTSRFLCQRPDGALYGSLHFDPEACSFRELLLEDGYNVYQSEAHGLPLHLCGNKSPHRDPAPRGPARFLPLPGLPPAPPEPPGILAPQPPDVGSSDPLSMVGSQGRSPSYAS

SEQ ID NO: 796 - protein, 472 aa, Artificial Sequence
  Fusion Protein
HGEGTFTSDLSIQLEEEAVQEFIEWLLATGPSSGAPPPSGGGGGGGSGGGGSGGGGSADKTHTCPPCPAPEAAGGPSVFLFPPKPKDTLMISRTPEVTCVVVDVSHEDPEVKFNWYVDGVEVHNAKTKPREEQYNSTYRVVSVLTVLHQDWLNGKEYKCKVSNKALPAPIEKTISKAKGQPREPQVYTLPPSRDELTKNQVSLTCLVKGFYPSDIAVEWESNGQPENNYKTTPPVLDSDGSFFLYSKLTVDKSRWQQGNVFSCSVMHEALHNHYTQKSLSLSPGGGGSGSAHPIPDSSPLLQFGGQVRQRYLYTDDACQTEAHLEIREDGTVGGAADQSPESLLQLKALKPGVIQILGVKTSRFLCQRPDGALYGSLHFDPEACSFRELLLEDGYNVYQSEAHGLPLHLCGNKSPHRDPAPRGPARFLPLPGLPPAPPEPPGILAPQPPDVGSSDPLSMVYPSQGRSPSYAS

SEQ ID NO: 797 - protein, 471 aa, Artificial Sequence
  Fusion Protein
HGEGTFTSDLSIQLEEEAVQEFIEWLLATGPSSGAPPPSGGGGGGGSGGGGSGGGGSADKTHTCPPCPAPELLGGPSVFLFPPKPKDTLMISRTPEVTCVVVDVSHEDPEVKFNWYVDGVEVHNAKTKPREEQYNNASRVVSVLTVLHQDWLNGKEYKCKVSNKALPAPIEKTISKAKGQPREPQVYTLPPSRDELTKNQVSLTCLVKGFYPSDIAVEWESNGQPENNYKTTPPVLDSDGSFFLYSKLTVDKSRWQQGNVFSCSVMHEALHNHYTQKSLSLSPGGGGSGSAHPIPDSSPLLQFGGQVRQRYLYTDDACQTEAHLEIREDGTVGGAADQSPESLLQLKALKPGVIQILGVKTSRFLCQRPDGALYGSLHFDPEACSFRELLLEDGYNVYQSEAHGLPLHLPGCKSPHRDPAPRGPARFLPLPGLPPAPPEPPGILAPQPPDVGSSDPLSMVGSQGRSPSYAS

SEQ ID NO: 798 - protein, 472 aa, Artificial Sequence
  Fusion Protein
HGEGTFTSDLSIQLEEEAVQEFIEWLLATGPSSGAPPPSGGGGGGGSGGGGSGGGGSADKTHTCPPCPAPELLGGPSVFLFPPKPKDTLMISRTPEVTCVVVDVSHEDPEVKFNWYVDGVEVHNAKTKPREEQYNNASRVVSVLTVLHQDWLNGKEYKCKVSNKALPAPIEKTISKAKGQPREPQVYTLPPSRDELTKNQVSLTCLVKGFYPSDIAVEWESNGQPENNYKTTPPVLDSDGSFFLYSKLTVDKSRWQQGNVFSCSVMHEALHNHYTQKSLSLSPGGGGSGSAHPIPDSSPLLQFGGQVRQRYLYTDDACQTEAHLEIREDGTVGGAADQSPESLLQLKALKPGVIQILGVKTSRFLCQRPDGALYGSLHFDPEACSFRELLLEDGYNVYQSEAHGLPLHLPGCKSPHRDPAPRGPARFLPLPGLPPAPPEPPGILAPQPPDVGSSDPLSMVYPSQGRSPSYAS

SEQ ID NO: 799 - protein, 471 aa, Artificial Sequence
  Fusion Protein
HGEGTFTSDLSIQLEEEAVQEFIEWLLATGPSSGAPPPSGGGGGGGSGGGGSGGGGSADKTHTCPPCPAPELLGGPSVFLFPPKPKDTLMISRTPEVTCVVVDVSHEDPEVKFNWYVDGVEVHNAKTKPREEQYNNASRVVSVLTVLHQDWLNGKEYKCKVSNKALPAPIEKTISKAKGQPREPQVYTLPPSRDELTKNQVSLTCLVKGFYPSDIAVEWESNGQPENNYKTTPPVLDSDGSFFLYSKLTVDKSRWQQGNVFSCSVMHEALHNHYTQKSLSLSPGGGGSGSAHPIPDSSPLLQFGGQVRQRYLYTDDACQTEAHLEIREDGTVGGAADQSPESLLQLKALKPGVIQILGVKTSRFLCQRPDGALYGSLHFDPEACSFRELLLEDGYNVYQSEAHGLPLHLCGNKSPHRDPAPRGPARFLPLPGLPPAPPEPPGILAPQPPDVGSSDPLSMVGSQGRSPSYAS

SEQ ID NO: 800 - protein, 472 aa, Artificial Sequence
  Fusion Protein
HGEGTFTSDLSIQLEEEAVQEFIEWLLATGPSSGAPPPSGGGGGGGSGGGGSGGGGSADKTHTCPPCPAPELLGGPSVFLFPPKPKDTLMISRTPEVTCVVVDVSHEDPEVKFNWYVDGVEVHNAKTKPREEQYNNASRVVSVLTVLHQDWLNGKEYKCKVSNKALPAPIEKTISKAKGQPREPQVYTLPPSRDELTKNQVSLTCLVKGFYPSDIAVEWESNGQPENNYKTTPPVLDSDGSFFLYSKLTVDKSRWQQGNVFSCSVMHEALHNHYTQKSLSLSPGGGGSGSAHPIPDSSPLLQFGGQVRQRYLYTDDACQTEAHLEIREDGTVGGAADQSPESLLQLKALKPGVIQILGVKTSRFLCQRPDGALYGSLHFDPEACSFRELLLEDGYNVYQSEAHGLPLHLCGNKSPHRDPAPRGPARFLPLPGLPPAPPEPPGILAPQPPDVGSSDPLSMVYPSQGRSPSYAS

SEQ ID NO: 801 - protein, 471 aa, Artificial Sequence
  Fusion Protein
HGEGTFTSDLSIQLEEEAVQLFIEWLLATGPVSGAPPPSGGGGGGGSGGGGSGGGGSADKTHTCPPCPAPEAAGGPSVFLFPPKPKDTLMISRTPEVTCVVVDVSHEDPEVKFNWYVDGVEVHNAKTKPREEQYNSTYRVVSVLTVLHQDWLNGKEYKCKVSNKALPAPIEKTISKAKGQPREPQVYTLPPSRDELTKNQVSLTCLVKGFYPSDIAVEWESNGQPENNYKTTPPVLDSDGSFFLYSKLTVDKSRWQQGNVFSCSVMHEALHNHYTQKSLSLSPGGGGSGSAHPIPDSSPLLQFGGQVRQRYLYTDDACQTEAHLEIREDGTVGGAADQSPESLLQLKALKPGVIQILGVKTSRFLCQRPDGALYGSLHFDPEACSFRELLLEDGYNVYQSEAHGLPLHLPGCKSPHRDPAPRGPARFLPLPGLPPAPPEPPGILAPQPPDVGSSDPLSMVGSQGRSPSYAS

SEQ ID NO: 802 - protein, 472 aa, Artificial Sequence
  Fusion Protein
HGEGTFTSDLSIQLEEEAVQLFIEWLLATGPVSGAPPPSGGGGGGGSGGGGSGGGGSADKTHTCPPCPAPEAAGGPSVFLFPPKPKDTLMISRTPEVTCVVVDVSHEDPEVKFNWYVDGVEVHNAKTKPREEQYNSTYRVVSVLTVLHQDWLNGKEYKCKVSNKALPAPIEKTISKAKGQPREPQVYTLPPSRDELTKNQVSLTCLVKGFYPSDIAVEWESNGQPENNYKTTPPVLDSDGSFFLYSKLTVDKSRWQQGNVFSCSVMHEALHNHYTQKSLSLSPGGGGSGSAHPIPDSSPLLQFGGQVRQRYLYTDDACQTEAHLEIREDGTVGGAADQSPESLLQLKALKPGVIQILGVKTSRFLCQRPDGALYGSLHFDPEACSFRELLLEDGYNVYQSEAHGLPLHLPGCKSPHRDPAPRGPARFLPLPGLPPAPPEPPGILAPQPPDVGSSDPLSMVYPSQGRSPSYAS

SEQ ID NO: 803 - protein, 471 aa, Artificial Sequence
  Fusion Protein
HGEGTFTSDLSIQLEEEAVQLFIEWLLATGPVSGAPPPSGGGGGGGSGGGGSGGGGSADKTHTCPPCPAPEAAGGPSVFLFPPKPKDTLMISRTPEVTCVVVDVSHEDPEVKFNWYVDGVEVHNAKTKPREEQYNSTYRVVSVLTVLHQDWLNGKEYKCKVSNKALPAPIEKTISKAKGQPREPQVYTLPPSRDELTKNQVSLTCLVKGFYPSDIAVEWESNGQPENNYKTTPPVLDSDGSFFLYSKLTVDKSRWQQGNVFSCSVMHEALHNHYTQKSLSLSPGGGGSGSAHPIPDSSPLLQFGGQVRQRYLYTDDACQTEAHLEIREDGTVGGAADQSPESLLQLKALKPGVIQILGVKTSRFLCQRPDGALYGSLHFDPEACSFRELLLEDGYNVYQSEAHGLPLHLCGNKSPHRDPAPRGPARFLPLPGLPPAPPEPPGILAPQPPDVGSSDPLSMVGSQGRSPSYAS

SEQ ID NO: 804 - protein, 472 aa, Artificial Sequence
  Fusion Protein
HGEGTFTSDLSIQLEEEAVQLFIEWLLATGPVSGAPPPSGGGGGGGSGGGGSGGGGSADKTHTCPPCPAPEAAGGPSVFLFPPKPKDTLMISRTPEVTCVVVDVSHEDPEVKFNWYVDGVEVHNAKTKPREEQYNSTYRVVSVLTVLHQDWLNGKEYKCKVSNKALPAPIEKTISKAKGQPREPQVYTLPPSRDELTKNQVSLTCLVKGFYPSDIAVEWESNGQPENNYKTTPPVLDSDGSFFLYSKLTVDKSRWQQGNVFSCSVMHEALHNHYTQKSLSLSPGGGGSGSAHPIPDSSPLLQFGGQVRQRYLYTDDACQTEAHLEIREDGTVGGAADQSPESLLQLKALKPGVIQILGVKTSRFLCQRPDGALYGSLHFDPEACSFRELLLEDGYNVYQSEAHGLPLHLCGNKSPHRDPAPRGPARFLPLPGLPPAPPEPPGILAPQPPDVGSSDPLSMVYPSQGRSPSYAS

SEQ ID NO: 805 - protein, 471 aa, Artificial Sequence
  Fusion Protein
HGEGTFTSDLSIQLEEEAVQLFIEWLLATGPVSGAPPPSGGGGGGGSGGGGSGGGGSADKTHTCPPCPAPELLGGPSVFLFPPKPKDTLMISRTPEVTCVVVDVSHEDPEVKFNWYVDGVEVHNAKTKPREEQYNNASRVVSVLTVLHQDWLNGKEYKCKVSNKALPAPIEKTISKAKGQPREPQVYTLPPSRDELTKNQVSLTCLVKGFYPSDIAVEWESNGQPENNYKTTPPVLDSDGSFFLYSKLTVDKSRWQQGNVFSCSVMHEALHNHYTQKSLSLSPGGGGSGSAHPIPDSSPLLQFGGQVRQRYLYTDDACQTEAHLEIREDGTVGGAADQSPESLLQLKALKPGVIQILGVKTSRFLCQRPDGALYGSLHFDPEACSFRELLLEDGYNVYQSEAHGLPLHLPGCKSPHRDPAPRGPARFLPLPGLPPAPPEPPGILAPQPPDVGSSDPLSMVGSQGRSPSYAS

SEQ ID NO: 806 - protein, 472 aa, Artificial Sequence
  Fusion Protein
HGEGTFTSDLSIQLEEEAVQLFIEWLLATGPVSGAPPPSGGGGGGGSGGGGSGGGGSADKTHTCPPCPAPELLGGPSVFLFPPKPKDTLMISRTPEVTCVVVDVSHEDPEVKFNWYVDGVEVHNAKTKPREEQYNNASRVVSVLTVLHQDWLNGKEYKCKVSNKALPAPIEKTISKAKGQPREPQVYTLPPSRDELTKNQVSLTCLVKGFYPSDIAVEWESNGQPENNYKTTPPVLDSDGSFFLYSKLTVDKSRWQQGNVFSCSVMHEALHNHYTQKSLSLSPGGGGSGSAHPIPDSSPLLQFGGQVRQRYLYTDDACQTEAHLEIREDGTVGGAADQSPESLLQLKALKPGVIQILGVKTSRFLCQRPDGALYGSLHFDPEACSFRELLLEDGYNVYQSEAHGLPLHLPGCKSPHRDPAPRGPARFLPLPGLPPAPPEPPGILAPQPPDVGSSDPLSMVYPSQGRSPSYAS

SEQ ID NO: 807 - protein, 471 aa, Artificial Sequence
  Fusion Protein
HGEGTFTSDLSIQLEEEAVQLFIEWLLATGPVSGAPPPSGGGGGGGSGGGGSGGGGSADKTHTCPPCPAPELLGGPSVFLFPPKPKDTLMISRTPEVTCVVVDVSHEDPEVKFNWYVDGVEVHNAKTKPREEQYNNASRVVSVLTVLHQDWLNGKEYKCKVSNKALPAPIEKTISKAKGQPREPQVYTLPPSRDELTKNQVSLTCLVKGFYPSDIAVEWESNGQPENNYKTTPPVLDSDGSFFLYSKLTVDKSRWQQGNVFSCSVMHEALHNHYTQKSLSLSPGGGGSGSAHPIPDSSPLLQFGGQVRQRYLYTDDACQTEAHLEIREDGTVGGAADQSPESLLQLKALKPGVIQILGVKTSRFLCQRPDGALYGSLHFDPEACSFRELLLEDGYNVYQSEAHGLPLHLCGNKSPHRDPAPRGPARFLPLPGLPPAPPEPPGILAPQPPDVGSSDPLSMVGSQGRSPSYAS

SEQ ID NO: 808 - protein, 472 aa, Artificial Sequence
  Fusion Protein
HGEGTFTSDLSIQLEEEAVQLFIEWLLATGPVSGAPPPSGGGGGGGSGGGGSGGGGSADKTHTCPPCPAPELLGGPSVFLFPPKPKDTLMISRTPEVTCVVVDVSHEDPEVKFNWYVDGVEVHNAKTKPREEQYNNASRVVSVLTVLHQDWLNGKEYKCKVSNKALPAPIEKTISKAKGQPREPQVYTLPPSRDELTKNQVSLTCLVKGFYPSDIAVEWESNGQPENNYKTTPPVLDSDGSFFLYSKLTVDKSRWQQGNVFSCSVMHEALHNHYTQKSLSLSPGGGGSGSAHPIPDSSPLLQFGGQVRQRYLYTDDACQTEAHLEIREDGTVGGAADQSPESLLQLKALKPGVIQILGVKTSRFLCQRPDGALYGSLHFDPEACSFRELLLEDGYNVYQSEAHGLPLHLCGNKSPHRDPAPRGPARFLPLPGLPPAPPEPPGILAPQPPDVGSSDPLSMVYPSQGRSPSYAS

SEQ ID NO: 809 - protein, 474 aa, Artificial Sequence
  Fusion Protein
HGEGTFTSDLSIQLEEEAVQLFIEWLLATGPVSGAPPPSGGGGGGGSGGGGSGGGGSAESKYGPPCPPCPAPEFEGGPSVFLFPPKPKDTLMISRTPEVTCVVVDVSQEDPEVQFNWYVDGVEVHNAKTKPREEQFNSTYRVVSVLTVLHQDWLNGKEYKCKVSNKGLPSSIEKTISKAKGQPREPQVYTLPPSQEEMTKNQVSLTCLVKGFYPSDIAVEWESNGQPENNYKTTPPVLDSDGSFFLYSRLTVDKSRWQEGNVFSCSVMHEALHNHYTQKSLSLSLGGGGSGSAHPIPDSSPLLQFGGQVRQRYLYTDDACQTEAHLEIREDGTVGGAADQSPESLLQLKALKPGVIQILGVKTSRFLCQRPDGALYGSLHFDPEACSFRELLLEDGYNVYQSEAHGLPLHLPGCKSPHRDPAPRGPARFLPLPGLPPAPPEPPGILAPQPPDVGSSDPLSMVYPSQGRSPSYAS

SEQ ID NO: 810 - protein, 473 aa, Artificial Sequence
  Fusion Protein
HGEGTFTSDLSIQLEEEAVQLFIEWLLATGPVSGAPPPSGGGGGGGSGGGGSGGGGSAESKYGPPCPPCPAPEFEGGPSVFLFPPKPKDTLMISRTPEVTCVVVDVSQEDPEVQFNWYVDGVEVHNAKTKPREEQFNSTYRVVSVLTVLHQDWLNGKEYKCKVSNKGLPSSIEKTISKAKGQPREPQVYTLPPSQEEMTKNQVSLTCLVKGFYPSDIAVEWESNGQPENNYKTTPPVLDSDGSFFLYSRLTVDKSRWQEGNVFSCSVMHEALHNHYTQKSLSLSLGGGGSGSAHPIPDSSPLLQFGGQVRQRYLYTDDACQTEAHLEIREDGTVGGAADQSPESLLQLKALKPGVIQILGVKTSRFLCQRPDGALYGSLHFDPEACSFRELLLEDGYNVYQSEAHGLPLHLCGNKSPHRDPAPRGPARFLPLPGLPPAPPEPPGILAPQPPDVGSSDPLSMVGSQGRSPSYAS

SEQ ID NO: 811 - protein, 474 aa, Artificial Sequence
  Fusion Protein
HGEGTFTSDLSIQLEEEAVQLFIEWLLATGPVSGAPPPSGGGGGGGSGGGGSGGGGSAESKYGPPCPPCPAPEFEGGPSVFLFPPKPKDTLMISRTPEVTCVVVDVSQEDPEVQFNWYVDGVEVHNAKTKPREEQFNSTYRVVSVLTVLHQDWLNGKEYKCKVSNKGLPSSIEKTISKAKGQPREPQVYTLPPSQEEMTKNQVSLTCLVKGFYPSDIAVEWESNGQPENNYKTTPPVLDSDGSFFLYSRLTVDKSRWQEGNVFSCSVMHEALHNHYTQKSLSLSLGGGGSGSAHPIPDSSPLLQFGGQVRQRYLYTDDACQTEAHLEIREDGTVGGAADQSPESLLQLKALKPGVIQILGVKTSRFLCQRPDGALYGSLHFDPEACSFRELLLEDGYNVYQSEAHGLPLHLCGNKSPHRDPAPRGPARFLPLPGLPPAPPEPPGILAPQPPDVGSSDPLSMVYPSQGRSPSYAS

SEQ ID NO: 812 - protein, 476 aa, Artificial Sequence
  Fusion Protein
YSEGTFTSDLSILCEKRAVHEFIEWLIAGGPSSGKPPPKPGCGSGGGGGGGSGGGGSGGGGSADKTHTCPPCPAPEAAGGPSVFLFPPKPKDTLMISRTPEVTCVVVDVSHEDPEVKFNWYVDGVEVHNAKTKPREEQYNSTYRVVSVLTVLHQDWLNGKEYKCKVSNKALPAPIEKTISKAKGQPREPQVYTLPPSRDELTKNQVSLTCLVKGFYPSDIAVEWESNGQPENNYKTTPPVLDSDGSFFLYSKLTVDKSRWQQGNVFSCSVMHEALHNHYTQKSLSLSPGGGGSGSAHPIPDSSPLLQFGGQVRQRYLYTDDACQTEAHLEIREDGTVGGAADQSPESLLQLKALKPGVIQILGVKTSRFLCQRPDGALYGSLHFDPEACSFRELLLEDGYNVYQSEAHGLPLHLPGCKSPHRDPAPRGPARFLPLPGLPPAPPEPPGILAPQPPDVGSSDPLSMVGSQGRSPSYAS

SEQ ID NO: 813 - protein, 476 aa, Artificial Sequence
  Fusion Protein
YSEGTFTSDLSILCEKRAVHEFIEWLIAGGPSSGKPPPKPGCGSGGGGGGGSGGGGSGGGGSADKTHTCPPCPAPEAAGGPSVFLFPPKPKDTLMISRTPEVTCVVVDVSHEDPEVKFNWYVDGVEVHNAKTKPREEQYNSTYRVVSVLTVLHQDWLNGKEYKCKVSNKALPAPIEKTISKAKGQPREPQVYTLPPSRDELTKNQVSLTCLVKGFYPSDIAVEWESNGQPENNYKTTPPVLDSDGSFFLYSKLTVDKSRWQQGNVFSCSVMHEALHNHYTQKSLSLSPGGGGSGSAHPIPDSSPLLQFGGQVRQRYLYTDDACQTEAHLEIREDGTVGGAADQSPESLLQLKALKPGVIQILGVKTSRFLCQRPDGALYGSLHFDPEACSFRELLLEDGYNVYQSEAHGLPLHLCGNKSPHRDPAPRGPARFLPLPGLPPAPPEPPGILAPQPPDVGSSDPLSMVGSQGRSPSYAS

SEQ ID NO: 814 - protein, 477 aa, Artificial Sequence
  Fusion Protein
YSEGTFTSDLSILCEKRAVHEFIEWLIAGGPSSGKPPPKPGCGSGGGGGGGSGGGGSGGGGSADKTHTCPPCPAPEAAGGPSVFLFPPKPKDTLMISRTPEVTCVVVDVSHEDPEVKFNWYVDGVEVHNAKTKPREEQYNSTYRVVSVLTVLHQDWLNGKEYKCKVSNKALPAPIEKTISKAKGQPREPQVYTLPPSRDELTKNQVSLTCLVKGFYPSDIAVEWESNGQPENNYKTTPPVLDSDGSFFLYSKLTVDKSRWQQGNVFSCSVMHEALHNHYTQKSLSLSPGGGGSGSAHPIPDSSPLLQFGGQVRQRYLYTDDACQTEAHLEIREDGTVGGAADQSPESLLQLKALKPGVIQILGVKTSRFLCQRPDGALYGSLHFDPEACSFRELLLEDGYNVYQSEAHGLPLHLCGNKSPHRDPAPRGPARFLPLPGLPPAPPEPPGILAPQPPDVGSSDPLSMVYPSQGRSPSYAS

SEQ ID NO: 815 - protein, 476 aa, Artificial Sequence
  Fusion Protein
YSEGTFTSDLSILCEKRAVHEFIEWLIAGGPSSGKPPPKPGCGSGGGGGGGSGGGGSGGGGSADKTHTCPPCPAPELLGGPSVFLFPPKPKDTLMISRTPEVTCVVVDVSHEDPEVKFNWYVDGVEVHNAKTKPREEQYNNASRVVSVLTVLHQDWLNGKEYKCKVSNKALPAPIEKTISKAKGQPREPQVYTLPPSRDELTKNQVSLTCLVKGFYPSDIAVEWESNGQPENNYKTTPPVLDSDGSFFLYSKLTVDKSRWQQGNVFSCSVMHEALHNHYTQKSLSLSPGGGGSGSAHPIPDSSPLLQFGGQVRQRYLYTDDACQTEAHLEIREDGTVGGAADQSPESLLQLKALKPGVIQILGVKTSRFLCQRPDGALYGSLHFDPEACSFRELLLEDGYNVYQSEAHGLPLHLPGCKSPHRDPAPRGPARFLPLPGLPPAPPEPPGILAPQPPDVGSSDPLSMVGSQGRSPSYAS

SEQ ID NO: 816 - protein, 477 aa, Artificial Sequence
  Fusion Protein
YSEGTFTSDLSILCEKRAVHEFIEWLIAGGPSSGKPPPKPGCGSGGGGGGGSGGGGSGGGGSADKTHTCPPCPAPELLGGPSVFLFPPKPKDTLMISRTPEVTCVVVDVSHEDPEVKFNWYVDGVEVHNAKTKPREEQYNNASRVVSVLTVLHQDWLNGKEYKCKVSNKALPAPIEKTISKAKGQPREPQVYTLPPSRDELTKNQVSLTCLVKGFYPSDIAVEWESNGQPENNYKTTPPVLDSDGSFFLYSKLTVDKSRWQQGNVFSCSVMHEALHNHYTQKSLSLSPGGGGSGSAHPIPDSSPLLQFGGQVRQRYLYTDDACQTEAHLEIREDGTVGGAADQSPESLLQLKALKPGVIQILGVKTSRFLCQRPDGALYGSLHFDPEACSFRELLLEDGYNVYQSEAHGLPLHLPGCKSPHRDPAPRGPARFLPLPGLPPAPPEPPGILAPQPPDVGSSDPLSMVYPSQGRSPSYAS

SEQ ID NO: 817 - protein, 476 aa, Artificial Sequence
  Fusion Protein
YSEGTFTSDLSILCEKRAVHEFIEWLIAGGPSSGKPPPKPGCGSGGGGGGGSGGGGSGGGGSADKTHTCPPCPAPELLGGPSVFLFPPKPKDTLMISRTPEVTCVVVDVSHEDPEVKFNWYVDGVEVHNAKTKPREEQYNNASRVVSVLTVLHQDWLNGKEYKCKVSNKALPAPIEKTISKAKGQPREPQVYTLPPSRDELTKNQVSLTCLVKGFYPSDIAVEWESNGQPENNYKTTPPVLDSDGSFFLYSKLTVDKSRWQQGNVFSCSVMHEALHNHYTQKSLSLSPGGGGSGSAHPIPDSSPLLQFGGQVRQRYLYTDDACQTEAHLEIREDGTVGGAADQSPESLLQLKALKPGVIQILGVKTSRFLCQRPDGALYGSLHFDPEACSFRELLLEDGYNVYQSEAHGLPLHLCGNKSPHRDPAPRGPARFLPLPGLPPAPPEPPGILAPQPPDVGSSDPLSMVGSQGRSPSYAS

SEQ ID NO: 818 - protein, 477 aa, Artificial Sequence
  Fusion Protein
YSEGTFTSDLSILCEKRAVHEFIEWLIAGGPSSGKPPPKPGCGSGGGGGGGSGGGGSGGGGSADKTHTCPPCPAPELLGGPSVFLFPPKPKDTLMISRTPEVTCVVVDVSHEDPEVKFNWYVDGVEVHNAKTKPREEQYNNASRVVSVLTVLHQDWLNGKEYKCKVSNKALPAPIEKTISKAKGQPREPQVYTLPPSRDELTKNQVSLTCLVKGFYPSDIAVEWESNGQPENNYKTTPPVLDSDGSFFLYSKLTVDKSRWQQGNVFSCSVMHEALHNHYTQKSLSLSPGGGGSGSAHPIPDSSPLLQFGGQVRQRYLYTDDACQTEAHLEIREDGTVGGAADQSPESLLQLKALKPGVIQILGVKTSRFLCQRPDGALYGSLHFDPEACSFRELLLEDGYNVYQSEAHGLPLHLCGNKSPHRDPAPRGPARFLPLPGLPPAPPEPPGILAPQPPDVGSSDPLSMVYPSQGRSPSYAS

SEQ ID NO: 819 - protein, 478 aa, Artificial Sequence
  Fusion Protein
YSEGTFTSDLSILCEKRAVHEFIEWLIAGGPSSGKPPPKPGCGSGGGGGGGSGGGGSGGGGSAESKYGPPCPPCPAPEFEGGPSVFLFPPKPKDTLMISRTPEVTCVVVDVSQEDPEVQFNWYVDGVEVHNAKTKPREEQFNSTYRVVSVLTVLHQDWLNGKEYKCKVSNKGLPSSIEKTISKAKGQPREPQVYTLPPSQEEMTKNQVSLTCLVKGFYPSDIAVEWESNGQPENNYKTTPPVLDSDGSFFLYSRLTVDKSRWQEGNVFSCSVMHEALHNHYTQKSLSLSLGGGGSGSAHPIPDSSPLLQFGGQVRQRYLYTDDACQTEAHLEIREDGTVGGAADQSPESLLQLKALKPGVIQILGVKTSRFLCQRPDGALYGSLHFDPEACSFRELLLEDGYNVYQSEAHGLPLHLPGCKSPHRDPAPRGPARFLPLPGLPPAPPEPPGILAPQPPDVGSSDPLSMVGSQGRSPSYAS

SEQ ID NO: 820 - protein, 479 aa, Artificial Sequence
  Fusion Protein
YSEGTFTSDLSILCEKRAVHEFIEWLIAGGPSSGKPPPKPGCGSGGGGGGGSGGGGSGGGGSAESKYGPPCPPCPAPEFEGGPSVFLFPPKPKDTLMISRTPEVTCVVVDVSQEDPEVQFNWYVDGVEVHNAKTKPREEQFNSTYRVVSVLTVLHQDWLNGKEYKCKVSNKGLPSSIEKTISKAKGQPREPQVYTLPPSQEEMTKNQVSLTCLVKGFYPSDIAVEWESNGQPENNYKTTPPVLDSDGSFFLYSRLTVDKSRWQEGNVFSCSVMHEALHNHYTQKSLSLSLGGGGSGSAHPIPDSSPLLQFGGQVRQRYLYTDDACQTEAHLEIREDGTVGGAADQSPESLLQLKALKPGVIQILGVKTSRFLCQRPDGALYGSLHFDPEACSFRELLLEDGYNVYQSEAHGLPLHLPGCKSPHRDPAPRGPARFLPLPGLPPAPPEPPGILAPQPPDVGSSDPLSMVYPSQGRSPSYAS

SEQ ID NO: 821 - protein, 478 aa, Artificial Sequence
  Fusion Protein
YSEGTFTSDLSILCEKRAVHEFIEWLIAGGPSSGKPPPKPGCGSGGGGGGGSGGGGSGGGGSAESKYGPPCPPCPAPEFEGGPSVFLFPPKPKDTLMISRTPEVTCVVVDVSQEDPEVQFNWYVDGVEVHNAKTKPREEQFNSTYRVVSVLTVLHQDWLNGKEYKCKVSNKGLPSSIEKTISKAKGQPREPQVYTLPPSQEEMTKNQVSLTCLVKGFYPSDIAVEWESNGQPENNYKTTPPVLDSDGSFFLYSRLTVDKSRWQEGNVFSCSVMHEALHNHYTQKSLSLSLGGGGSGSAHPIPDSSPLLQFGGQVRQRYLYTDDACQTEAHLEIREDGTVGGAADQSPESLLQLKALKPGVIQILGVKTSRFLCQRPDGALYGSLHFDPEACSFRELLLEDGYNVYQSEAHGLPLHLCGNKSPHRDPAPRGPARFLPLPGLPPAPPEPPGILAPQPPDVGSSDPLSMVGSQGRSPSYAS

SEQ ID NO: 822 - protein, 479 aa, Artificial Sequence
  Fusion Protein
YSEGTFTSDLSILCEKRAVHEFIEWLIAGGPSSGKPPPKPGCGSGGGGGGGSGGGGSGGGGSAESKYGPPCPPCPAPEFEGGPSVFLFPPKPKDTLMISRTPEVTCVVVDVSQEDPEVQFNWYVDGVEVHNAKTKPREEQFNSTYRVVSVLTVLHQDWLNGKEYKCKVSNKGLPSSIEKTISKAKGQPREPQVYTLPPSQEEMTKNQVSLTCLVKGFYPSDIAVEWESNGQPENNYKTTPPVLDSDGSFFLYSRLTVDKSRWQEGNVFSCSVMHEALHNHYTQKSLSLSLGGGGSGSAHPIPDSSPLLQFGGQVRQRYLYTDDACQTEAHLEIREDGTVGGAADQSPESLLQLKALKPGVIQILGVKTSRFLCQRPDGALYGSLHFDPEACSFRELLLEDGYNVYQSEAHGLPLHLCGNKSPHRDPAPRGPARFLPLPGLPPAPPEPPGILAPQPPDVGSSDPLSMVYPSQGRSPSYAS

SEQ ID NO: 823 - protein, 470 aa, Artificial Sequence
  Fusion Protein
GHGEGTFTSDKSKQLEEEAVQLFIEWLKAGGPKKIRYSGGGGGGGSGGGGSGGGGSADKTHTCPPCPAPEAAGGPSVFLFPPKPKDTLMISRTPEVTCVVVDVSHEDPEVKFNWYVDGVEVHNAKTKPREEQYNSTYRVVSVLTVLHQDWLNGKEYKCKVSNKALPAPIEKTISKAKGQPREPQVYTLPPSRDELTKNQVSLTCLVKGFYPSDIAVEWESNGQPENNYKTTPPVLDSDGSFFLYSKLTVDKSRWQQGNVFSCSVMHEALHNHYTQKSLSLSPGGGGSGSAHPIPDSSPLLQFGGQVRQRYLYTDDACQTEAHLEIREDGTVGGAADQSPESLLQLKALKPGVIQILGVKTSRFLCQRPDGALYGSLHFDPEACSFRELLLEDGYNVYQSEAHGLPLHLPGCKSPHRDPAPRGPARFLPLPGLPPAPPEPPGILAPQPPDVGSSDPLSMVGSQGRSPSYAS

SEQ ID NO: 824 - protein, 471 aa, Artificial Sequence
  Fusion Protein
GHGEGTFTSDKSKQLEEEAVQLFIEWLKAGGPKKIRYSGGGGGGGSGGGGSGGGGSADKTHTCPPCPAPEAAGGPSVFLFPPKPKDTLMISRTPEVTCVVVDVSHEDPEVKFNWYVDGVEVHNAKTKPREEQYNSTYRVVSVLTVLHQDWLNGKEYKCKVSNKALPAPIEKTISKAKGQPREPQVYTLPPSRDELTKNQVSLTCLVKGFYPSDIAVEWESNGQPENNYKTTPPVLDSDGSFFLYSKLTVDKSRWQQGNVFSCSVMHEALHNHYTQKSLSLSPGGGGSGSAHPIPDSSPLLQFGGQVRQRYLYTDDACQTEAHLEIREDGTVGGAADQSPESLLQLKALKPGVIQILGVKTSRFLCQRPDGALYGSLHFDPEACSFRELLLEDGYNVYQSEAHGLPLHLPGCKSPHRDPAPRGPARFLPLPGLPPAPPEPPGILAPQPPDVGSSDPLSMVYPSQGRSPSYAS

SEQ ID NO: 825 - protein, 470 aa, Artificial Sequence
  Fusion Protein
GHGEGTFTSDKSKQLEEEAVQLFIEWLKAGGPKKIRYSGGGGGGGSGGGGSGGGGSADKTHTCPPCPAPEAAGGPSVFLFPPKPKDTLMISRTPEVTCVVVDVSHEDPEVKFNWYVDGVEVHNAKTKPREEQYNSTYRVVSVLTVLHQDWLNGKEYKCKVSNKALPAPIEKTISKAKGQPREPQVYTLPPSRDELTKNQVSLTCLVKGFYPSDIAVEWESNGQPENNYKTTPPVLDSDGSFFLYSKLTVDKSRWQQGNVFSCSVMHEALHNHYTQKSLSLSPGGGGSGSAHPIPDSSPLLQFGGQVRQRYLYTDDACQTEAHLEIREDGTVGGAADQSPESLLQLKALKPGVIQILGVKTSRFLCQRPDGALYGSLHFDPEACSFRELLLEDGYNVYQSEAHGLPLHLCGNKSPHRDPAPRGPARFLPLPGLPPAPPEPPGILAPQPPDVGSSDPLSMVGSQGRSPSYAS

SEQ ID NO: 826 - protein, 471 aa, Artificial Sequence
  Fusion Protein
GHGEGTFTSDKSKQLEEEAVQLFIEWLKAGGPKKIRYSGGGGGGGSGGGGSGGGGSADKTHTCPPCPAPEAAGGPSVFLFPPKPKDTLMISRTPEVTCVVVDVSHEDPEVKFNWYVDGVEVHNAKTKPREEQYNSTYRVVSVLTVLHQDWLNGKEYKCKVSNKALPAPIEKTISKAKGQPREPQVYTLPPSRDELTKNQVSLTCLVKGFYPSDIAVEWESNGQPENNYKTTPPVLDSDGSFFLYSKLTVDKSRWQQGNVFSCSVMHEALHNHYTQKSLSLSPGGGGSGSAHPIPDSSPLLQFGGQVRQRYLYTDDACQTEAHLEIREDGTVGGAADQSPESLLQLKALKPGVIQILGVKTSRFLCQRPDGALYGSLHFDPEACSFRELLLEDGYNVYQSEAHGLPLHLCGNKSPHRDPAPRGPARFLPLPGLPPAPPEPPGILAPQPPDVGSSDPLSMVYPSQGRSPSYAS

SEQ ID NO: 827 - protein, 470 aa, Artificial Sequence
  Fusion Protein
GHGEGTFTSDKSKQLEEEAVQLFIEWLKAGGPKKIRYSGGGGGGGSGGGGSGGGGSADKTHTCPPCPAPELLGGPSVFLFPPKPKDTLMISRTPEVTCVVVDVSHEDPEVKFNWYVDGVEVHNAKTKPREEQYNNASRVVSVLTVLHQDWLNGKEYKCKVSNKALPAPIEKTISKAKGQPREPQVYTLPPSRDELTKNQVSLTCLVKGFYPSDIAVEWESNGQPENNYKTTPPVLDSDGSFFLYSKLTVDKSRWQQGNVFSCSVMHEALHNHYTQKSLSLSPGGGGSGSAHPIPDSSPLLQFGGQVRQRYLYTDDACQTEAHLEIREDGTVGGAADQSPESLLQLKALKPGVIQILGVKTSRFLCQRPDGALYGSLHFDPEACSFRELLLEDGYNVYQSEAHGLPLHLPGCKSPHRDPAPRGPARFLPLPGLPPAPPEPPGILAPQPPDVGSSDPLSMVGSQGRSPSYAS

SEQ ID NO: 828 - protein, 471 aa, Artificial Sequence
  Fusion Protein
GHGEGTFTSDKSKQLEEEAVQLFIEWLKAGGPKKIRYSGGGGGGGSGGGGSGGGGSADKTHTCPPCPAPELLGGPSVFLFPPKPKDTLMISRTPEVTCVVVDVSHEDPEVKFNWYVDGVEVHNAKTKPREEQYNNASRVVSVLTVLHQDWLNGKEYKCKVSNKALPAPIEKTISKAKGQPREPQVYTLPPSRDELTKNQVSLTCLVKGFYPSDIAVEWESNGQPENNYKTTPPVLDSDGSFFLYSKLTVDKSRWQQGNVFSCSVMHEALHNHYTQKSLSLSPGGGGSGSAHPIPDSSPLLQFGGQVRQRYLYTDDACQTEAHLEIREDGTVGGAADQSPESLLQLKALKPGVIQILGVKTSRFLCQRPDGALYGSLHFDPEACSFRELLLEDGYNVYQSEAHGLPLHLPGCKSPHRDPAPRGPARFLPLPGLPPAPPEPPGILAPQPPDVGSSDPLSMVYPSQGRSPSYAS

SEQ ID NO: 829 - protein, 470 aa, Artificial Sequence
  Fusion Protein
GHGEGTFTSDKSKQLEEEAVQLFIEWLKAGGPKKIRYSGGGGGGGSGGGGSGGGGSADKTHTCPPCPAPELLGGPSVFLFPPKPKDTLMISRTPEVTCVVVDVSHEDPEVKFNWYVDGVEVHNAKTKPREEQYNNASRVVSVLTVLHQDWLNGKEYKCKVSNKALPAPIEKTISKAKGQPREPQVYTLPPSRDELTKNQVSLTCLVKGFYPSDIAVEWESNGQPENNYKTTPPVLDSDGSFFLYSKLTVDKSRWQQGNVFSCSVMHEALHNHYTQKSLSLSPGGGGSGSAHPIPDSSPLLQFGGQVRQRYLYTDDACQTEAHLEIREDGTVGGAADQSPESLLQLKALKPGVIQILGVKTSRFLCQRPDGALYGSLHFDPEACSFRELLLEDGYNVYQSEAHGLPLHLCGNKSPHRDPAPRGPARFLPLPGLPPAPPEPPGILAPQPPDVGSSDPLSMVGSQGRSPSYAS

SEQ ID NO: 830 - protein, 471 aa, Artificial Sequence
  Fusion Protein
GHGEGTFTSDKSKQLEEEAVQLFIEWLKAGGPKKIRYSGGGGGGGSGGGGSGGGGSADKTHTCPPCPAPELLGGPSVFLFPPKPKDTLMISRTPEVTCVVVDVSHEDPEVKFNWYVDGVEVHNAKTKPREEQYNNASRVVSVLTVLHQDWLNGKEYKCKVSNKALPAPIEKTISKAKGQPREPQVYTLPPSRDELTKNQVSLTCLVKGFYPSDIAVEWESNGQPENNYKTTPPVLDSDGSFFLYSKLTVDKSRWQQGNVFSCSVMHEALHNHYTQKSLSLSPGGGGSGSAHPIPDSSPLLQFGGQVRQRYLYTDDACQTEAHLEIREDGTVGGAADQSPESLLQLKALKPGVIQILGVKTSRFLCQRPDGALYGSLHFDPEACSFRELLLEDGYNVYQSEAHGLPLHLCGNKSPHRDPAPRGPARFLPLPGLPPAPPEPPGILAPQPPDVGSSDPLSMVYPSQGRSPSYAS

SEQ ID NO: 831 - protein, 472 aa, Artificial Sequence; identical to SEQ ID NO: 210
  Fusion Protein

SEQ ID NO: 832 - protein, 473 aa, Artificial Sequence
  Fusion Protein
GHGEGTFTSDKSKQLEEEAVQLFIEWLKAGGPKKIRYSGGGGGGGSGGGGSGGGGSAESKYGPPCPPCPAPEFEGGPSVFLFPPKPKDTLMISRTPEVTCVVVDVSQEDPEVQFNWYVDGVEVHNAKTKPREEQFNSTYRVVSVLTVLHQDWLNGKEYKCKVSNKGLPSSIEKTISKAKGQPREPQVYTLPPSQEEMTKNQVSLTCLVKGFYPSDIAVEWESNGQPENNYKTTPPVLDSDGSFFLYSRLTVDKSRWQEGNVFSCSVMHEALHNHYTQKSLSLSLGGGGSGSAHPIPDSSPLLQFGGQVRQRYLYTDDACQTEAHLEIREDGTVGGAADQSPESLLQLKALKPGVIQILGVKTSRFLCQRPDGALYGSLHFDPEACSFRELLLEDGYNVYQSEAHGLPLHLPGCKSPHRDPAPRGPARFLPLPGLPPAPPEPPGILAPQPPDVGSSDPLSMVYPSQGRSPSYAS

SEQ ID NO: 833 - protein, 472 aa, Artificial Sequence
  Fusion Protein
GHGEGTFTSDKSKQLEEEAVQLFIEWLKAGGPKKIRYSGGGGGGGSGGGGSGGGGSAESKYGPPCPPCPAPEFEGGPSVFLFPPKPKDTLMISRTPEVTCVVVDVSQEDPEVQFNWYVDGVEVHNAKTKPREEQFNSTYRVVSVLTVLHQDWLNGKEYKCKVSNKGLPSSIEKTISKAKGQPREPQVYTLPPSQEEMTKNQVSLTCLVKGFYPSDIAVEWESNGQPENNYKTTPPVLDSDGSFFLYSRLTVDKSRWQEGNVFSCSVMHEALHNHYTQKSLSLSLGGGGSGSAHPIPDSSPLLQFGGQVRQRYLYTDDACQTEAHLEIREDGTVGGAADQSPESLLQLKALKPGVIQILGVKTSRFLCQRPDGALYGSLHFDPEACSFRELLLEDGYNVYQSEAHGLPLHLCGNKSPHRDPAPRGPARFLPLPGLPPAPPEPPGILAPQPPDVGSSDPLSMVGSQGRSPSYAS

SEQ ID NO: 834 - protein, 473 aa, Artificial Sequence
  Fusion Protein
GHGEGTFTSDKSKQLEEEAVQLFIEWLKAGGPKKIRYSGGGGGGGSGGGGSGGGGSAESKYGPPCPPCPAPEFEGGPSVFLFPPKPKDTLMISRTPEVTCVVVDVSQEDPEVQFNWYVDGVEVHNAKTKPREEQFNSTYRVVSVLTVLHQDWLNGKEYKCKVSNKGLPSSIEKTISKAKGQPREPQVYTLPPSQEEMTKNQVSLTCLVKGFYPSDIAVEWESNGQPENNYKTTPPVLDSDGSFFLYSRLTVDKSRWQEGNVFSCSVMHEALHNHYTQKSLSLSLGGGGSGSAHPIPDSSPLLQFGGQVRQRYLYTDDACQTEAHLEIREDGTVGGAADQSPESLLQLKALKPGVIQILGVKTSRFLCQRPDGALYGSLHFDPEACSFRELLLEDGYNVYQSEAHGLPLHLCGNKSPHRDPAPRGPARFLPLPGLPPAPPEPPGILAPQPPDVGSSDPLSMVYPSQGRSPSYAS

SEQ ID NO: 835 - protein, 470 aa, Artificial Sequence
  Fusion Protein
GHGEGTFTSDLSKQLEEEAVRLFIEWLKAGGPKKIRYSGGGGGGGSGGGGSGGGGSADKTHTCPPCPAPEAAGGPSVFLFPPKPKDTLMISRTPEVTCVVVDVSHEDPEVKFNWYVDGVEVHNAKTKPREEQYNSTYRVVSVLTVLHQDWLNGKEYKCKVSNKALPAPIEKTISKAKGQPREPQVYTLPPSRDELTKNQVSLTCLVKGFYPSDIAVEWESNGQPENNYKTTPPVLDSDGSFFLYSKLTVDKSRWQQGNVFSCSVMHEALHNHYTQKSLSLSPGGGGSGSAHPIPDSSPLLQFGGQVRQRYLYTDDACQTEAHLEIREDGTVGGAADQSPESLLQLKALKPGVIQILGVKTSRFLCQRPDGALYGSLHFDPEACSFRELLLEDGYNVYQSEAHGLPLHLPGCKSPHRDPAPRGPARFLPLPGLPPAPPEPPGILAPQPPDVGSSDPLSMVGSQGRSPSYAS

SEQ ID NO: 836 - protein, 471 aa, Artificial Sequence
  Fusion Protein
GHGEGTFTSDLSKQLEEEAVRLFIEWLKAGGPKKIRYSGGGGGGGSGGGGSGGGGSADKTHTCPPCPAPEAAGGPSVFLFPPKPKDTLMISRTPEVTCVVVDVSHEDPEVKFNWYVDGVEVHNAKTKPREEQYNSTYRVVSVLTVLHQDWLNGKEYKCKVSNKALPAPIEKTISKAKGQPREPQVYTLPPSRDELTKNQVSLTCLVKGFYPSDIAVEWESNGQPENNYKTTPPVLDSDGSFFLYSKLTVDKSRWQQGNVFSCSVMHEALHNHYTQKSLSLSPGGGGSGSAHPIPDSSPLLQFGGQVRQRYLYTDDACQTEAHLEIREDGTVGGAADQSPESLLQLKALKPGVIQILGVKTSRFLCQRPDGALYGSLHFDPEACSFRELLLEDGYNVYQSEAHGLPLHLPGCKSPHRDPAPRGPARFLPLPGLPPAPPEPPGILAPQPPDVGSSDPLSMVYPSQGRSPSYAS

SEQ ID NO: 837 - protein, 470 aa, Artificial Sequence
  Fusion Protein
GHGEGTFTSDLSKQLEEEAVRLFIEWLKAGGPKKIRYSGGGGGGGSGGGGSGGGGSADKTHTCPPCPAPEAAGGPSVFLFPPKPKDTLMISRTPEVTCVVVDVSHEDPEVKFNWYVDGVEVHNAKTKPREEQYNSTYRVVSVLTVLHQDWLNGKEYKCKVSNKALPAPIEKTISKAKGQPREPQVYTLPPSRDELTKNQVSLTCLVKGFYPSDIAVEWESNGQPENNYKTTPPVLDSDGSFFLYSKLTVDKSRWQQGNVFSCSVMHEALHNHYTQKSLSLSPGGGGSGSAHPIPDSSPLLQFGGQVRQRYLYTDDACQTEAHLEIREDGTVGGAADQSPESLLQLKALKPGVIQILGVKTSRFLCQRPDGALYGSLHFDPEACSFRELLLEDGYNVYQSEAHGLPLHLCGNKSPHRDPAPRGPARFLPLPGLPPAPPEPPGILAPQPPDVGSSDPLSMVGSQGRSPSYAS

SEQ ID NO: 838 - protein, 471 aa, Artificial Sequence
  Fusion Protein
GHGEGTFTSDLSKQLEEEAVRLFIEWLKAGGPKKIRYSGGGGGGGSGGGGSGGGGSADKTHTCPPCPAPEAAGGPSVFLFPPKPKDTLMISRTPEVTCVVVDVSHEDPEVKFNWYVDGVEVHNAKTKPREEQYNSTYRVVSVLTVLHQDWLNGKEYKCKVSNKALPAPIEKTISKAKGQPREPQVYTLPPSRDELTKNQVSLTCLVKGFYPSDIAVEWESNGQPENNYKTTPPVLDSDGSFFLYSKLTVDKSRWQQGNVFSCSVMHEALHNHYTQKSLSLSPGGGGSGSAHPIPDSSPLLQFGGQVRQRYLYTDDACQTEAHLEIREDGTVGGAADQSPESLLQLKALKPGVIQILGVKTSRFLCQRPDGALYGSLHFDPEACSFRELLLEDGYNVYQSEAHGLPLHLCGNKSPHRDPAPRGPARFLPLPGLPPAPPEPPGILAPQPPDVGSSDPLSMVYPSQGRSPSYAS

SEQ ID NO: 839 - protein, 470 aa, Artificial Sequence
  Fusion Protein
GHGEGTFTSDLSKQLEEEAVRLFIEWLKAGGPKKIRYSGGGGGGGSGGGGSGGGGSADKTHTCPPCPAPELLGGPSVFLFPPKPKDTLMISRTPEVTCVVVDVSHEDPEVKFNWYVDGVEVHNAKTKPREEQYNNASRVVSVLTVLHQDWLNGKEYKCKVSNKALPAPIEKTISKAKGQPREPQVYTLPPSRDELTKNQVSLTCLVKGFYPSDIAVEWESNGQPENNYKTTPPVLDSDGSFFLYSKLTVDKSRWQQGNVFSCSVMHEALHNHYTQKSLSLSPGGGGSGSAHPIPDSSPLLQFGGQVRQRYLYTDDACQTEAHLEIREDGTVGGAADQSPESLLQLKALKPGVIQILGVKTSRFLCQRPDGALYGSLHFDPEACSFRELLLEDGYNVYQSEAHGLPLHLPGCKSPHRDPAPRGPARFLPLPGLPPAPPEPPGILAPQPPDVGSSDPLSMVGSQGRSPSYAS

SEQ ID NO: 840 - protein, 471 aa, Artificial Sequence
  Fusion Protein
GHGEGTFTSDLSKQLEEEAVRLFIEWLKAGGPKKIRYSGGGGGGGSGGGGSGGGGSADKTHTCPPCPAPELLGGPSVFLFPPKPKDTLMISRTPEVTCVVVDVSHEDPEVKFNWYVDGVEVHNAKTKPREEQYNNASRVVSVLTVLHQDWLNGKEYKCKVSNKALPAPIEKTISKAKGQPREPQVYTLPPSRDELTKNQVSLTCLVKGFYPSDIAVEWESNGQPENNYKTTPPVLDSDGSFFLYSKLTVDKSRWQQGNVFSCSVMHEALHNHYTQKSLSLSPGGGGSGSAHPIPDSSPLLQFGGQVRQRYLYTDDACQTEAHLEIREDGTVGGAADQSPESLLQLKALKPGVIQILGVKTSRFLCQRPDGALYGSLHFDPEACSFRELLLEDGYNVYQSEAHGLPLHLPGCKSPHRDPAPRGPARFLPLPGLPPAPPEPPGILAPQPPDVGSSDPLSMVYPSQGRSPSYAS

SEQ ID NO: 841 - protein, 470 aa, Artificial Sequence
  Fusion Protein
GHGEGTFTSDLSKQLEEEAVRLFIEWLKAGGPKKIRYSGGGGGGGSGGGGSGGGGSADKTHTCPPCPAPELLGGPSVFLFPPKPKDTLMISRTPEVTCVVVDVSHEDPEVKFNWYVDGVEVHNAKTKPREEQYNNASRVVSVLTVLHQDWLNGKEYKCKVSNKALPAPIEKTISKAKGQPREPQVYTLPPSRDELTKNQVSLTCLVKGFYPSDIAVEWESNGQPENNYKTTPPVLDSDGSFFLYSKLTVDKSRWQQGNVFSCSVMHEALHNHYTQKSLSLSPGGGGSGSAHPIPDSSPLLQFGGQVRQRYLYTDDACQTEAHLEIREDGTVGGAADQSPESLLQLKALKPGVIQILGVKTSRFLCQRPDGALYGSLHFDPEACSFRELLLEDGYNVYQSEAHGLPLHLCGNKSPHRDPAPRGPARFLPLPGLPPAPPEPPGILAPQPPDVGSSDPLSMVGSQGRSPSYAS

SEQ ID NO: 842 - protein, 471 aa, Artificial Sequence
  Fusion Protein
GHGEGTFTSDLSKQLEEEAVRLFIEWLKAGGPKKIRYSGGGGGGGSGGGGSGGGGSADKTHTCPPCPAPELLGGPSVFLFPPKPKDTLMISRTPEVTCVVVDVSHEDPEVKFNWYVDGVEVHNAKTKPREEQYNNASRVVSVLTVLHQDWLNGKEYKCKVSNKALPAPIEKTISKAKGQPREPQVYTLPPSRDELTKNQVSLTCLVKGFYPSDIAVEWESNGQPENNYKTTPPVLDSDGSFFLYSKLTVDKSRWQQGNVFSCSVMHEALHNHYTQKSLSLSPGGGGSGSAHPIPDSSPLLQFGGQVRQRYLYTDDACQTEAHLEIREDGTVGGAADQSPESLLQLKALKPGVIQILGVKTSRFLCQRPDGALYGSLHFDPEACSFRELLLEDGYNVYQSEAHGLPLHLCGNKSPHRDPAPRGPARFLPLPGLPPAPPEPPGILAPQPPDVGSSDPLSMVYPSQGRSPSYAS

SEQ ID NO: 843 - protein, 473 aa, Artificial Sequence
  Fusion Protein
GHGEGTFTSDLSKQLEEEAVRLFIEWLKAGGPKKIRYSGGGGGGGSGGGGSGGGGSAESKYGPPCPPCPAPEFEGGPSVFLFPPKPKDTLMISRTPEVTCVVVDVSQEDPEVQFNWYVDGVEVHNAKTKPREEQFNSTYRVVSVLTVLHQDWLNGKEYKCKVSNKGLPSSIEKTISKAKGQPREPQVYTLPPSQEEMTKNQVSLTCLVKGFYPSDIAVEWESNGQPENNYKTTPPVLDSDGSFFLYSRLTVDKSRWQEGNVFSCSVMHEALHNHYTQKSLSLSLGGGGSGSAHPIPDSSPLLQFGGQVRQRYLYTDDACQTEAHLEIREDGTVGGAADQSPESLLQLKALKPGVIQILGVKTSRFLCQRPDGALYGSLHFDPEACSFRELLLEDGYNVYQSEAHGLPLHLPGCKSPHRDPAPRGPARFLPLPGLPPAPPEPPGILAPQPPDVGSSDPLSMVYPSQGRSPSYAS

SEQ ID NO: 844 - protein, 472 aa, Artificial Sequence
  Fusion Protein
GHGEGTFTSDLSKQLEEEAVRLFIEWLKAGGPKKIRYSGGGGGGGSGGGGSGGGGSAESKYGPPCPPCPAPEFEGGPSVFLFPPKPKDTLMISRTPEVTCVVVDVSQEDPEVQFNWYVDGVEVHNAKTKPREEQFNSTYRVVSVLTVLHQDWLNGKEYKCKVSNKGLPSSIEKTISKAKGQPREPQVYTLPPSQEEMTKNQVSLTCLVKGFYPSDIAVEWESNGQPENNYKTTPPVLDSDGSFFLYSRLTVDKSRWQEGNVFSCSVMHEALHNHYTQKSLSLSLGGGGSGSAHPIPDSSPLLQFGGQVRQRYLYTDDACQTEAHLEIREDGTVGGAADQSPESLLQLKALKPGVIQILGVKTSRFLCQRPDGALYGSLHFDPEACSFRELLLEDGYNVYQSEAHGLPLHLCGNKSPHRDPAPRGPARFLPLPGLPPAPPEPPGILAPQPPDVGSSDPLSMVGSQGRSPSYAS

SEQ ID NO: 845 - protein, 473 aa, Artificial Sequence
  Fusion Protein
GHGEGTFTSDLSKQLEEEAVRLFIEWLKAGGPKKIRYSGGGGGGGSGGGGSGGGGSAESKYGPPCPPCPAPEFEGGPSVFLFPPKPKDTLMISRTPEVTCVVVDVSQEDPEVQFNWYVDGVEVHNAKTKPREEQFNSTYRVVSVLTVLHQDWLNGKEYKCKVSNKGLPSSIEKTISKAKGQPREPQVYTLPPSQEEMTKNQVSLTCLVKGFYPSDIAVEWESNGQPENNYKTTPPVLDSDGSFFLYSRLTVDKSRWQEGNVFSCSVMHEALHNHYTQKSLSLSLGGGGSGSAHPIPDSSPLLQFGGQVRQRYLYTDDACQTEAHLEIREDGTVGGAADQSPESLLQLKALKPGVIQILGVKTSRFLCQRPDGALYGSLHFDPEACSFRELLLEDGYNVYQSEAHGLPLHLCGNKSPHRDPAPRGPARFLPLPGLPPAPPEPPGILAPQPPDVGSSDPLSMVYPSQGRSPSYAS

SEQ ID NO: 846 - protein, 470 aa, Artificial Sequence
  Fusion Protein
GHGEGTFTSDLSKQLEEEAVQLFIEWLKAGGPKKIRYSGGGGGGGSGGGGSGGGGSADKTHTCPPCPAPEAAGGPSVFLFPPKPKDTLMISRTPEVTCVVVDVSHEDPEVKFNWYVDGVEVHNAKTKPREEQYNSTYRVVSVLTVLHQDWLNGKEYKCKVSNKALPAPIEKTISKAKGQPREPQVYTLPPSRDELTKNQVSLTCLVKGFYPSDIAVEWESNGQPENNYKTTPPVLDSDGSFFLYSKLTVDKSRWQQGNVFSCSVMHEALHNHYTQKSLSLSPGGGGSGSAHPIPDSSPLLQFGGQVRQRYLYTDDACQTEAHLEIREDGTVGGAADQSPESLLQLKALKPGVIQILGVKTSRFLCQRPDGALYGSLHFDPEACSFRELLLEDGYNVYQSEAHGLPLHLPGCKSPHRDPAPRGPARFLPLPGLPPAPPEPPGILAPQPPDVGSSDPLSMVGSQGRSPSYAS

SEQ ID NO: 847 - protein, 471 aa, Artificial Sequence
  Fusion Protein
GHGEGTFTSDLSKQLEEEAVQLFIEWLKAGGPKKIRYSGGGGGGGSGGGGSGGGGSADKTHTCPPCPAPEAAGGPSVFLFPPKPKDTLMISRTPEVTCVVVDVSHEDPEVKFNWYVDGVEVHNAKTKPREEQYNSTYRVVSVLTVLHQDWLNGKEYKCKVSNKALPAPIEKTISKAKGQPREPQVYTLPPSRDELTKNQVSLTCLVKGFYPSDIAVEWESNGQPENNYKTTPPVLDSDGSFFLYSKLTVDKSRWQQGNVFSCSVMHEALHNHYTQKSLSLSPGGGGSGSAHPIPDSSPLLQFGGQVRQRYLYTDDACQTEAHLEIREDGTVGGAADQSPESLLQLKALKPGVIQILGVKTSRFLCQRPDGALYGSLHFDPEACSFRELLLEDGYNVYQSEAHGLPLHLPGCKSPHRDPAPRGPARFLPLPGLPPAPPEPPGILAPQPPDVGSSDPLSMVYPSQGRSPSYAS

SEQ ID NO: 848 - protein, 470 aa, Artificial Sequence
  Fusion Protein
GHGEGTFTSDLSKQLEEEAVQLFIEWLKAGGPKKIRYSGGGGGGGSGGGGSGGGGSADKTHTCPPCPAPEAAGGPSVFLFPPKPKDTLMISRTPEVTCVVVDVSHEDPEVKFNWYVDGVEVHNAKTKPREEQYNSTYRVVSVLTVLHQDWLNGKEYKCKVSNKALPAPIEKTISKAKGQPREPQVYTLPPSRDELTKNQVSLTCLVKGFYPSDIAVEWESNGQPENNYKTTPPVLDSDGSFFLYSKLTVDKSRWQQGNVFSCSVMHEALHNHYTQKSLSLSPGGGGSGSAHPIPDSSPLLQFGGQVRQRYLYTDDACQTEAHLEIREDGTVGGAADQSPESLLQLKALKPGVIQILGVKTSRFLCQRPDGALYGSLHFDPEACSFRELLLEDGYNVYQSEAHGLPLHLCGNKSPHRDPAPRGPARFLPLPGLPPAPPEPPGILAPQPPDVGSSDPLSMVGSQGRSPSYAS

SEQ ID NO: 849 - protein, 471 aa, Artificial Sequence
  Fusion Protein
GHGEGTFTSDLSKQLEEEAVQLFIEWLKAGGPKKIRYSGGGGGGGSGGGGSGGGGSADKTHTCPPCPAPEAAGGPSVFLFPPKPKDTLMISRTPEVTCVVVDVSHEDPEVKFNWYVDGVEVHNAKTKPREEQYNSTYRVVSVLTVLHQDWLNGKEYKCKVSNKALPAPIEKTISKAKGQPREPQVYTLPPSRDELTKNQVSLTCLVKGFYPSDIAVEWESNGQPENNYKTTPPVLDSDGSFFLYSKLTVDKSRWQQGNVFSCSVMHEALHNHYTQKSLSLSPGGGGSGSAHPIPDSSPLLQFGGQVRQRYLYTDDACQTEAHLEIREDGTVGGAADQSPESLLQLKALKPGVIQILGVKTSRFLCQRPDGALYGSLHFDPEACSFRELLLEDGYNVYQSEAHGLPLHLCGNKSPHRDPAPRGPARFLPLPGLPPAPPEPPGILAPQPPDVGSSDPLSMVYPSQGRSPSYAS

SEQ ID NO: 850 - protein, 470 aa, Artificial Sequence
  Fusion Protein
GHGEGTFTSDLSKQLEEEAVQLFIEWLKAGGPKKIRYSGGGGGGGSGGGGSGGGGSADKTHTCPPCPAPELLGGPSVFLFPPKPKDTLMISRTPEVTCVVVDVSHEDPEVKFNWYVDGVEVHNAKTKPREEQYNNASRVVSVLTVLHQDWLNGKEYKCKVSNKALPAPIEKTISKAKGQPREPQVYTLPPSRDELTKNQVSLTCLVKGFYPSDIAVEWESNGQPENNYKTTPPVLDSDGSFFLYSKLTVDKSRWQQGNVFSCSVMHEALHNHYTQKSLSLSPGGGGSGSAHPIPDSSPLLQFGGQVRQRYLYTDDACQTEAHLEIREDGTVGGAADQSPESLLQLKALKPGVIQILGVKTSRFLCQRPDGALYGSLHFDPEACSFRELLLEDGYNVYQSEAHGLPLHLPGCKSPHRDPAPRGPARFLPLPGLPPAPPEPPGILAPQPPDVGSSDPLSMVGSQGRSPSYAS

SEQ ID NO: 851 - protein, 471 aa, Artificial Sequence
  Fusion Protein
GHGEGTFTSDLSKQLEEEAVQLFIEWLKAGGPKKIRYSGGGGGGGSGGGGSGGGGSADKTHTCPPCPAPELLGGPSVFLFPPKPKDTLMISRTPEVTCVVVDVSHEDPEVKFNWYVDGVEVHNAKTKPREEQYNNASRVVSVLTVLHQDWLNGKEYKCKVSNKALPAPIEKTISKAKGQPREPQVYTLPPSRDELTKNQVSLTCLVKGFYPSDIAVEWESNGQPENNYKTTPPVLDSDGSFFLYSKLTVDKSRWQQGNVFSCSVMHEALHNHYTQKSLSLSPGGGGSGSAHPIPDSSPLLQFGGQVRQRYLYTDDACQTEAHLEIREDGTVGGAADQSPESLLQLKALKPGVIQILGVKTSRFLCQRPDGALYGSLHFDPEACSFRELLLEDGYNVYQSEAHGLPLHLPGCKSPHRDPAPRGPARFLPLPGLPPAPPEPPGILAPQPPDVGSSDPLSMVYPSQGRSPSYAS

SEQ ID NO: 852 - protein, 470 aa, Artificial Sequence
  Fusion Protein
GHGEGTFTSDLSKQLEEEAVQLFIEWLKAGGPKKIRYSGGGGGGGSGGGGSGGGGSADKTHTCPPCPAPELLGGPSVFLFPPKPKDTLMISRTPEVTCVVVDVSHEDPEVKFNWYVDGVEVHNAKTKPREEQYNNASRVVSVLTVLHQDWLNGKEYKCKVSNKALPAPIEKTISKAKGQPREPQVYTLPPSRDELTKNQVSLTCLVKGFYPSDIAVEWESNGQPENNYKTTPPVLDSDGSFFLYSKLTVDKSRWQQGNVFSCSVMHEALHNHYTQKSLSLSPGGGGSGSAHPIPDSSPLLQFGGQVRQRYLYTDDACQTEAHLEIREDGTVGGAADQSPESLLQLKALKPGVIQILGVKTSRFLCQRPDGALYGSLHFDPEACSFRELLLEDGYNVYQSEAHGLPLHLCGNKSPHRDPAPRGPARFLPLPGLPPAPPEPPGILAPQPPDVGSSDPLSMVGSQGRSPSYAS

SEQ ID NO: 853 - protein, 471 aa, Artificial Sequence
  Fusion Protein
GHGEGTFTSDLSKQLEEEAVQLFIEWLKAGGPKKIRYSGGGGGGGSGGGGSGGGGSADKTHTCPPCPAPELLGGPSVFLFPPKPKDTLMISRTPEVTCVVVDVSHEDPEVKFNWYVDGVEVHNAKTKPREEQYNNASRVVSVLTVLHQDWLNGKEYKCKVSNKALPAPIEKTISKAKGQPREPQVYTLPPSRDELTKNQVSLTCLVKGFYPSDIAVEWESNGQPENNYKTTPPVLDSDGSFFLYSKLTVDKSRWQQGNVFSCSVMHEALHNHYTQKSLSLSPGGGGSGSAHPIPDSSPLLQFGGQVRQRYLYTDDACQTEAHLEIREDGTVGGAADQSPESLLQLKALKPGVIQILGVKTSRFLCQRPDGALYGSLHFDPEACSFRELLLEDGYNVYQSEAHGLPLHLCGNKSPHRDPAPRGPARFLPLPGLPPAPPEPPGILAPQPPDVGSSDPLSMVYPSQGRSPSYAS

SEQ ID NO: 854 - protein, 472 aa, Artificial Sequence; identical to SEQ ID NO: 212
  Fusion Protein

SEQ ID NO: 855 - protein, 473 aa, Artificial Sequence
  Fusion Protein
GHGEGTFTSDLSKQLEEEAVQLFIEWLKAGGPKKIRYSGGGGGGGSGGGGSGGGGSAESKYGPPCPPCPAPEFEGGPSVFLFPPKPKDTLMISRTPEVTCVVVDVSQEDPEVQFNWYVDGVEVHNAKTKPREEQFNSTYRVVSVLTVLHQDWLNGKEYKCKVSNKGLPSSIEKTISKAKGQPREPQVYTLPPSQEEMTKNQVSLTCLVKGFYPSDIAVEWESNGQPENNYKTTPPVLDSDGSFFLYSRLTVDKSRWQEGNVFSCSVMHEALHNHYTQKSLSLSLGGGGSGSAHPIPDSSPLLQFGGQVRQRYLYTDDACQTEAHLEIREDGTVGGAADQSPESLLQLKALKPGVIQILGVKTSRFLCQRPDGALYGSLHFDPEACSFRELLLEDGYNVYQSEAHGLPLHLPGCKSPHRDPAPRGPARFLPLPGLPPAPPEPPGILAPQPPDVGSSDPLSMVYPSQGRSPSYAS

SEQ ID NO: 856 - protein, 472 aa, Artificial Sequence
  Fusion Protein
GHGEGTFTSDLSKQLEEEAVQLFIEWLKAGGPKKIRYSGGGGGGGSGGGGSGGGGSAESKYGPPCPPCPAPEFEGGPSVFLFPPKPKDTLMISRTPEVTCVVVDVSQEDPEVQFNWYVDGVEVHNAKTKPREEQFNSTYRVVSVLTVLHQDWLNGKEYKCKVSNKGLPSSIEKTISKAKGQPREPQVYTLPPSQEEMTKNQVSLTCLVKGFYPSDIAVEWESNGQPENNYKTTPPVLDSDGSFFLYSRLTVDKSRWQEGNVFSCSVMHEALHNHYTQKSLSLSLGGGGSGSAHPIPDSSPLLQFGGQVRQRYLYTDDACQTEAHLEIREDGTVGGAADQSPESLLQLKALKPGVIQILGVKTSRFLCQRPDGALYGSLHFDPEACSFRELLLEDGYNVYQSEAHGLPLHLCGNKSPHRDPAPRGPARFLPLPGLPPAPPEPPGILAPQPPDVGSSDPLSMVGSQGRSPSYAS

SEQ ID NO: 857 - protein, 473 aa, Artificial Sequence
  Fusion Protein
GHGEGTFTSDLSKQLEEEAVQLFIEWLKAGGPKKIRYSGGGGGGGSGGGGSGGGGSAESKYGPPCPPCPAPEFEGGPSVFLFPPKPKDTLMISRTPEVTCVVVDVSQEDPEVQFNWYVDGVEVHNAKTKPREEQFNSTYRVVSVLTVLHQDWLNGKEYKCKVSNKGLPSSIEKTISKAKGQPREPQVYTLPPSQEEMTKNQVSLTCLVKGFYPSDIAVEWESNGQPENNYKTTPPVLDSDGSFFLYSRLTVDKSRWQEGNVFSCSVMHEALHNHYTQKSLSLSLGGGGSGSAHPIPDSSPLLQFGGQVRQRYLYTDDACQTEAHLEIREDGTVGGAADQSPESLLQLKALKPGVIQILGVKTSRFLCQRPDGALYGSLHFDPEACSFRELLLEDGYNVYQSEAHGLPLHLCGNKSPHRDPAPRGPARFLPLPGLPPAPPEPPGILAPQPPDVGSSDPLSMVYPSQGRSPSYAS

SEQ ID NO: 858 - protein, 470 aa, Artificial Sequence
  Fusion Protein
GHGEGTFTSDLSKQLEEERVRLFIEWLKAGGPKKIRYSGGGGGGGSGGGGSGGGGSADKTHTCPPCPAPEAAGGPSVFLFPPKPKDTLMISRTPEVTCVVVDVSHEDPEVKFNWYVDGVEVHNAKTKPREEQYNSTYRVVSVLTVLHQDWLNGKEYKCKVSNKALPAPIEKTISKAKGQPREPQVYTLPPSRDELTKNQVSLTCLVKGFYPSDIAVEWESNGQPENNYKTTPPVLDSDGSFFLYSKLTVDKSRWQQGNVFSCSVMHEALHNHYTQKSLSLSPGGGGSGSAHPIPDSSPLLQFGGQVRQRYLYTDDACQTEAHLEIREDGTVGGAADQSPESLLQLKALKPGVIQILGVKTSRFLCQRPDGALYGSLHFDPEACSFRELLLEDGYNVYQSEAHGLPLHLPGCKSPHRDPAPRGPARFLPLPGLPPAPPEPPGILAPQPPDVGSSDPLSMVGSQGRSPSYAS

SEQ ID NO: 859 - protein, 471 aa, Artificial Sequence
  Fusion Protein
GHGEGTFTSDLSKQLEEERVRLFIEWLKAGGPKKIRYSGGGGGGGSGGGGSGGGGSADKTHTCPPCPAPEAAGGPSVFLFPPKPKDTLMISRTPEVTCVVVDVSHEDPEVKFNWYVDGVEVHNAKTKPREEQYNSTYRVVSVLTVLHQDWLNGKEYKCKVSNKALPAPIEKTISKAKGQPREPQVYTLPPSRDELTKNQVSLTCLVKGFYPSDIAVEWESNGQPENNYKTTPPVLDSDGSFFLYSKLTVDKSRWQQGNVFSCSVMHEALHNHYTQKSLSLSPGGGGSGSAHPIPDSSPLLQFGGQVRQRYLYTDDACQTEAHLEIREDGTVGGAADQSPESLLQLKALKPGVIQILGVKTSRFLCQRPDGALYGSLHFDPEACSFRELLLEDGYNVYQSEAHGLPLHLPGCKSPHRDPAPRGPARFLPLPGLPPAPPEPPGILAPQPPDVGSSDPLSMVYPSQGRSPSYAS

SEQ ID NO: 860 - protein, 470 aa, Artificial Sequence
  Fusion Protein
GHGEGTFTSDLSKQLEEERVRLFIEWLKAGGPKKIRYSGGGGGGGSGGGGSGGGGSADKTHTCPPCPAPEAAGGPSVFLFPPKPKDTLMISRTPEVTCVVVDVSHEDPEVKFNWYVDGVEVHNAKTKPREEQYNSTYRVVSVLTVLHQDWLNGKEYKCKVSNKALPAPIEKTISKAKGQPREPQVYTLPPSRDELTKNQVSLTCLVKGFYPSDIAVEWESNGQPENNYKTTPPVLDSDGSFFLYSKLTVDKSRWQQGNVFSCSVMHEALHNHYTQKSLSLSPGGGGSGSAHPIPDSSPLLQFGGQVRQRYLYTDDACQTEAHLEIREDGTVGGAADQSPESLLQLKALKPGVIQILGVKTSRFLCQRPDGALYGSLHFDPEACSFRELLLEDGYNVYQSEAHGLPLHLCGNKSPHRDPAPRGPARFLPLPGLPPAPPEPPGILAPQPPDVGSSDPLSMVGSQGRSPSYAS

SEQ ID NO: 861 - protein, 471 aa, Artificial Sequence
  Fusion Protein
GHGEGTFTSDLSKQLEEERVRLFIEWLKAGGPKKIRYSGGGGGGGSGGGGSGGGGSADKTHTCPPCPAPEAAGGPSVFLFPPKPKDTLMISRTPEVTCVVVDVSHEDPEVKFNWYVDGVEVHNAKTKPREEQYNSTYRVVSVLTVLHQDWLNGKEYKCKVSNKALPAPIEKTISKAKGQPREPQVYTLPPSRDELTKNQVSLTCLVKGFYPSDIAVEWESNGQPENNYKTTPPVLDSDGSFFLYSKLTVDKSRWQQGNVFSCSVMHEALHNHYTQKSLSLSPGGGGSGSAHPIPDSSPLLQFGGQVRQRYLYTDDACQTEAHLEIREDGTVGGAADQSPESLLQLKALKPGVIQILGVKTSRFLCQRPDGALYGSLHFDPEACSFRELLLEDGYNVYQSEAHGLPLHLCGNKSPHRDPAPRGPARFLPLPGLPPAPPEPPGILAPQPPDVGSSDPLSMVYPSQGRSPSYAS

SEQ ID NO: 862 - protein, 470 aa, Artificial Sequence
  Fusion Protein
GHGEGTFTSDLSKQLEEERVRLFIEWLKAGGPKKIRYSGGGGGGGSGGGGSGGGGSADKTHTCPPCPAPELLGGPSVFLFPPKPKDTLMISRTPEVTCVVVDVSHEDPEVKFNWYVDGVEVHNAKTKPREEQYNNASRVVSVLTVLHQDWLNGKEYKCKVSNKALPAPIEKTISKAKGQPREPQVYTLPPSRDELTKNQVSLTCLVKGFYPSDIAVEWESNGQPENNYKTTPPVLDSDGSFFLYSKLTVDKSRWQQGNVFSCSVMHEALHNHYTQKSLSLSPGGGGSGSAHPIPDSSPLLQFGGQVRQRYLYTDDACQTEAHLEIREDGTVGGAADQSPESLLQLKALKPGVIQILGVKTSRFLCQRPDGALYGSLHFDPEACSFRELLLEDGYNVYQSEAHGLPLHLPGCKSPHRDPAPRGPARFLPLPGLPPAPPEPPGILAPQPPDVGSSDPLSMVGSQGRSPSYAS

SEQ ID NO: 863 - protein, 471 aa, Artificial Sequence
  Fusion Protein
GHGEGTFTSDLSKQLEEERVRLFIEWLKAGGPKKIRYSGGGGGGGSGGGGSGGGGSADKTHTCPPCPAPELLGGPSVFLFPPKPKDTLMISRTPEVTCVVVDVSHEDPEVKFNWYVDGVEVHNAKTKPREEQYNNASRVVSVLTVLHQDWLNGKEYKCKVSNKALPAPIEKTISKAKGQPREPQVYTLPPSRDELTKNQVSLTCLVKGFYPSDIAVEWESNGQPENNYKTTPPVLDSDGSFFLYSKLTVDKSRWQQGNVFSCSVMHEALHNHYTQKSLSLSPGGGGSGSAHPIPDSSPLLQFGGQVRQRYLYTDDACQTEAHLEIREDGTVGGAADQSPESLLQLKALKPGVIQILGVKTSRFLCQRPDGALYGSLHFDPEACSFRELLLEDGYNVYQSEAHGLPLHLPGCKSPHRDPAPRGPARFLPLPGLPPAPPEPPGILAPQPPDVGSSDPLSMVYPSQGRSPSYAS

SEQ ID NO: 864 - protein, 470 aa, Artificial Sequence
  Fusion Protein
GHGEGTFTSDLSKQLEEERVRLFIEWLKAGGPKKIRYSGGGGGGGSGGGGSGGGGSADKTHTCPPCPAPELLGGPSVFLFPPKPKDTLMISRTPEVTCVVVDVSHEDPEVKFNWYVDGVEVHNAKTKPREEQYNNASRVVSVLTVLHQDWLNGKEYKCKVSNKALPAPIEKTISKAKGQPREPQVYTLPPSRDELTKNQVSLTCLVKGFYPSDIAVEWESNGQPENNYKTTPPVLDSDGSFFLYSKLTVDKSRWQQGNVFSCSVMHEALHNHYTQKSLSLSPGGGGSGSAHPIPDSSPLLQFGGQVRQRYLYTDDACQTEAHLEIREDGTVGGAADQSPESLLQLKALKPGVIQILGVKTSRFLCQRPDGALYGSLHFDPEACSFRELLLEDGYNVYQSEAHGLPLHLCGNKSPHRDPAPRGPARFLPLPGLPPAPPEPPGILAPQPPDVGSSDPLSMVGSQGRSPSYAS

SEQ ID NO: 865 - protein, 471 aa, Artificial Sequence
  Fusion Protein
GHGEGTFTSDLSKQLEEERVRLFIEWLKAGGPKKIRYSGGGGGGGSGGGGSGGGGSADKTHTCPPCPAPELLGGPSVFLFPPKPKDTLMISRTPEVTCVVVDVSHEDPEVKFNWYVDGVEVHNAKTKPREEQYNNASRVVSVLTVLHQDWLNGKEYKCKVSNKALPAPIEKTISKAKGQPREPQVYTLPPSRDELTKNQVSLTCLVKGFYPSDIAVEWESNGQPENNYKTTPPVLDSDGSFFLYSKLTVDKSRWQQGNVFSCSVMHEALHNHYTQKSLSLSPGGGGSGSAHPIPDSSPLLQFGGQVRQRYLYTDDACQTEAHLEIREDGTVGGAADQSPESLLQLKALKPGVIQILGVKTSRFLCQRPDGALYGSLHFDPEACSFRELLLEDGYNVYQSEAHGLPLHLCGNKSPHRDPAPRGPARFLPLPGLPPAPPEPPGILAPQPPDVGSSDPLSMVYPSQGRSPSYAS

SEQ ID NO: 866 - protein, 472 aa, Artificial Sequence; identical to SEQ ID NO: 213
  Fusion Protein

SEQ ID NO: 867 - protein, 473 aa, Artificial Sequence
  Fusion Protein
GHGEGTFTSDLSKQLEEERVRLFIEWLKAGGPKKIRYSGGGGGGGSGGGGSGGGGSAESKYGPPCPPCPAPEFEGGPSVFLFPPKPKDTLMISRTPEVTCVVVDVSQEDPEVQFNWYVDGVEVHNAKTKPREEQFNSTYRVVSVLTVLHQDWLNGKEYKCKVSNKGLPSSIEKTISKAKGQPREPQVYTLPPSQEEMTKNQVSLTCLVKGFYPSDIAVEWESNGQPENNYKTTPPVLDSDGSFFLYSRLTVDKSRWQEGNVFSCSVMHEALHNHYTQKSLSLSLGGGGSGSAHPIPDSSPLLQFGGQVRQRYLYTDDACQTEAHLEIREDGTVGGAADQSPESLLQLKALKPGVIQILGVKTSRFLCQRPDGALYGSLHFDPEACSFRELLLEDGYNVYQSEAHGLPLHLPGCKSPHRDPAPRGPARFLPLPGLPPAPPEPPGILAPQPPDVGSSDPLSMVYPSQGRSPSYAS

SEQ ID NO: 868 - protein, 472 aa, Artificial Sequence
  Fusion Protein
GHGEGTFTSDLSKQLEEERVRLFIEWLKAGGPKKIRYSGGGGGGGSGGGGSGGGGSAESKYGPPCPPCPAPEFEGGPSVFLFPPKPKDTLMISRTPEVTCVVVDVSQEDPEVQFNWYVDGVEVHNAKTKPREEQFNSTYRVVSVLTVLHQDWLNGKEYKCKVSNKGLPSSIEKTISKAKGQPREPQVYTLPPSQEEMTKNQVSLTCLVKGFYPSDIAVEWESNGQPENNYKTTPPVLDSDGSFFLYSRLTVDKSRWQEGNVFSCSVMHEALHNHYTQKSLSLSLGGGGSGSAHPIPDSSPLLQFGGQVRQRYLYTDDACQTEAHLEIREDGTVGGAADQSPESLLQLKALKPGVIQILGVKTSRFLCQRPDGALYGSLHFDPEACSFRELLLEDGYNVYQSEAHGLPLHLCGNKSPHRDPAPRGPARFLPLPGLPPAPPEPPGILAPQPPDVGSSDPLSMVGSQGRSPSYAS

SEQ ID NO: 869 - protein, 473 aa, Artificial Sequence
  Fusion Protein
GHGEGTFTSDLSKQLEEERVRLFIEWLKAGGPKKIRYSGGGGGGGSGGGGSGGGGSAESKYGPPCPPCPAPEFEGGPSVFLFPPKPKDTLMISRTPEVTCVVVDVSQEDPEVQFNWYVDGVEVHNAKTKPREEQFNSTYRVVSVLTVLHQDWLNGKEYKCKVSNKGLPSSIEKTISKAKGQPREPQVYTLPPSQEEMTKNQVSLTCLVKGFYPSDIAVEWESNGQPENNYKTTPPVLDSDGSFFLYSRLTVDKSRWQEGNVFSCSVMHEALHNHYTQKSLSLSLGGGGSGSAHPIPDSSPLLQFGGQVRQRYLYTDDACQTEAHLEIREDGTVGGAADQSPESLLQLKALKPGVIQILGVKTSRFLCQRPDGALYGSLHFDPEACSFRELLLEDGYNVYQSEAHGLPLHLCGNKSPHRDPAPRGPARFLPLPGLPPAPPEPPGILAPQPPDVGSSDPLSMVYPSQGRSPSYAS

SEQ ID NO: 870 - protein, 471 aa, Artificial Sequence
  Fusion Protein
YGEGTFTSDKSKQLEKRLVRLFIEWLIAGGHSSGKPPPKGGGGGGGSGGGGSGGGGSADKTHTCPPCPAPEAAGGPSVFLFPPKPKDTLMISRTPEVTCVVVDVSHEDPEVKFNWYVDGVEVHNAKTKPREEQYNSTYRVVSVLTVLHQDWLNGKEYKCKVSNKALPAPIEKTISKAKGQPREPQVYTLPPSRDELTKNQVSLTCLVKGFYPSDIAVEWESNGQPENNYKTTPPVLDSDGSFFLYSKLTVDKSRWQQGNVFSCSVMHEALHNHYTQKSLSLSPGGGGSGSAHPIPDSSPLLQFGGQVRQRYLYTDDACQTEAHLEIREDGTVGGAADQSPESLLQLKALKPGVIQILGVKTSRFLCQRPDGALYGSLHFDPEACSFRELLLEDGYNVYQSEAHGLPLHLPGCKSPHRDPAPRGPARFLPLPGLPPAPPEPPGILAPQPPDVGSSDPLSMVGSQGRSPSYAS

SEQ ID NO: 871 - protein, 472 aa, Artificial Sequence
  Fusion Protein
YGEGTFTSDKSKQLEKRLVRLFIEWLIAGGHSSGKPPPKGGGGGGGSGGGGSGGGGSADKTHTCPPCPAPEAAGGPSVFLFPPKPKDTLMISRTPEVTCVVVDVSHEDPEVKFNWYVDGVEVHNAKTKPREEQYNSTYRVVSVLTVLHQDWLNGKEYKCKVSNKALPAPIEKTISKAKGQPREPQVYTLPPSRDELTKNQVSLTCLVKGFYPSDIAVEWESNGQPENNYKTTPPVLDSDGSFFLYSKLTVDKSRWQQGNVFSCSVMHEALHNHYTQKSLSLSPGGGGSGSAHPIPDSSPLLQFGGQVRQRYLYTDDACQTEAHLEIREDGTVGGAADQSPESLLQLKALKPGVIQILGVKTSRFLCQRPDGALYGSLHFDPEACSFRELLLEDGYNVYQSEAHGLPLHLPGCKSPHRDPAPRGPARFLPLPGLPPAPPEPPGILAPQPPDVGSSDPLSMVYPSQGRSPSYAS

SEQ ID NO: 872 - protein, 471 aa, Artificial Sequence
  Fusion Protein
YGEGTFTSDKSKQLEKRLVRLFIEWLIAGGHSSGKPPPKGGGGGGGSGGGGSGGGGSADKTHTCPPCPAPEAAGGPSVFLFPPKPKDTLMISRTPEVTCVVVDVSHEDPEVKFNWYVDGVEVHNAKTKPREEQYNSTYRVVSVLTVLHQDWLNGKEYKCKVSNKALPAPIEKTISKAKGQPREPQVYTLPPSRDELTKNQVSLTCLVKGFYPSDIAVEWESNGQPENNYKTTPPVLDSDGSFFLYSKLTVDKSRWQQGNVFSCSVMHEALHNHYTQKSLSLSPGGGGSGSAHPIPDSSPLLQFGGQVRQRYLYTDDACQTEAHLEIREDGTVGGAADQSPESLLQLKALKPGVIQILGVKTSRFLCQRPDGALYGSLHFDPEACSFRELLLEDGYNVYQSEAHGLPLHLCGNKSPHRDPAPRGPARFLPLPGLPPAPPEPPGILAPQPPDVGSSDPLSMVGSQGRSPSYAS

SEQ ID NO: 873 - protein, 472 aa, Artificial Sequence
  Fusion Protein
YGEGTFTSDKSKQLEKRLVRLFIEWLIAGGHSSGKPPPKGGGGGGGSGGGGSGGGGSADKTHTCPPCPAPEAAGGPSVFLFPPKPKDTLMISRTPEVTCVVVDVSHEDPEVKFNWYVDGVEVHNAKTKPREEQYNSTYRVVSVLTVLHQDWLNGKEYKCKVSNKALPAPIEKTISKAKGQPREPQVYTLPPSRDELTKNQVSLTCLVKGFYPSDIAVEWESNGQPENNYKTTPPVLDSDGSFFLYSKLTVDKSRWQQGNVFSCSVMHEALHNHYTQKSLSLSPGGGGSGSAHPIPDSSPLLQFGGQVRQRYLYTDDACQTEAHLEIREDGTVGGAADQSPESLLQLKALKPGVIQILGVKTSRFLCQRPDGALYGSLHFDPEACSFRELLLEDGYNVYQSEAHGLPLHLCGNKSPHRDPAPRGPARFLPLPGLPPAPPEPPGILAPQPPDVGSSDPLSMVYPSQGRSPSYAS

SEQ ID NO: 874 - protein, 471 aa, Artificial Sequence
  Fusion Protein
YGEGTFTSDKSKQLEKRLVRLFIEWLIAGGHSSGKPPPKGGGGGGGSGGGGSGGGGSADKTHTCPPCPAPELLGGPSVFLFPPKPKDTLMISRTPEVTCVVVDVSHEDPEVKFNWYVDGVEVHNAKTKPREEQYNNASRVVSVLTVLHQDWLNGKEYKCKVSNKALPAPIEKTISKAKGQPREPQVYTLPPSRDELTKNQVSLTCLVKGFYPSDIAVEWESNGQPENNYKTTPPVLDSDGSFFLYSKLTVDKSRWQQGNVFSCSVMHEALHNHYTQKSLSLSPGGGGSGSAHPIPDSSPLLQFGGQVRQRYLYTDDACQTEAHLEIREDGTVGGAADQSPESLLQLKALKPGVIQILGVKTSRFLCQRPDGALYGSLHFDPEACSFRELLLEDGYNVYQSEAHGLPLHLPGCKSPHRDPAPRGPARFLPLPGLPPAPPEPPGILAPQPPDVGSSDPLSMVGSQGRSPSYAS

SEQ ID NO: 875 - protein, 472 aa, Artificial Sequence
  Fusion Protein
YGEGTFTSDKSKQLEKRLVRLFIEWLIAGGHSSGKPPPKGGGGGGGSGGGGSGGGGSADKTHTCPPCPAPELLGGPSVFLFPPKPKDTLMISRTPEVTCVVVDVSHEDPEVKFNWYVDGVEVHNAKTKPREEQYNNASRVVSVLTVLHQDWLNGKEYKCKVSNKALPAPIEKTISKAKGQPREPQVYTLPPSRDELTKNQVSLTCLVKGFYPSDIAVEWESNGQPENNYKTTPPVLDSDGSFFLYSKLTVDKSRWQQGNVFSCSVMHEALHNHYTQKSLSLSPGGGGSGSAHPIPDSSPLLQFGGQVRQRYLYTDDACQTEAHLEIREDGTVGGAADQSPESLLQLKALKPGVIQILGVKTSRFLCQRPDGALYGSLHFDPEACSFRELLLEDGYNVYQSEAHGLPLHLPGCKSPHRDPAPRGPARFLPLPGLPPAPPEPPGILAPQPPDVGSSDPLSMVYPSQGRSPSYAS

SEQ ID NO: 876 - protein, 471 aa, Artificial Sequence
  Fusion Protein
YGEGTFTSDKSKQLEKRLVRLFIEWLIAGGHSSGKPPPKGGGGGGGSGGGGSGGGGSADKTHTCPPCPAPELLGGPSVFLFPPKPKDTLMISRTPEVTCVVVDVSHEDPEVKFNWYVDGVEVHNAKTKPREEQYNNASRVVSVLTVLHQDWLNGKEYKCKVSNKALPAPIEKTISKAKGQPREPQVYTLPPSRDELTKNQVSLTCLVKGFYPSDIAVEWESNGQPENNYKTTPPVLDSDGSFFLYSKLTVDKSRWQQGNVFSCSVMHEALHNHYTQKSLSLSPGGGGSGSAHPIPDSSPLLQFGGQVRQRYLYTDDACQTEAHLEIREDGTVGGAADQSPESLLQLKALKPGVIQILGVKTSRFLCQRPDGALYGSLHFDPEACSFRELLLEDGYNVYQSEAHGLPLHLCGNKSPHRDPAPRGPARFLPLPGLPPAPPEPPGILAPQPPDVGSSDPLSMVGSQGRSPSYAS

SEQ ID NO: 877 - protein, 472 aa, Artificial Sequence
  Fusion Protein
YGEGTFTSDKSKQLEKRLVRLFIEWLIAGGHSSGKPPPKGGGGGGGSGGGGSGGGGSADKTHTCPPCPAPELLGGPSVFLFPPKPKDTLMISRTPEVTCVVVDVSHEDPEVKFNWYVDGVEVHNAKTKPREEQYNNASRVVSVLTVLHQDWLNGKEYKCKVSNKALPAPIEKTISKAKGQPREPQVYTLPPSRDELTKNQVSLTCLVKGFYPSDIAVEWESNGQPENNYKTTPPVLDSDGSFFLYSKLTVDKSRWQQGNVFSCSVMHEALHNHYTQKSLSLSPGGGGSGSAHPIPDSSPLLQFGGQVRQRYLYTDDACQTEAHLEIREDGTVGGAADQSPESLLQLKALKPGVIQILGVKTSRFLCQRPDGALYGSLHFDPEACSFRELLLEDGYNVYQSEAHGLPLHLCGNKSPHRDPAPRGPARFLPLPGLPPAPPEPPGILAPQPPDVGSSDPLSMVYPSQGRSPSYAS

SEQ ID NO: 878 - protein, 474 aa, Artificial Sequence
  Fusion Protein
YGEGTFTSDKSKQLEKRLVRLFIEWLIAGGHSSGKPPPKGGGGGGGSGGGGSGGGGSAESKYGPPCPPCPAPEFEGGPSVFLFPPKPKDTLMISRTPEVTCVVVDVSQEDPEVQFNWYVDGVEVHNAKTKPREEQFNSTYRVVSVLTVLHQDWLNGKEYKCKVSNKGLPSSIEKTISKAKGQPREPQVYTLPPSQEEMTKNQVSLTCLVKGFYPSDIAVEWESNGQPENNYKTTPPVLDSDGSFFLYSRLTVDKSRWQEGNVFSCSVMHEALHNHYTQKSLSLSLGGGGSGSAHPIPDSSPLLQFGGQVRQRYLYTDDACQTEAHLEIREDGTVGGAADQSPESLLQLKALKPGVIQILGVKTSRFLCQRPDGALYGSLHFDPEACSFRELLLEDGYNVYQSEAHGLPLHLPGCKSPHRDPAPRGPARFLPLPGLPPAPPEPPGILAPQPPDVGSSDPLSMVYPSQGRSPSYAS

SEQ ID NO: 879 - protein, 473 aa, Artificial Sequence
  Fusion Protein
YGEGTFTSDKSKQLEKRLVRLFIEWLIAGGHSSGKPPPKGGGGGGGSGGGGSGGGGSAESKYGPPCPPCPAPEFEGGPSVFLFPPKPKDTLMISRTPEVTCVVVDVSQEDPEVQFNWYVDGVEVHNAKTKPREEQFNSTYRVVSVLTVLHQDWLNGKEYKCKVSNKGLPSSIEKTISKAKGQPREPQVYTLPPSQEEMTKNQVSLTCLVKGFYPSDIAVEWESNGQPENNYKTTPPVLDSDGSFFLYSRLTVDKSRWQEGNVFSCSVMHEALHNHYTQKSLSLSLGGGGSGSAHPIPDSSPLLQFGGQVRQRYLYTDDACQTEAHLEIREDGTVGGAADQSPESLLQLKALKPGVIQILGVKTSRFLCQRPDGALYGSLHFDPEACSFRELLLEDGYNVYQSEAHGLPLHLCGNKSPHRDPAPRGPARFLPLPGLPPAPPEPPGILAPQPPDVGSSDPLSMVGSQGRSPSYAS

SEQ ID NO: 880 - protein, 474 aa, Artificial Sequence
  Fusion Protein
YGEGTFTSDKSKQLEKRLVRLFIEWLIAGGHSSGKPPPKGGGGGGGSGGGGSGGGGSAESKYGPPCPPCPAPEFEGGPSVFLFPPKPKDTLMISRTPEVTCVVVDVSQEDPEVQFNWYVDGVEVHNAKTKPREEQFNSTYRVVSVLTVLHQDWLNGKEYKCKVSNKGLPSSIEKTISKAKGQPREPQVYTLPPSQEEMTKNQVSLTCLVKGFYPSDIAVEWESNGQPENNYKTTPPVLDSDGSFFLYSRLTVDKSRWQEGNVFSCSVMHEALHNHYTQKSLSLSLGGGGSGSAHPIPDSSPLLQFGGQVRQRYLYTDDACQTEAHLEIREDGTVGGAADQSPESLLQLKALKPGVIQILGVKTSRFLCQRPDGALYGSLHFDPEACSFRELLLEDGYNVYQSEAHGLPLHLCGNKSPHRDPAPRGPARFLPLPGLPPAPPEPPGILAPQPPDVGSSDPLSMVYPSQGRSPSYAS

SEQ ID NO: 881 - protein, 471 aa, Artificial Sequence
  Fusion Protein
YGEGTFTSDKSKQLEKRLAHLFIEWLIAGGHSSGKPPPKGGGGGGGSGGGGSGGGGSADKTHTCPPCPAPEAAGGPSVFLFPPKPKDTLMISRTPEVTCVVVDVSHEDPEVKFNWYVDGVEVHNAKTKPREEQYNSTYRVVSVLTVLHQDWLNGKEYKCKVSNKALPAPIEKTISKAKGQPREPQVYTLPPSRDELTKNQVSLTCLVKGFYPSDIAVEWESNGQPENNYKTTPPVLDSDGSFFLYSKLTVDKSRWQQGNVFSCSVMHEALHNHYTQKSLSLSPGGGGSGSAHPIPDSSPLLQFGGQVRQRYLYTDDACQTEAHLEIREDGTVGGAADQSPESLLQLKALKPGVIQILGVKTSRFLCQRPDGALYGSLHFDPEACSFRELLLEDGYNVYQSEAHGLPLHLPGCKSPHRDPAPRGPARFLPLPGLPPAPPEPPGILAPQPPDVGSSDPLSMVGSQGRSPSYAS

SEQ ID NO: 882 - protein, 472 aa, Artificial Sequence
  Fusion Protein
YGEGTFTSDKSKQLEKRLAHLFIEWLIAGGHSSGKPPPKGGGGGGGSGGGGSGGGGSADKTHTCPPCPAPEAAGGPSVFLFPPKPKDTLMISRTPEVTCVVVDVSHEDPEVKFNWYVDGVEVHNAKTKPREEQYNSTYRVVSVLTVLHQDWLNGKEYKCKVSNKALPAPIEKTISKAKGQPREPQVYTLPPSRDELTKNQVSLTCLVKGFYPSDIAVEWESNGQPENNYKTTPPVLDSDGSFFLYSKLTVDKSRWQQGNVFSCSVMHEALHNHYTQKSLSLSPGGGGSGSAHPIPDSSPLLQFGGQVRQRYLYTDDACQTEAHLEIREDGTVGGAADQSPESLLQLKALKPGVIQILGVKTSRFLCQRPDGALYGSLHFDPEACSFRELLLEDGYNVYQSEAHGLPLHLPGCKSPHRDPAPRGPARFLPLPGLPPAPPEPPGILAPQPPDVGSSDPLSMVYPSQGRSPSYAS

SEQ ID NO: 883 - protein, 471 aa, Artificial Sequence
  Fusion Protein
YGEGTFTSDKSKQLEKRLAHLFIEWLIAGGHSSGKPPPKGGGGGGGSGGGGSGGGGSADKTHTCPPCPAPEAAGGPSVFLFPPKPKDTLMISRTPEVTCVVVDVSHEDPEVKFNWYVDGVEVHNAKTKPREEQYNSTYRVVSVLTVLHQDWLNGKEYKCKVSNKALPAPIEKTISKAKGQPREPQVYTLPPSRDELTKNQVSLTCLVKGFYPSDIAVEWESNGQPENNYKTTPPVLDSDGSFFLYSKLTVDKSRWQQGNVFSCSVMHEALHNHYTQKSLSLSPGGGGSGSAHPIPDSSPLLQFGGQVRQRYLYTDDACQTEAHLEIREDGTVGGAADQSPESLLQLKALKPGVIQILGVKTSRFLCQRPDGALYGSLHFDPEACSFRELLLEDGYNVYQSEAHGLPLHLCGNKSPHRDPAPRGPARFLPLPGLPPAPPEPPGILAPQPPDVGSSDPLSMVGSQGRSPSYAS

SEQ ID NO: 884 - protein, 472 aa, Artificial Sequence
  Fusion Protein
YGEGTFTSDKSKQLEKRLAHLFIEWLIAGGHSSGKPPPKGGGGGGGSGGGGSGGGGSADKTHTCPPCPAPEAAGGPSVFLFPPKPKDTLMISRTPEVTCVVVDVSHEDPEVKFNWYVDGVEVHNAKTKPREEQYNSTYRVVSVLTVLHQDWLNGKEYKCKVSNKALPAPIEKTISKAKGQPREPQVYTLPPSRDELTKNQVSLTCLVKGFYPSDIAVEWESNGQPENNYKTTPPVLDSDGSFFLYSKLTVDKSRWQQGNVFSCSVMHEALHNHYTQKSLSLSPGGGGSGSAHPIPDSSPLLQFGGQVRQRYLYTDDACQTEAHLEIREDGTVGGAADQSPESLLQLKALKPGVIQILGVKTSRFLCQRPDGALYGSLHFDPEACSFRELLLEDGYNVYQSEAHGLPLHLCGNKSPHRDPAPRGPARFLPLPGLPPAPPEPPGILAPQPPDVGSSDPLSMVYPSQGRSPSYAS

SEQ ID NO: 885 - protein, 471 aa, Artificial Sequence
  Fusion Protein
YGEGTFTSDKSKQLEKRLAHLFIEWLIAGGHSSGKPPPKGGGGGGGSGGGGSGGGGSADKTHTCPPCPAPELLGGPSVFLFPPKPKDTLMISRTPEVTCVVVDVSHEDPEVKFNWYVDGVEVHNAKTKPREEQYNNASRVVSVLTVLHQDWLNGKEYKCKVSNKALPAPIEKTISKAKGQPREPQVYTLPPSRDELTKNQVSLTCLVKGFYPSDIAVEWESNGQPENNYKTTPPVLDSDGSFFLYSKLTVDKSRWQQGNVFSCSVMHEALHNHYTQKSLSLSPGGGGSGSAHPIPDSSPLLQFGGQVRQRYLYTDDACQTEAHLEIREDGTVGGAADQSPESLLQLKALKPGVIQILGVKTSRFLCQRPDGALYGSLHFDPEACSFRELLLEDGYNVYQSEAHGLPLHLPGCKSPHRDPAPRGPARFLPLPGLPPAPPEPPGILAPQPPDVGSSDPLSMVGSQGRSPSYAS

SEQ ID NO: 886 - protein, 472 aa, Artificial Sequence
  Fusion Protein
YGEGTFTSDKSKQLEKRLAHLFIEWLIAGGHSSGKPPPKGGGGGGGSGGGGSGGGGSADKTHTCPPCPAPELLGGPSVFLFPPKPKDTLMISRTPEVTCVVVDVSHEDPEVKFNWYVDGVEVHNAKTKPREEQYNNASRVVSVLTVLHQDWLNGKEYKCKVSNKALPAPIEKTISKAKGQPREPQVYTLPPSRDELTKNQVSLTCLVKGFYPSDIAVEWESNGQPENNYKTTPPVLDSDGSFFLYSKLTVDKSRWQQGNVFSCSVMHEALHNHYTQKSLSLSPGGGGSGSAHPIPDSSPLLQFGGQVRQRYLYTDDACQTEAHLEIREDGTVGGAADQSPESLLQLKALKPGVIQILGVKTSRFLCQRPDGALYGSLHFDPEACSFRELLLEDGYNVYQSEAHGLPLHLPGCKSPHRDPAPRGPARFLPLPGLPPAPPEPPGILAPQPPDVGSSDPLSMVYPSQGRSPSYAS

SEQ ID NO: 887 - protein, 471 aa, Artificial Sequence
  Fusion Protein
YGEGTFTSDKSKQLEKRLAHLFIEWLIAGGHSSGKPPPKGGGGGGGSGGGGSGGGGSADKTHTCPPCPAPELLGGPSVFLFPPKPKDTLMISRTPEVTCVVVDVSHEDPEVKFNWYVDGVEVHNAKTKPREEQYNNASRVVSVLTVLHQDWLNGKEYKCKVSNKALPAPIEKTISKAKGQPREPQVYTLPPSRDELTKNQVSLTCLVKGFYPSDIAVEWESNGQPENNYKTTPPVLDSDGSFFLYSKLTVDKSRWQQGNVFSCSVMHEALHNHYTQKSLSLSPGGGGSGSAHPIPDSSPLLQFGGQVRQRYLYTDDACQTEAHLEIREDGTVGGAADQSPESLLQLKALKPGVIQILGVKTSRFLCQRPDGALYGSLHFDPEACSFRELLLEDGYNVYQSEAHGLPLHLCGNKSPHRDPAPRGPARFLPLPGLPPAPPEPPGILAPQPPDVGSSDPLSMVGSQGRSPSYAS

SEQ ID NO: 888 - protein, 472 aa, Artificial Sequence
  Fusion Protein
YGEGTFTSDKSKQLEKRLAHLFIEWLIAGGHSSGKPPPKGGGGGGGSGGGGSGGGGSADKTHTCPPCPAPELLGGPSVFLFPPKPKDTLMISRTPEVTCVVVDVSHEDPEVKFNWYVDGVEVHNAKTKPREEQYNNASRVVSVLTVLHQDWLNGKEYKCKVSNKALPAPIEKTISKAKGQPREPQVYTLPPSRDELTKNQVSLTCLVKGFYPSDIAVEWESNGQPENNYKTTPPVLDSDGSFFLYSKLTVDKSRWQQGNVFSCSVMHEALHNHYTQKSLSLSPGGGGSGSAHPIPDSSPLLQFGGQVRQRYLYTDDACQTEAHLEIREDGTVGGAADQSPESLLQLKALKPGVIQILGVKTSRFLCQRPDGALYGSLHFDPEACSFRELLLEDGYNVYQSEAHGLPLHLCGNKSPHRDPAPRGPARFLPLPGLPPAPPEPPGILAPQPPDVGSSDPLSMVYPSQGRSPSYAS

SEQ ID NO: 889 - protein, 474 aa, Artificial Sequence
  Fusion Protein
YGEGTFTSDKSKQLEKRLAHLFIEWLIAGGHSSGKPPPKGGGGGGGSGGGGSGGGGSAESKYGPPCPPCPAPEFEGGPSVFLFPPKPKDTLMISRTPEVTCVVVDVSQEDPEVQFNWYVDGVEVHNAKTKPREEQFNSTYRVVSVLTVLHQDWLNGKEYKCKVSNKGLPSSIEKTISKAKGQPREPQVYTLPPSQEEMTKNQVSLTCLVKGFYPSDIAVEWESNGQPENNYKTTPPVLDSDGSFFLYSRLTVDKSRWQEGNVFSCSVMHEALHNHYTQKSLSLSLGGGGSGSAHPIPDSSPLLQFGGQVRQRYLYTDDACQTEAHLEIREDGTVGGAADQSPESLLQLKALKPGVIQILGVKTSRFLCQRPDGALYGSLHFDPEACSFRELLLEDGYNVYQSEAHGLPLHLPGCKSPHRDPAPRGPARFLPLPGLPPAPPEPPGILAPQPPDVGSSDPLSMVYPSQGRSPSYAS

SEQ ID NO: 890 - protein, 473 aa, Artificial Sequence
  Fusion Protein
YGEGTFTSDKSKQLEKRLAHLFIEWLIAGGHSSGKPPPKGGGGGGGSGGGGSGGGGSAESKYGPPCPPCPAPEFEGGPSVFLFPPKPKDTLMISRTPEVTCVVVDVSQEDPEVQFNWYVDGVEVHNAKTKPREEQFNSTYRVVSVLTVLHQDWLNGKEYKCKVSNKGLPSSIEKTISKAKGQPREPQVYTLPPSQEEMTKNQVSLTCLVKGFYPSDIAVEWESNGQPENNYKTTPPVLDSDGSFFLYSRLTVDKSRWQEGNVFSCSVMHEALHNHYTQKSLSLSLGGGGSGSAHPIPDSSPLLQFGGQVRQRYLYTDDACQTEAHLEIREDGTVGGAADQSPESLLQLKALKPGVIQILGVKTSRFLCQRPDGALYGSLHFDPEACSFRELLLEDGYNVYQSEAHGLPLHLCGNKSPHRDPAPRGPARFLPLPGLPPAPPEPPGILAPQPPDVGSSDPLSMVGSQGRSPSYAS

SEQ ID NO: 891 - protein, 474 aa, Artificial Sequence
  Fusion Protein
YGEGTFTSDKSKQLEKRLAHLFIEWLIAGGHSSGKPPPKGGGGGGGSGGGGSGGGGSAESKYGPPCPPCPAPEFEGGPSVFLFPPKPKDTLMISRTPEVTCVVVDVSQEDPEVQFNWYVDGVEVHNAKTKPREEQFNSTYRVVSVLTVLHQDWLNGKEYKCKVSNKGLPSSIEKTISKAKGQPREPQVYTLPPSQEEMTKNQVSLTCLVKGFYPSDIAVEWESNGQPENNYKTTPPVLDSDGSFFLYSRLTVDKSRWQEGNVFSCSVMHEALHNHYTQKSLSLSLGGGGSGSAHPIPDSSPLLQFGGQVRQRYLYTDDACQTEAHLEIREDGTVGGAADQSPESLLQLKALKPGVIQILGVKTSRFLCQRPDGALYGSLHFDPEACSFRELLLEDGYNVYQSEAHGLPLHLCGNKSPHRDPAPRGPARFLPLPGLPPAPPEPPGILAPQPPDVGSSDPLSMVYPSQGRSPSYAS

SEQ ID NO: 892 - protein, 471 aa, Artificial Sequence
  Fusion Protein
YGEGTFTSDKSKQLEKRLVRLFIEWLIKGGHSSGKPPPKGGGGGGGSGGGGSGGGGSADKTHTCPPCPAPEAAGGPSVFLFPPKPKDTLMISRTPEVTCVVVDVSHEDPEVKFNWYVDGVEVHNAKTKPREEQYNSTYRVVSVLTVLHQDWLNGKEYKCKVSNKALPAPIEKTISKAKGQPREPQVYTLPPSRDELTKNQVSLTCLVKGFYPSDIAVEWESNGQPENNYKTTPPVLDSDGSFFLYSKLTVDKSRWQQGNVFSCSVMHEALHNHYTQKSLSLSPGGGGSGSAHPIPDSSPLLQFGGQVRQRYLYTDDACQTEAHLEIREDGTVGGAADQSPESLLQLKALKPGVIQILGVKTSRFLCQRPDGALYGSLHFDPEACSFRELLLEDGYNVYQSEAHGLPLHLPGCKSPHRDPAPRGPARFLPLPGLPPAPPEPPGILAPQPPDVGSSDPLSMVGSQGRSPSYAS

SEQ ID NO: 893 - protein, 472 aa, Artificial Sequence
  Fusion Protein
YGEGTFTSDKSKQLEKRLVRLFIEWLIKGGHSSGKPPPKGGGGGGGSGGGGSGGGGSADKTHTCPPCPAPEAAGGPSVFLFPPKPKDTLMISRTPEVTCVVVDVSHEDPEVKFNWYVDGVEVHNAKTKPREEQYNSTYRVVSVLTVLHQDWLNGKEYKCKVSNKALPAPIEKTISKAKGQPREPQVYTLPPSRDELTKNQVSLTCLVKGFYPSDIAVEWESNGQPENNYKTTPPVLDSDGSFFLYSKLTVDKSRWQQGNVFSCSVMHEALHNHYTQKSLSLSPGGGGSGSAHPIPDSSPLLQFGGQVRQRYLYTDDACQTEAHLEIREDGTVGGAADQSPESLLQLKALKPGVIQILGVKTSRFLCQRPDGALYGSLHFDPEACSFRELLLEDGYNVYQSEAHGLPLHLPGCKSPHRDPAPRGPARFLPLPGLPPAPPEPPGILAPQPPDVGSSDPLSMVYPSQGRSPSYAS

SEQ ID NO: 894 - protein, 471 aa, Artificial Sequence
  Fusion Protein
YGEGTFTSDKSKQLEKRLVRLFIEWLIKGGHSSGKPPPKGGGGGGGSGGGGSGGGGSADKTHTCPPCPAPEAAGGPSVFLFPPKPKDTLMISRTPEVTCVVVDVSHEDPEVKFNWYVDGVEVHNAKTKPREEQYNSTYRVVSVLTVLHQDWLNGKEYKCKVSNKALPAPIEKTISKAKGQPREPQVYTLPPSRDELTKNQVSLTCLVKGFYPSDIAVEWESNGQPENNYKTTPPVLDSDGSFFLYSKLTVDKSRWQQGNVFSCSVMHEALHNHYTQKSLSLSPGGGGSGSAHPIPDSSPLLQFGGQVRQRYLYTDDACQTEAHLEIREDGTVGGAADQSPESLLQLKALKPGVIQILGVKTSRFLCQRPDGALYGSLHFDPEACSFRELLLEDGYNVYQSEAHGLPLHLCGNKSPHRDPAPRGPARFLPLPGLPPAPPEPPGILAPQPPDVGSSDPLSMVGSQGRSPSYAS

SEQ ID NO: 895 - protein, 472 aa, Artificial Sequence
  Fusion Protein
YGEGTFTSDKSKQLEKRLVRLFIEWLIKGGHSSGKPPPKGGGGGGGSGGGGSGGGGSADKTHTCPPCPAPEAAGGPSVFLFPPKPKDTLMISRTPEVTCVVVDVSHEDPEVKFNWYVDGVEVHNAKTKPREEQYNSTYRVVSVLTVLHQDWLNGKEYKCKVSNKALPAPIEKTISKAKGQPREPQVYTLPPSRDELTKNQVSLTCLVKGFYPSDIAVEWESNGQPENNYKTTPPVLDSDGSFFLYSKLTVDKSRWQQGNVFSCSVMHEALHNHYTQKSLSLSPGGGGSGSAHPIPDSSPLLQFGGQVRQRYLYTDDACQTEAHLEIREDGTVGGAADQSPESLLQLKALKPGVIQILGVKTSRFLCQRPDGALYGSLHFDPEACSFRELLLEDGYNVYQSEAHGLPLHLCGNKSPHRDPAPRGPARFLPLPGLPPAPPEPPGILAPQPPDVGSSDPLSMVYPSQGRSPSYAS

SEQ ID NO: 896 - protein, 471 aa, Artificial Sequence
  Fusion Protein
YGEGTFTSDKSKQLEKRLVRLFIEWLIKGGHSSGKPPPKGGGGGGGSGGGGSGGGGSADKTHTCPPCPAPELLGGPSVFLFPPKPKDTLMISRTPEVTCVVVDVSHEDPEVKFNWYVDGVEVHNAKTKPREEQYNNASRVVSVLTVLHQDWLNGKEYKCKVSNKALPAPIEKTISKAKGQPREPQVYTLPPSRDELTKNQVSLTCLVKGFYPSDIAVEWESNGQPENNYKTTPPVLDSDGSFFLYSKLTVDKSRWQQGNVFSCSVMHEALHNHYTQKSLSLSPGGGGSGSAHPIPDSSPLLQFGGQVRQRYLYTDDACQTEAHLEIREDGTVGGAADQSPESLLQLKALKPGVIQILGVKTSRFLCQRPDGALYGSLHFDPEACSFRELLLEDGYNVYQSEAHGLPLHLPGCKSPHRDPAPRGPARFLPLPGLPPAPPEPPGILAPQPPDVGSSDPLSMVGSQGRSPSYAS

SEQ ID NO: 897 - protein, 472 aa, Artificial Sequence
  Fusion Protein
YGEGTFTSDKSKQLEKRLVRLFIEWLIKGGHSSGKPPPKGGGGGGGSGGGGSGGGGSADKTHTCPPCPAPELLGGPSVFLFPPKPKDTLMISRTPEVTCVVVDVSHEDPEVKFNWYVDGVEVHNAKTKPREEQYNNASRVVSVLTVLHQDWLNGKEYKCKVSNKALPAPIEKTISKAKGQPREPQVYTLPPSRDELTKNQVSLTCLVKGFYPSDIAVEWESNGQPENNYKTTPPVLDSDGSFFLYSKLTVDKSRWQQGNVFSCSVMHEALHNHYTQKSLSLSPGGGGSGSAHPIPDSSPLLQFGGQVRQRYLYTDDACQTEAHLEIREDGTVGGAADQSPESLLQLKALKPGVIQILGVKTSRFLCQRPDGALYGSLHFDPEACSFRELLLEDGYNVYQSEAHGLPLHLPGCKSPHRDPAPRGPARFLPLPGLPPAPPEPPGILAPQPPDVGSSDPLSMVYPSQGRSPSYAS

SEQ ID NO: 898 - protein, 471 aa, Artificial Sequence
  Fusion Protein
YGEGTFTSDKSKQLEKRLVRLFIEWLIKGGHSSGKPPPKGGGGGGGSGGGGSGGGGSADKTHTCPPCPAPELLGGPSVFLFPPKPKDTLMISRTPEVTCVVVDVSHEDPEVKFNWYVDGVEVHNAKTKPREEQYNNASRVVSVLTVLHQDWLNGKEYKCKVSNKALPAPIEKTISKAKGQPREPQVYTLPPSRDELTKNQVSLTCLVKGFYPSDIAVEWESNGQPENNYKTTPPVLDSDGSFFLYSKLTVDKSRWQQGNVFSCSVMHEALHNHYTQKSLSLSPGGGGSGSAHPIPDSSPLLQFGGQVRQRYLYTDDACQTEAHLEIREDGTVGGAADQSPESLLQLKALKPGVIQILGVKTSRFLCQRPDGALYGSLHFDPEACSFRELLLEDGYNVYQSEAHGLPLHLCGNKSPHRDPAPRGPARFLPLPGLPPAPPEPPGILAPQPPDVGSSDPLSMVGSQGRSPSYAS

SEQ ID NO: 899 - protein, 472 aa, Artificial Sequence
  Fusion Protein
YGEGTFTSDKSKQLEKRLVRLFIEWLIKGGHSSGKPPPKGGGGGGGSGGGGSGGGGSADKTHTCPPCPAPELLGGPSVFLFPPKPKDTLMISRTPEVTCVVVDVSHEDPEVKFNWYVDGVEVHNAKTKPREEQYNNASRVVSVLTVLHQDWLNGKEYKCKVSNKALPAPIEKTISKAKGQPREPQVYTLPPSRDELTKNQVSLTCLVKGFYPSDIAVEWESNGQPENNYKTTPPVLDSDGSFFLYSKLTVDKSRWQQGNVFSCSVMHEALHNHYTQKSLSLSPGGGGSGSAHPIPDSSPLLQFGGQVRQRYLYTDDACQTEAHLEIREDGTVGGAADQSPESLLQLKALKPGVIQILGVKTSRFLCQRPDGALYGSLHFDPEACSFRELLLEDGYNVYQSEAHGLPLHLCGNKSPHRDPAPRGPARFLPLPGLPPAPPEPPGILAPQPPDVGSSDPLSMVYPSQGRSPSYAS

SEQ ID NO: 900 - protein, 474 aa, Artificial Sequence
  Fusion Protein
YGEGTFTSDKSKQLEKRLVRLFIEWLIKGGHSSGKPPPKGGGGGGGSGGGGSGGGGSAESKYGPPCPPCPAPEFEGGPSVFLFPPKPKDTLMISRTPEVTCVVVDVSQEDPEVQFNWYVDGVEVHNAKTKPREEQFNSTYRVVSVLTVLHQDWLNGKEYKCKVSNKGLPSSIEKTISKAKGQPREPQVYTLPPSQEEMTKNQVSLTCLVKGFYPSDIAVEWESNGQPENNYKTTPPVLDSDGSFFLYSRLTVDKSRWQEGNVFSCSVMHEALHNHYTQKSLSLSLGGGGSGSAHPIPDSSPLLQFGGQVRQRYLYTDDACQTEAHLEIREDGTVGGAADQSPESLLQLKALKPGVIQILGVKTSRFLCQRPDGALYGSLHFDPEACSFRELLLEDGYNVYQSEAHGLPLHLPGCKSPHRDPAPRGPARFLPLPGLPPAPPEPPGILAPQPPDVGSSDPLSMVYPSQGRSPSYAS

SEQ ID NO: 901 - protein, 473 aa, Artificial Sequence
  Fusion Protein
YGEGTFTSDKSKQLEKRLVRLFIEWLIKGGHSSGKPPPKGGGGGGGSGGGGSGGGGSAESKYGPPCPPCPAPEFEGGPSVFLFPPKPKDTLMISRTPEVTCVVVDVSQEDPEVQFNWYVDGVEVHNAKTKPREEQFNSTYRVVSVLTVLHQDWLNGKEYKCKVSNKGLPSSIEKTISKAKGQPREPQVYTLPPSQEEMTKNQVSLTCLVKGFYPSDIAVEWESNGQPENNYKTTPPVLDSDGSFFLYSRLTVDKSRWQEGNVFSCSVMHEALHNHYTQKSLSLSLGGGGSGSAHPIPDSSPLLQFGGQVRQRYLYTDDACQTEAHLEIREDGTVGGAADQSPESLLQLKALKPGVIQILGVKTSRFLCQRPDGALYGSLHFDPEACSFRELLLEDGYNVYQSEAHGLPLHLCGNKSPHRDPAPRGPARFLPLPGLPPAPPEPPGILAPQPPDVGSSDPLSMVGSQGRSPSYAS

SEQ ID NO: 902 - protein, 474 aa, Artificial Sequence
  Fusion Protein
YGEGTFTSDKSKQLEKRLVRLFIEWLIKGGHSSGKPPPKGGGGGGGSGGGGSGGGGSAESKYGPPCPPCPAPEFEGGPSVFLFPPKPKDTLMISRTPEVTCVVVDVSQEDPEVQFNWYVDGVEVHNAKTKPREEQFNSTYRVVSVLTVLHQDWLNGKEYKCKVSNKGLPSSIEKTISKAKGQPREPQVYTLPPSQEEMTKNQVSLTCLVKGFYPSDIAVEWESNGQPENNYKTTPPVLDSDGSFFLYSRLTVDKSRWQEGNVFSCSVMHEALHNHYTQKSLSLSLGGGGSGSAHPIPDSSPLLQFGGQVRQRYLYTDDACQTEAHLEIREDGTVGGAADQSPESLLQLKALKPGVIQILGVKTSRFLCQRPDGALYGSLHFDPEACSFRELLLEDGYNVYQSEAHGLPLHLCGNKSPHRDPAPRGPARFLPLPGLPPAPPEPPGILAPQPPDVGSSDPLSMVYPSQGRSPSYAS

SEQ ID NO: 903 - protein, 471 aa, Artificial Sequence
  Fusion Protein
YGEGTFTSDKSKQLEKRLAHLFIEWLIKGGHSSGKPPPKGGGGGGGSGGGGSGGGGSADKTHTCPPCPAPEAAGGPSVFLFPPKPKDTLMISRTPEVTCVVVDVSHEDPEVKFNWYVDGVEVHNAKTKPREEQYNSTYRVVSVLTVLHQDWLNGKEYKCKVSNKALPAPIEKTISKAKGQPREPQVYTLPPSRDELTKNQVSLTCLVKGFYPSDIAVEWESNGQPENNYKTTPPVLDSDGSFFLYSKLTVDKSRWQQGNVFSCSVMHEALHNHYTQKSLSLSPGGGGSGSAHPIPDSSPLLQFGGQVRQRYLYTDDACQTEAHLEIREDGTVGGAADQSPESLLQLKALKPGVIQILGVKTSRFLCQRPDGALYGSLHFDPEACSFRELLLEDGYNVYQSEAHGLPLHLPGCKSPHRDPAPRGPARFLPLPGLPPAPPEPPGILAPQPPDVGSSDPLSMVGSQGRSPSYAS

SEQ ID NO: 904 - protein, 472 aa, Artificial Sequence
  Fusion Protein
YGEGTFTSDKSKQLEKRLAHLFIEWLIKGGHSSGKPPPKGGGGGGGSGGGGSGGGGSADKTHTCPPCPAPEAAGGPSVFLFPPKPKDTLMISRTPEVTCVVVDVSHEDPEVKFNWYVDGVEVHNAKTKPREEQYNSTYRVVSVLTVLHQDWLNGKEYKCKVSNKALPAPIEKTISKAKGQPREPQVYTLPPSRDELTKNQVSLTCLVKGFYPSDIAVEWESNGQPENNYKTTPPVLDSDGSFFLYSKLTVDKSRWQQGNVFSCSVMHEALHNHYTQKSLSLSPGGGGSGSAHPIPDSSPLLQFGGQVRQRYLYTDDACQTEAHLEIREDGTVGGAADQSPESLLQLKALKPGVIQILGVKTSRFLCQRPDGALYGSLHFDPEACSFRELLLEDGYNVYQSEAHGLPLHLPGCKSPHRDPAPRGPARFLPLPGLPPAPPEPPGILAPQPPDVGSSDPLSMVYPSQGRSPSYAS

SEQ ID NO: 905 - protein, 471 aa, Artificial Sequence
  Fusion Protein
YGEGTFTSDKSKQLEKRLAHLFIEWLIKGGHSSGKPPPKGGGGGGGSGGGGSGGGGSADKTHTCPPCPAPEAAGGPSVFLFPPKPKDTLMISRTPEVTCVVVDVSHEDPEVKFNWYVDGVEVHNAKTKPREEQYNSTYRVVSVLTVLHQDWLNGKEYKCKVSNKALPAPIEKTISKAKGQPREPQVYTLPPSRDELTKNQVSLTCLVKGFYPSDIAVEWESNGQPENNYKTTPPVLDSDGSFFLYSKLTVDKSRWQQGNVFSCSVMHEALHNHYTQKSLSLSPGGGGSGSAHPIPDSSPLLQFGGQVRQRYLYTDDACQTEAHLEIREDGTVGGAADQSPESLLQLKALKPGVIQILGVKTSRFLCQRPDGALYGSLHFDPEACSFRELLLEDGYNVYQSEAHGLPLHLCGNKSPHRDPAPRGPARFLPLPGLPPAPPEPPGILAPQPPDVGSSDPLSMVGSQGRSPSYAS

SEQ ID NO: 906 - protein, 472 aa, Artificial Sequence
  Fusion Protein
YGEGTFTSDKSKQLEKRLAHLFIEWLIKGGHSSGKPPPKGGGGGGGSGGGGSGGGGSADKTHTCPPCPAPEAAGGPSVFLFPPKPKDTLMISRTPEVTCVVVDVSHEDPEVKFNWYVDGVEVHNAKTKPREEQYNSTYRVVSVLTVLHQDWLNGKEYKCKVSNKALPAPIEKTISKAKGQPREPQVYTLPPSRDELTKNQVSLTCLVKGFYPSDIAVEWESNGQPENNYKTTPPVLDSDGSFFLYSKLTVDKSRWQQGNVFSCSVMHEALHNHYTQKSLSLSPGGGGSGSAHPIPDSSPLLQFGGQVRQRYLYTDDACQTEAHLEIREDGTVGGAADQSPESLLQLKALKPGVIQILGVKTSRFLCQRPDGALYGSLHFDPEACSFRELLLEDGYNVYQSEAHGLPLHLCGNKSPHRDPAPRGPARFLPLPGLPPAPPEPPGILAPQPPDVGSSDPLSMVYPSQGRSPSYAS

SEQ ID NO: 907 - protein, 471 aa, Artificial Sequence
  Fusion Protein
YGEGTFTSDKSKQLEKRLAHLFIEWLIKGGHSSGKPPPKGGGGGGGSGGGGSGGGGSADKTHTCPPCPAPELLGGPSVFLFPPKPKDTLMISRTPEVTCVVVDVSHEDPEVKFNWYVDGVEVHNAKTKPREEQYNNASRVVSVLTVLHQDWLNGKEYKCKVSNKALPAPIEKTISKAKGQPREPQVYTLPPSRDELTKNQVSLTCLVKGFYPSDIAVEWESNGQPENNYKTTPPVLDSDGSFFLYSKLTVDKSRWQQGNVFSCSVMHEALHNHYTQKSLSLSPGGGGSGSAHPIPDSSPLLQFGGQVRQRYLYTDDACQTEAHLEIREDGTVGGAADQSPESLLQLKALKPGVIQILGVKTSRFLCQRPDGALYGSLHFDPEACSFRELLLEDGYNVYQSEAHGLPLHLPGCKSPHRDPAPRGPARFLPLPGLPPAPPEPPGILAPQPPDVGSSDPLSMVGSQGRSPSYAS

SEQ ID NO: 908 - protein, 472 aa, Artificial Sequence
  Fusion Protein
YGEGTFTSDKSKQLEKRLAHLFIEWLIKGGHSSGKPPPKGGGGGGGSGGGGSGGGGSADKTHTCPPCPAPELLGGPSVFLFPPKPKDTLMISRTPEVTCVVVDVSHEDPEVKFNWYVDGVEVHNAKTKPREEQYNNASRVVSVLTVLHQDWLNGKEYKCKVSNKALPAPIEKTISKAKGQPREPQVYTLPPSRDELTKNQVSLTCLVKGFYPSDIAVEWESNGQPENNYKTTPPVLDSDGSFFLYSKLTVDKSRWQQGNVFSCSVMHEALHNHYTQKSLSLSPGGGGSGSAHPIPDSSPLLQFGGQVRQRYLYTDDACQTEAHLEIREDGTVGGAADQSPESLLQLKALKPGVIQILGVKTSRFLCQRPDGALYGSLHFDPEACSFRELLLEDGYNVYQSEAHGLPLHLPGCKSPHRDPAPRGPARFLPLPGLPPAPPEPPGILAPQPPDVGSSDPLSMVYPSQGRSPSYAS

SEQ ID NO: 909 - protein, 471 aa, Artificial Sequence
  Fusion Protein
YGEGTFTSDKSKQLEKRLAHLFIEWLIKGGHSSGKPPPKGGGGGGGSGGGGSGGGGSADKTHTCPPCPAPELLGGPSVFLFPPKPKDTLMISRTPEVTCVVVDVSHEDPEVKFNWYVDGVEVHNAKTKPREEQYNNASRVVSVLTVLHQDWLNGKEYKCKVSNKALPAPIEKTISKAKGQPREPQVYTLPPSRDELTKNQVSLTCLVKGFYPSDIAVEWESNGQPENNYKTTPPVLDSDGSFFLYSKLTVDKSRWQQGNVFSCSVMHEALHNHYTQKSLSLSPGGGGSGSAHPIPDSSPLLQFGGQVRQRYLYTDDACQTEAHLEIREDGTVGGAADQSPESLLQLKALKPGVIQILGVKTSRFLCQRPDGALYGSLHFDPEACSFRELLLEDGYNVYQSEAHGLPLHLCGNKSPHRDPAPRGPARFLPLPGLPPAPPEPPGILAPQPPDVGSSDPLSMVGSQGRSPSYAS

SEQ ID NO: 910 - protein, 472 aa, Artificial Sequence
  Fusion Protein
YGEGTFTSDKSKQLEKRLAHLFIEWLIKGGHSSGKPPPKGGGGGGGSGGGGSGGGGSADKTHTCPPCPAPELLGGPSVFLFPPKPKDTLMISRTPEVTCVVVDVSHEDPEVKFNWYVDGVEVHNAKTKPREEQYNNASRVVSVLTVLHQDWLNGKEYKCKVSNKALPAPIEKTISKAKGQPREPQVYTLPPSRDELTKNQVSLTCLVKGFYPSDIAVEWESNGQPENNYKTTPPVLDSDGSFFLYSKLTVDKSRWQQGNVFSCSVMHEALHNHYTQKSLSLSPGGGGSGSAHPIPDSSPLLQFGGQVRQRYLYTDDACQTEAHLEIREDGTVGGAADQSPESLLQLKALKPGVIQILGVKTSRFLCQRPDGALYGSLHFDPEACSFRELLLEDGYNVYQSEAHGLPLHLCGNKSPHRDPAPRGPARFLPLPGLPPAPPEPPGILAPQPPDVGSSDPLSMVYPSQGRSPSYAS

SEQ ID NO: 911 - protein, 474 aa, Artificial Sequence
  Fusion Protein
YGEGTFTSDKSKQLEKRLAHLFIEWLIKGGHSSGKPPPKGGGGGGGSGGGGSGGGGSAESKYGPPCPPCPAPEFEGGPSVFLFPPKPKDTLMISRTPEVTCVVVDVSQEDPEVQFNWYVDGVEVHNAKTKPREEQFNSTYRVVSVLTVLHQDWLNGKEYKCKVSNKGLPSSIEKTISKAKGQPREPQVYTLPPSQEEMTKNQVSLTCLVKGFYPSDIAVEWESNGQPENNYKTTPPVLDSDGSFFLYSRLTVDKSRWQEGNVFSCSVMHEALHNHYTQKSLSLSLGGGGSGSAHPIPDSSPLLQFGGQVRQRYLYTDDACQTEAHLEIREDGTVGGAADQSPESLLQLKALKPGVIQILGVKTSRFLCQRPDGALYGSLHFDPEACSFRELLLEDGYNVYQSEAHGLPLHLPGCKSPHRDPAPRGPARFLPLPGLPPAPPEPPGILAPQPPDVGSSDPLSMVYPSQGRSPSYAS

SEQ ID NO: 912 - protein, 473 aa, Artificial Sequence
  Fusion Protein
YGEGTFTSDKSKQLEKRLAHLFIEWLIKGGHSSGKPPPKGGGGGGGSGGGGSGGGGSAESKYGPPCPPCPAPEFEGGPSVFLFPPKPKDTLMISRTPEVTCVVVDVSQEDPEVQFNWYVDGVEVHNAKTKPREEQFNSTYRVVSVLTVLHQDWLNGKEYKCKVSNKGLPSSIEKTISKAKGQPREPQVYTLPPSQEEMTKNQVSLTCLVKGFYPSDIAVEWESNGQPENNYKTTPPVLDSDGSFFLYSRLTVDKSRWQEGNVFSCSVMHEALHNHYTQKSLSLSLGGGGSGSAHPIPDSSPLLQFGGQVRQRYLYTDDACQTEAHLEIREDGTVGGAADQSPESLLQLKALKPGVIQILGVKTSRFLCQRPDGALYGSLHFDPEACSFRELLLEDGYNVYQSEAHGLPLHLCGNKSPHRDPAPRGPARFLPLPGLPPAPPEPPGILAPQPPDVGSSDPLSMVGSQGRSPSYAS

SEQ ID NO: 913 - protein, 474 aa, Artificial Sequence
  Fusion Protein
YGEGTFTSDKSKQLEKRLAHLFIEWLIKGGHSSGKPPPKGGGGGGGSGGGGSGGGGSAESKYGPPCPPCPAPEFEGGPSVFLFPPKPKDTLMISRTPEVTCVVVDVSQEDPEVQFNWYVDGVEVHNAKTKPREEQFNSTYRVVSVLTVLHQDWLNGKEYKCKVSNKGLPSSIEKTISKAKGQPREPQVYTLPPSQEEMTKNQVSLTCLVKGFYPSDIAVEWESNGQPENNYKTTPPVLDSDGSFFLYSRLTVDKSRWQEGNVFSCSVMHEALHNHYTQKSLSLSLGGGGSGSAHPIPDSSPLLQFGGQVRQRYLYTDDACQTEAHLEIREDGTVGGAADQSPESLLQLKALKPGVIQILGVKTSRFLCQRPDGALYGSLHFDPEACSFRELLLEDGYNVYQSEAHGLPLHLCGNKSPHRDPAPRGPARFLPLPGLPPAPPEPPGILAPQPPDVGSSDPLSMVYPSQGRSPSYAS

SEQ ID NO: 914 - protein, 471 aa, Artificial Sequence
  Fusion Protein
HTEGTFTSDKSKQLEKRLVRLFIEWLIKGGHSSGKPPPKGGGGGGGSGGGGSGGGGSADKTHTCPPCPAPEAAGGPSVFLFPPKPKDTLMISRTPEVTCVVVDVSHEDPEVKFNWYVDGVEVHNAKTKPREEQYNSTYRVVSVLTVLHQDWLNGKEYKCKVSNKALPAPIEKTISKAKGQPREPQVYTLPPSRDELTKNQVSLTCLVKGFYPSDIAVEWESNGQPENNYKTTPPVLDSDGSFFLYSKLTVDKSRWQQGNVFSCSVMHEALHNHYTQKSLSLSPGGGGSGSAHPIPDSSPLLQFGGQVRQRYLYTDDACQTEAHLEIREDGTVGGAADQSPESLLQLKALKPGVIQILGVKTSRFLCQRPDGALYGSLHFDPEACSFRELLLEDGYNVYQSEAHGLPLHLPGCKSPHRDPAPRGPARFLPLPGLPPAPPEPPGILAPQPPDVGSSDPLSMVGSQGRSPSYAS

SEQ ID NO: 915 - protein, 472 aa, Artificial Sequence
  Fusion Protein
HTEGTFTSDKSKQLEKRLVRLFIEWLIKGGHSSGKPPPKGGGGGGGSGGGGSGGGGSADKTHTCPPCPAPEAAGGPSVFLFPPKPKDTLMISRTPEVTCVVVDVSHEDPEVKFNWYVDGVEVHNAKTKPREEQYNSTYRVVSVLTVLHQDWLNGKEYKCKVSNKALPAPIEKTISKAKGQPREPQVYTLPPSRDELTKNQVSLTCLVKGFYPSDIAVEWESNGQPENNYKTTPPVLDSDGSFFLYSKLTVDKSRWQQGNVFSCSVMHEALHNHYTQKSLSLSPGGGGSGSAHPIPDSSPLLQFGGQVRQRYLYTDDACQTEAHLEIREDGTVGGAADQSPESLLQLKALKPGVIQILGVKTSRFLCQRPDGALYGSLHFDPEACSFRELLLEDGYNVYQSEAHGLPLHLPGCKSPHRDPAPRGPARFLPLPGLPPAPPEPPGILAPQPPDVGSSDPLSMVYPSQGRSPSYAS

SEQ ID NO: 916 - protein, 471 aa, Artificial Sequence
  Fusion Protein
HTEGTFTSDKSKQLEKRLVRLFIEWLIKGGHSSGKPPPKGGGGGGGSGGGGSGGGGSADKTHTCPPCPAPEAAGGPSVFLFPPKPKDTLMISRTPEVTCVVVDVSHEDPEVKFNWYVDGVEVHNAKTKPREEQYNSTYRVVSVLTVLHQDWLNGKEYKCKVSNKALPAPIEKTISKAKGQPREPQVYTLPPSRDELTKNQVSLTCLVKGFYPSDIAVEWESNGQPENNYKTTPPVLDSDGSFFLYSKLTVDKSRWQQGNVFSCSVMHEALHNHYTQKSLSLSPGGGGSGSAHPIPDSSPLLQFGGQVRQRYLYTDDACQTEAHLEIREDGTVGGAADQSPESLLQLKALKPGVIQILGVKTSRFLCQRPDGALYGSLHFDPEACSFRELLLEDGYNVYQSEAHGLPLHLCGNKSPHRDPAPRGPARFLPLPGLPPAPPEPPGILAPQPPDVGSSDPLSMVGSQGRSPSYAS

SEQ ID NO: 917 - protein, 472 aa, Artificial Sequence
  Fusion Protein
HTEGTFTSDKSKQLEKRLVRLFIEWLIKGGHSSGKPPPKGGGGGGGSGGGGSGGGGSADKTHTCPPCPAPEAAGGPSVFLFPPKPKDTLMISRTPEVTCVVVDVSHEDPEVKFNWYVDGVEVHNAKTKPREEQYNSTYRVVSVLTVLHQDWLNGKEYKCKVSNKALPAPIEKTISKAKGQPREPQVYTLPPSRDELTKNQVSLTCLVKGFYPSDIAVEWESNGQPENNYKTTPPVLDSDGSFFLYSKLTVDKSRWQQGNVFSCSVMHEALHNHYTQKSLSLSPGGGGSGSAHPIPDSSPLLQFGGQVRQRYLYTDDACQTEAHLEIREDGTVGGAADQSPESLLQLKALKPGVIQILGVKTSRFLCQRPDGALYGSLHFDPEACSFRELLLEDGYNVYQSEAHGLPLHLCGNKSPHRDPAPRGPARFLPLPGLPPAPPEPPGILAPQPPDVGSSDPLSMVYPSQGRSPSYAS

SEQ ID NO: 918 - protein, 471 aa, Artificial Sequence
  Fusion Protein
HTEGTFTSDKSKQLEKRLVRLFIEWLIKGGHSSGKPPPKGGGGGGGSGGGGSGGGGSADKTHTCPPCPAPELLGGPSVFLFPPKPKDTLMISRTPEVTCVVVDVSHEDPEVKFNWYVDGVEVHNAKTKPREEQYNNASRVVSVLTVLHQDWLNGKEYKCKVSNKALPAPIEKTISKAKGQPREPQVYTLPPSRDELTKNQVSLTCLVKGFYPSDIAVEWESNGQPENNYKTTPPVLDSDGSFFLYSKLTVDKSRWQQGNVFSCSVMHEALHNHYTQKSLSLSPGGGGSGSAHPIPDSSPLLQFGGQVRQRYLYTDDACQTEAHLEIREDGTVGGAADQSPESLLQLKALKPGVIQILGVKTSRFLCQRPDGALYGSLHFDPEACSFRELLLEDGYNVYQSEAHGLPLHLPGCKSPHRDPAPRGPARFLPLPGLPPAPPEPPGILAPQPPDVGSSDPLSMVGSQGRSPSYAS

SEQ ID NO: 919 - protein, 472 aa, Artificial Sequence
  Fusion Protein
HTEGTFTSDKSKQLEKRLVRLFIEWLIKGGHSSGKPPPKGGGGGGGSGGGGSGGGGSADKTHTCPPCPAPELLGGPSVFLFPPKPKDTLMISRTPEVTCVVVDVSHEDPEVKFNWYVDGVEVHNAKTKPREEQYNNASRVVSVLTVLHQDWLNGKEYKCKVSNKALPAPIEKTISKAKGQPREPQVYTLPPSRDELTKNQVSLTCLVKGFYPSDIAVEWESNGQPENNYKTTPPVLDSDGSFFLYSKLTVDKSRWQQGNVFSCSVMHEALHNHYTQKSLSLSPGGGGSGSAHPIPDSSPLLQFGGQVRQRYLYTDDACQTEAHLEIREDGTVGGAADQSPESLLQLKALKPGVIQILGVKTSRFLCQRPDGALYGSLHFDPEACSFRELLLEDGYNVYQSEAHGLPLHLPGCKSPHRDPAPRGPARFLPLPGLPPAPPEPPGILAPQPPDVGSSDPLSMVYPSQGRSPSYAS

SEQ ID NO: 920 - protein, 471 aa, Artificial Sequence
  Fusion Protein
HTEGTFTSDKSKQLEKRLVRLFIEWLIKGGHSSGKPPPKGGGGGGGSGGGGSGGGGSADKTHTCPPCPAPELLGGPSVFLFPPKPKDTLMISRTPEVTCVVVDVSHEDPEVKFNWYVDGVEVHNAKTKPREEQYNNASRVVSVLTVLHQDWLNGKEYKCKVSNKALPAPIEKTISKAKGQPREPQVYTLPPSRDELTKNQVSLTCLVKGFYPSDIAVEWESNGQPENNYKTTPPVLDSDGSFFLYSKLTVDKSRWQQGNVFSCSVMHEALHNHYTQKSLSLSPGGGGSGSAHPIPDSSPLLQFGGQVRQRYLYTDDACQTEAHLEIREDGTVGGAADQSPESLLQLKALKPGVIQILGVKTSRFLCQRPDGALYGSLHFDPEACSFRELLLEDGYNVYQSEAHGLPLHLCGNKSPHRDPAPRGPARFLPLPGLPPAPPEPPGILAPQPPDVGSSDPLSMVGSQGRSPSYAS

SEQ ID NO: 921 - protein, 472 aa, Artificial Sequence
  Fusion Protein
HTEGTFTSDKSKQLEKRLVRLFIEWLIKGGHSSGKPPPKGGGGGGGSGGGGSGGGGSADKTHTCPPCPAPELLGGPSVFLFPPKPKDTLMISRTPEVTCVVVDVSHEDPEVKFNWYVDGVEVHNAKTKPREEQYNNASRVVSVLTVLHQDWLNGKEYKCKVSNKALPAPIEKTISKAKGQPREPQVYTLPPSRDELTKNQVSLTCLVKGFYPSDIAVEWESNGQPENNYKTTPPVLDSDGSFFLYSKLTVDKSRWQQGNVFSCSVMHEALHNHYTQKSLSLSPGGGGSGSAHPIPDSSPLLQFGGQVRQRYLYTDDACQTEAHLEIREDGTVGGAADQSPESLLQLKALKPGVIQILGVKTSRFLCQRPDGALYGSLHFDPEACSFRELLLEDGYNVYQSEAHGLPLHLCGNKSPHRDPAPRGPARFLPLPGLPPAPPEPPGILAPQPPDVGSSDPLSMVYPSQGRSPSYAS

SEQ ID NO: 922 - protein, 474 aa, Artificial Sequence
  Fusion Protein
HTEGTFTSDKSKQLEKRLVRLFIEWLIKGGHSSGKPPPKGGGGGGGSGGGGSGGGGSAESKYGPPCPPCPAPEFEGGPSVFLFPPKPKDTLMISRTPEVTCVVVDVSQEDPEVQFNWYVDGVEVHNAKTKPREEQFNSTYRVVSVLTVLHQDWLNGKEYKCKVSNKGLPSSIEKTISKAKGQPREPQVYTLPPSQEEMTKNQVSLTCLVKGFYPSDIAVEWESNGQPENNYKTTPPVLDSDGSFFLYSRLTVDKSRWQEGNVFSCSVMHEALHNHYTQKSLSLSLGGGGSGSAHPIPDSSPLLQFGGQVRQRYLYTDDACQTEAHLEIREDGTVGGAADQSPESLLQLKALKPGVIQILGVKTSRFLCQRPDGALYGSLHFDPEACSFRELLLEDGYNVYQSEAHGLPLHLPGCKSPHRDPAPRGPARFLPLPGLPPAPPEPPGILAPQPPDVGSSDPLSMVYPSQGRSPSYAS

SEQ ID NO: 923 - protein, 473 aa, Artificial Sequence
  Fusion Protein
HTEGTFTSDKSKQLEKRLVRLFIEWLIKGGHSSGKPPPKGGGGGGGSGGGGSGGGGSAESKYGPPCPPCPAPEFEGGPSVFLFPPKPKDTLMISRTPEVTCVVVDVSQEDPEVQFNWYVDGVEVHNAKTKPREEQFNSTYRVVSVLTVLHQDWLNGKEYKCKVSNKGLPSSIEKTISKAKGQPREPQVYTLPPSQEEMTKNQVSLTCLVKGFYPSDIAVEWESNGQPENNYKTTPPVLDSDGSFFLYSRLTVDKSRWQEGNVFSCSVMHEALHNHYTQKSLSLSLGGGGSGSAHPIPDSSPLLQFGGQVRQRYLYTDDACQTEAHLEIREDGTVGGAADQSPESLLQLKALKPGVIQILGVKTSRFLCQRPDGALYGSLHFDPEACSFRELLLEDGYNVYQSEAHGLPLHLCGNKSPHRDPAPRGPARFLPLPGLPPAPPEPPGILAPQPPDVGSSDPLSMVGSQGRSPSYAS

SEQ ID NO: 924 - protein, 474 aa, Artificial Sequence
  Fusion Protein
HTEGTFTSDKSKQLEKRLVRLFIEWLIKGGHSSGKPPPKGGGGGGGSGGGGSGGGGSAESKYGPPCPPCPAPEFEGGPSVFLFPPKPKDTLMISRTPEVTCVVVDVSQEDPEVQFNWYVDGVEVHNAKTKPREEQFNSTYRVVSVLTVLHQDWLNGKEYKCKVSNKGLPSSIEKTISKAKGQPREPQVYTLPPSQEEMTKNQVSLTCLVKGFYPSDIAVEWESNGQPENNYKTTPPVLDSDGSFFLYSRLTVDKSRWQEGNVFSCSVMHEALHNHYTQKSLSLSLGGGGSGSAHPIPDSSPLLQFGGQVRQRYLYTDDACQTEAHLEIREDGTVGGAADQSPESLLQLKALKPGVIQILGVKTSRFLCQRPDGALYGSLHFDPEACSFRELLLEDGYNVYQSEAHGLPLHLCGNKSPHRDPAPRGPARFLPLPGLPPAPPEPPGILAPQPPDVGSSDPLSMVYPSQGRSPSYAS

SEQ ID NO: 925 - protein, 471 aa, Artificial Sequence
  Fusion Protein
HGEGTFTSDKSKQLAKRLVRLFIEWLIKGGHSSGKPPPKGGGGGGGSGGGGSGGGGSADKTHTCPPCPAPEAAGGPSVFLFPPKPKDTLMISRTPEVTCVVVDVSHEDPEVKFNWYVDGVEVHNAKTKPREEQYNSTYRVVSVLTVLHQDWLNGKEYKCKVSNKALPAPIEKTISKAKGQPREPQVYTLPPSRDELTKNQVSLTCLVKGFYPSDIAVEWESNGQPENNYKTTPPVLDSDGSFFLYSKLTVDKSRWQQGNVFSCSVMHEALHNHYTQKSLSLSPGGGGSGSAHPIPDSSPLLQFGGQVRQRYLYTDDACQTEAHLEIREDGTVGGAADQSPESLLQLKALKPGVIQILGVKTSRFLCQRPDGALYGSLHFDPEACSFRELLLEDGYNVYQSEAHGLPLHLPGCKSPHRDPAPRGPARFLPLPGLPPAPPEPPGILAPQPPDVGSSDPLSMVGSQGRSPSYAS

SEQ ID NO: 926 - protein, 472 aa, Artificial Sequence
  Fusion Protein
HGEGTFTSDKSKQLAKRLVRLFIEWLIKGGHSSGKPPPKGGGGGGGSGGGGSGGGGSADKTHTCPPCPAPEAAGGPSVFLFPPKPKDTLMISRTPEVTCVVVDVSHEDPEVKFNWYVDGVEVHNAKTKPREEQYNSTYRVVSVLTVLHQDWLNGKEYKCKVSNKALPAPIEKTISKAKGQPREPQVYTLPPSRDELTKNQVSLTCLVKGFYPSDIAVEWESNGQPENNYKTTPPVLDSDGSFFLYSKLTVDKSRWQQGNVFSCSVMHEALHNHYTQKSLSLSPGGGGSGSAHPIPDSSPLLQFGGQVRQRYLYTDDACQTEAHLEIREDGTVGGAADQSPESLLQLKALKPGVIQILGVKTSRFLCQRPDGALYGSLHFDPEACSFRELLLEDGYNVYQSEAHGLPLHLPGCKSPHRDPAPRGPARFLPLPGLPPAPPEPPGILAPQPPDVGSSDPLSMVYPSQGRSPSYAS

SEQ ID NO: 927 - protein, 471 aa, Artificial Sequence
  Fusion Protein
HGEGTFTSDKSKQLAKRLVRLFIEWLIKGGHSSGKPPPKGGGGGGGSGGGGSGGGGSADKTHTCPPCPAPEAAGGPSVFLFPPKPKDTLMISRTPEVTCVVVDVSHEDPEVKFNWYVDGVEVHNAKTKPREEQYNSTYRVVSVLTVLHQDWLNGKEYKCKVSNKALPAPIEKTISKAKGQPREPQVYTLPPSRDELTKNQVSLTCLVKGFYPSDIAVEWESNGQPENNYKTTPPVLDSDGSFFLYSKLTVDKSRWQQGNVFSCSVMHEALHNHYTQKSLSLSPGGGGSGSAHPIPDSSPLLQFGGQVRQRYLYTDDACQTEAHLEIREDGTVGGAADQSPESLLQLKALKPGVIQILGVKTSRFLCQRPDGALYGSLHFDPEACSFRELLLEDGYNVYQSEAHGLPLHLCGNKSPHRDPAPRGPARFLPLPGLPPAPPEPPGILAPQPPDVGSSDPLSMVGSQGRSPSYAS

SEQ ID NO: 928 - protein, 472 aa, Artificial Sequence
  Fusion Protein
HGEGTFTSDKSKQLAKRLVRLFIEWLIKGGHSSGKPPPKGGGGGGGSGGGGSGGGGSADKTHTCPPCPAPEAAGGPSVFLFPPKPKDTLMISRTPEVTCVVVDVSHEDPEVKFNWYVDGVEVHNAKTKPREEQYNSTYRVVSVLTVLHQDWLNGKEYKCKVSNKALPAPIEKTISKAKGQPREPQVYTLPPSRDELTKNQVSLTCLVKGFYPSDIAVEWESNGQPENNYKTTPPVLDSDGSFFLYSKLTVDKSRWQQGNVFSCSVMHEALHNHYTQKSLSLSPGGGGSGSAHPIPDSSPLLQFGGQVRQRYLYTDDACQTEAHLEIREDGTVGGAADQSPESLLQLKALKPGVIQILGVKTSRFLCQRPDGALYGSLHFDPEACSFRELLLEDGYNVYQSEAHGLPLHLCGNKSPHRDPAPRGPARFLPLPGLPPAPPEPPGILAPQPPDVGSSDPLSMVYPSQGRSPSYAS

SEQ ID NO: 929 - protein, 471 aa, Artificial Sequence
  Fusion Protein
HGEGTFTSDKSKQLAKRLVRLFIEWLIKGGHSSGKPPPKGGGGGGGSGGGGSGGGGSADKTHTCPPCPAPELLGGPSVFLFPPKPKDTLMISRTPEVTCVVVDVSHEDPEVKFNWYVDGVEVHNAKTKPREEQYNNASRVVSVLTVLHQDWLNGKEYKCKVSNKALPAPIEKTISKAKGQPREPQVYTLPPSRDELTKNQVSLTCLVKGFYPSDIAVEWESNGQPENNYKTTPPVLDSDGSFFLYSKLTVDKSRWQQGNVFSCSVMHEALHNHYTQKSLSLSPGGGGSGSAHPIPDSSPLLQFGGQVRQRYLYTDDACQTEAHLEIREDGTVGGAADQSPESLLQLKALKPGVIQILGVKTSRFLCQRPDGALYGSLHFDPEACSFRELLLEDGYNVYQSEAHGLPLHLPGCKSPHRDPAPRGPARFLPLPGLPPAPPEPPGILAPQPPDVGSSDPLSMVGSQGRSPSYAS

SEQ ID NO: 930 - protein, 472 aa, Artificial Sequence
  Fusion Protein
HGEGTFTSDKSKQLAKRLVRLFIEWLIKGGHSSGKPPPKGGGGGGGSGGGGSGGGGSADKTHTCPPCPAPELLGGPSVFLFPPKPKDTLMISRTPEVTCVVVDVSHEDPEVKFNWYVDGVEVHNAKTKPREEQYNNASRVVSVLTVLHQDWLNGKEYKCKVSNKALPAPIEKTISKAKGQPREPQVYTLPPSRDELTKNQVSLTCLVKGFYPSDIAVEWESNGQPENNYKTTPPVLDSDGSFFLYSKLTVDKSRWQQGNVFSCSVMHEALHNHYTQKSLSLSPGGGGSGSAHPIPDSSPLLQFGGQVRQRYLYTDDACQTEAHLEIREDGTVGGAADQSPESLLQLKALKPGVIQILGVKTSRFLCQRPDGALYGSLHFDPEACSFRELLLEDGYNVYQSEAHGLPLHLPGCKSPHRDPAPRGPARFLPLPGLPPAPPEPPGILAPQPPDVGSSDPLSMVYPSQGRSPSYAS

SEQ ID NO: 931 - protein, 471 aa, Artificial Sequence
  Fusion Protein
HGEGTFTSDKSKQLAKRLVRLFIEWLIKGGHSSGKPPPKGGGGGGGSGGGGSGGGGSADKTHTCPPCPAPELLGGPSVFLFPPKPKDTLMISRTPEVTCVVVDVSHEDPEVKFNWYVDGVEVHNAKTKPREEQYNNASRVVSVLTVLHQDWLNGKEYKCKVSNKALPAPIEKTISKAKGQPREPQVYTLPPSRDELTKNQVSLTCLVKGFYPSDIAVEWESNGQPENNYKTTPPVLDSDGSFFLYSKLTVDKSRWQQGNVFSCSVMHEALHNHYTQKSLSLSPGGGGSGSAHPIPDSSPLLQFGGQVRQRYLYTDDACQTEAHLEIREDGTVGGAADQSPESLLQLKALKPGVIQILGVKTSRFLCQRPDGALYGSLHFDPEACSFRELLLEDGYNVYQSEAHGLPLHLCGNKSPHRDPAPRGPARFLPLPGLPPAPPEPPGILAPQPPDVGSSDPLSMVGSQGRSPSYAS

SEQ ID NO: 932 - protein, 472 aa, Artificial Sequence
  Fusion Protein
HGEGTFTSDKSKQLAKRLVRLFIEWLIKGGHSSGKPPPKGGGGGGGSGGGGSGGGGSADKTHTCPPCPAPELLGGPSVFLFPPKPKDTLMISRTPEVTCVVVDVSHEDPEVKFNWYVDGVEVHNAKTKPREEQYNNASRVVSVLTVLHQDWLNGKEYKCKVSNKALPAPIEKTISKAKGQPREPQVYTLPPSRDELTKNQVSLTCLVKGFYPSDIAVEWESNGQPENNYKTTPPVLDSDGSFFLYSKLTVDKSRWQQGNVFSCSVMHEALHNHYTQKSLSLSPGGGGSGSAHPIPDSSPLLQFGGQVRQRYLYTDDACQTEAHLEIREDGTVGGAADQSPESLLQLKALKPGVIQILGVKTSRFLCQRPDGALYGSLHFDPEACSFRELLLEDGYNVYQSEAHGLPLHLCGNKSPHRDPAPRGPARFLPLPGLPPAPPEPPGILAPQPPDVGSSDPLSMVYPSQGRSPSYAS

SEQ ID NO: 933 - protein, 474 aa, Artificial Sequence
  Fusion Protein
HGEGTFTSDKSKQLAKRLVRLFIEWLIKGGHSSGKPPPKGGGGGGGSGGGGSGGGGSAESKYGPPCPPCPAPEFEGGPSVFLFPPKPKDTLMISRTPEVTCVVVDVSQEDPEVQFNWYVDGVEVHNAKTKPREEQFNSTYRVVSVLTVLHQDWLNGKEYKCKVSNKGLPSSIEKTISKAKGQPREPQVYTLPPSQEEMTKNQVSLTCLVKGFYPSDIAVEWESNGQPENNYKTTPPVLDSDGSFFLYSRLTVDKSRWQEGNVFSCSVMHEALHNHYTQKSLSLSLGGGGSGSAHPIPDSSPLLQFGGQVRQRYLYTDDACQTEAHLEIREDGTVGGAADQSPESLLQLKALKPGVIQILGVKTSRFLCQRPDGALYGSLHFDPEACSFRELLLEDGYNVYQSEAHGLPLHLPGCKSPHRDPAPRGPARFLPLPGLPPAPPEPPGILAPQPPDVGSSDPLSMVYPSQGRSPSYAS

SEQ ID NO: 934 - protein, 473 aa, Artificial Sequence
  Fusion Protein
HGEGTFTSDKSKQLAKRLVRLFIEWLIKGGHSSGKPPPKGGGGGGGSGGGGSGGGGSAESKYGPPCPPCPAPEFEGGPSVFLFPPKPKDTLMISRTPEVTCVVVDVSQEDPEVQFNWYVDGVEVHNAKTKPREEQFNSTYRVVSVLTVLHQDWLNGKEYKCKVSNKGLPSSIEKTISKAKGQPREPQVYTLPPSQEEMTKNQVSLTCLVKGFYPSDIAVEWESNGQPENNYKTTPPVLDSDGSFFLYSRLTVDKSRWQEGNVFSCSVMHEALHNHYTQKSLSLSLGGGGSGSAHPIPDSSPLLQFGGQVRQRYLYTDDACQTEAHLEIREDGTVGGAADQSPESLLQLKALKPGVIQILGVKTSRFLCQRPDGALYGSLHFDPEACSFRELLLEDGYNVYQSEAHGLPLHLCGNKSPHRDPAPRGPARFLPLPGLPPAPPEPPGILAPQPPDVGSSDPLSMVGSQGRSPSYAS

SEQ ID NO: 935 - protein, 474 aa, Artificial Sequence
  Fusion Protein
HGEGTFTSDKSKQLAKRLVRLFIEWLIKGGHSSGKPPPKGGGGGGGSGGGGSGGGGSAESKYGPPCPPCPAPEFEGGPSVFLFPPKPKDTLMISRTPEVTCVVVDVSQEDPEVQFNWYVDGVEVHNAKTKPREEQFNSTYRVVSVLTVLHQDWLNGKEYKCKVSNKGLPSSIEKTISKAKGQPREPQVYTLPPSQEEMTKNQVSLTCLVKGFYPSDIAVEWESNGQPENNYKTTPPVLDSDGSFFLYSRLTVDKSRWQEGNVFSCSVMHEALHNHYTQKSLSLSLGGGGSGSAHPIPDSSPLLQFGGQVRQRYLYTDDACQTEAHLEIREDGTVGGAADQSPESLLQLKALKPGVIQILGVKTSRFLCQRPDGALYGSLHFDPEACSFRELLLEDGYNVYQSEAHGLPLHLCGNKSPHRDPAPRGPARFLPLPGLPPAPPEPPGILAPQPPDVGSSDPLSMVYPSQGRSPSYAS

SEQ ID NO: 936 - protein, 463 aa, Artificial Sequence
  Fusion Protein
GHGEGTFTSDKSKQLEEEAVRLFIEWLKAGGGGGGGGGSGGGGSGGGGSADKTHTCPPCPAPEAAGGPSVFLFPPKPKDTLMISRTPEVTCVVVDVSHEDPEVKFNWYVDGVEVHNAKTKPREEQYNSTYRVVSVLTVLHQDWLNGKEYKCKVSNKALPAPIEKTISKAKGQPREPQVYTLPPSRDELTKNQVSLTCLVKGFYPSDIAVEWESNGQPENNYKTTPPVLDSDGSFFLYSKLTVDKSRWQQGNVFSCSVMHEALHNHYTQKSLSLSPGGGGSGSAHPIPDSSPLLQFGGQVRQRYLYTDDACQTEAHLEIREDGTVGGAADQSPESLLQLKALKPGVIQILGVKTSRFLCQRPDGALYGSLHFDPEACSFRELLLEDGYNVYQSEAHGLPLHLPGCKSPHRDPAPRGPARFLPLPGLPPAPPEPPGILAPQPPDVGSSDPLSMVGSQGRSPSYAS

SEQ ID NO: 937 - protein, 463 aa, Artificial Sequence
  Fusion Protein
GHGEGTFTSDKSKQLEEEAVRLFIEWLKAGGGGGGGGGSGGGGSGGGGSADKTHTCPPCPAPEAAGGPSVFLFPPKPKDTLMISRTPEVTCVVVDVSHEDPEVKFNWYVDGVEVHNAKTKPREEQYNSTYRVVSVLTVLHQDWLNGKEYKCKVSNKALPAPIEKTISKAKGQPREPQVYTLPPSRDELTKNQVSLTCLVKGFYPSDIAVEWESNGQPENNYKTTPPVLDSDGSFFLYSKLTVDKSRWQQGNVFSCSVMHEALHNHYTQKSLSLSPGGGGSGSAHPIPDSSPLLQFGGQVRQRYLYTDDACQTEAHLEIREDGTVGGAADQSPESLLQLKALKPGVIQILGVKTSRFLCQRPDGALYGSLHFDPEACSFRELLLEDGYNVYQSEAHGLPLHLCGNKSPHRDPAPRGPARFLPLPGLPPAPPEPPGILAPQPPDVGSSDPLSMVGSQGRSPSYAS

SEQ ID NO: 938 - protein, 464 aa, Artificial Sequence
  Fusion Protein
GHGEGTFTSDKSKQLEEEAVRLFIEWLKAGGGGGGGGGSGGGGSGGGGSADKTHTCPPCPAPEAAGGPSVFLFPPKPKDTLMISRTPEVTCVVVDVSHEDPEVKFNWYVDGVEVHNAKTKPREEQYNSTYRVVSVLTVLHQDWLNGKEYKCKVSNKALPAPIEKTISKAKGQPREPQVYTLPPSRDELTKNQVSLTCLVKGFYPSDIAVEWESNGQPENNYKTTPPVLDSDGSFFLYSKLTVDKSRWQQGNVFSCSVMHEALHNHYTQKSLSLSPGGGGSGSAHPIPDSSPLLQFGGQVRQRYLYTDDACQTEAHLEIREDGTVGGAADQSPESLLQLKALKPGVIQILGVKTSRFLCQRPDGALYGSLHFDPEACSFRELLLEDGYNVYQSEAHGLPLHLCGNKSPHRDPAPRGPARFLPLPGLPPAPPEPPGILAPQPPDVGSSDPLSMVYPSQGRSPSYAS

SEQ ID NO: 939 - protein, 463 aa, Artificial Sequence
  Fusion Protein
GHGEGTFTSDKSKQLEEEAVRLFIEWLKAGGGGGGGGGSGGGGSGGGGSADKTHTCPPCPAPELLGGPSVFLFPPKPKDTLMISRTPEVTCVVVDVSHEDPEVKFNWYVDGVEVHNAKTKPREEQYNNASRVVSVLTVLHQDWLNGKEYKCKVSNKALPAPIEKTISKAKGQPREPQVYTLPPSRDELTKNQVSLTCLVKGFYPSDIAVEWESNGQPENNYKTTPPVLDSDGSFFLYSKLTVDKSRWQQGNVFSCSVMHEALHNHYTQKSLSLSPGGGGSGSAHPIPDSSPLLQFGGQVRQRYLYTDDACQTEAHLEIREDGTVGGAADQSPESLLQLKALKPGVIQILGVKTSRFLCQRPDGALYGSLHFDPEACSFRELLLEDGYNVYQSEAHGLPLHLPGCKSPHRDPAPRGPARFLPLPGLPPAPPEPPGILAPQPPDVGSSDPLSMVGSQGRSPSYAS

SEQ ID NO: 940 - protein, 464 aa, Artificial Sequence
  Fusion Protein
GHGEGTFTSDKSKQLEEEAVRLFIEWLKAGGGGGGGGGSGGGGSGGGGSADKTHTCPPCPAPELLGGPSVFLFPPKPKDTLMISRTPEVTCVVVDVSHEDPEVKFNWYVDGVEVHNAKTKPREEQYNNASRVVSVLTVLHQDWLNGKEYKCKVSNKALPAPIEKTISKAKGQPREPQVYTLPPSRDELTKNQVSLTCLVKGFYPSDIAVEWESNGQPENNYKTTPPVLDSDGSFFLYSKLTVDKSRWQQGNVFSCSVMHEALHNHYTQKSLSLSPGGGGSGSAHPIPDSSPLLQFGGQVRQRYLYTDDACQTEAHLEIREDGTVGGAADQSPESLLQLKALKPGVIQILGVKTSRFLCQRPDGALYGSLHFDPEACSFRELLLEDGYNVYQSEAHGLPLHLPGCKSPHRDPAPRGPARFLPLPGLPPAPPEPPGILAPQPPDVGSSDPLSMVYPSQGRSPSYAS

SEQ ID NO: 941 - protein, 463 aa, Artificial Sequence
  Fusion Protein
GHGEGTFTSDKSKQLEEEAVRLFIEWLKAGGGGGGGGGSGGGGSGGGGSADKTHTCPPCPAPELLGGPSVFLFPPKPKDTLMISRTPEVTCVVVDVSHEDPEVKFNWYVDGVEVHNAKTKPREEQYNNASRVVSVLTVLHQDWLNGKEYKCKVSNKALPAPIEKTISKAKGQPREPQVYTLPPSRDELTKNQVSLTCLVKGFYPSDIAVEWESNGQPENNYKTTPPVLDSDGSFFLYSKLTVDKSRWQQGNVFSCSVMHEALHNHYTQKSLSLSPGGGGSGSAHPIPDSSPLLQFGGQVRQRYLYTDDACQTEAHLEIREDGTVGGAADQSPESLLQLKALKPGVIQILGVKTSRFLCQRPDGALYGSLHFDPEACSFRELLLEDGYNVYQSEAHGLPLHLCGNKSPHRDPAPRGPARFLPLPGLPPAPPEPPGILAPQPPDVGSSDPLSMVGSQGRSPSYAS

SEQ ID NO: 942 - protein, 464 aa, Artificial Sequence
  Fusion Protein
GHGEGTFTSDKSKQLEEEAVRLFIEWLKAGGGGGGGGGSGGGGSGGGGSADKTHTCPPCPAPELLGGPSVFLFPPKPKDTLMISRTPEVTCVVVDVSHEDPEVKFNWYVDGVEVHNAKTKPREEQYNNASRVVSVLTVLHQDWLNGKEYKCKVSNKALPAPIEKTISKAKGQPREPQVYTLPPSRDELTKNQVSLTCLVKGFYPSDIAVEWESNGQPENNYKTTPPVLDSDGSFFLYSKLTVDKSRWQQGNVFSCSVMHEALHNHYTQKSLSLSPGGGGSGSAHPIPDSSPLLQFGGQVRQRYLYTDDACQTEAHLEIREDGTVGGAADQSPESLLQLKALKPGVIQILGVKTSRFLCQRPDGALYGSLHFDPEACSFRELLLEDGYNVYQSEAHGLPLHLCGNKSPHRDPAPRGPARFLPLPGLPPAPPEPPGILAPQPPDVGSSDPLSMVYPSQGRSPSYAS

SEQ ID NO: 943 - protein, 465 aa, Artificial Sequence
  Fusion Protein
GHGEGTFTSDKSKQLEEEAVRLFIEWLKAGGGGGGGGGSGGGGSGGGGSAESKYGPPCPPCPAPEFEGGPSVFLFPPKPKDTLMISRTPEVTCVVVDVSQEDPEVQFNWYVDGVEVHNAKTKPREEQFNSTYRVVSVLTVLHQDWLNGKEYKCKVSNKGLPSSIEKTISKAKGQPREPQVYTLPPSQEEMTKNQVSLTCLVKGFYPSDIAVEWESNGQPENNYKTTPPVLDSDGSFFLYSRLTVDKSRWQEGNVFSCSVMHEALHNHYTQKSLSLSLGGGGSGSAHPIPDSSPLLQFGGQVRQRYLYTDDACQTEAHLEIREDGTVGGAADQSPESLLQLKALKPGVIQILGVKTSRFLCQRPDGALYGSLHFDPEACSFRELLLEDGYNVYQSEAHGLPLHLPGCKSPHRDPAPRGPARFLPLPGLPPAPPEPPGILAPQPPDVGSSDPLSMVGSQGRSPSYAS

SEQ ID NO: 944 - protein, 466 aa, Artificial Sequence
  Fusion Protein
GHGEGTFTSDKSKQLEEEAVRLFIEWLKAGGGGGGGGGSGGGGSGGGGSAESKYGPPCPPCPAPEFEGGPSVFLFPPKPKDTLMISRTPEVTCVVVDVSQEDPEVQFNWYVDGVEVHNAKTKPREEQFNSTYRVVSVLTVLHQDWLNGKEYKCKVSNKGLPSSIEKTISKAKGQPREPQVYTLPPSQEEMTKNQVSLTCLVKGFYPSDIAVEWESNGQPENNYKTTPPVLDSDGSFFLYSRLTVDKSRWQEGNVFSCSVMHEALHNHYTQKSLSLSLGGGGSGSAHPIPDSSPLLQFGGQVRQRYLYTDDACQTEAHLEIREDGTVGGAADQSPESLLQLKALKPGVIQILGVKTSRFLCQRPDGALYGSLHFDPEACSFRELLLEDGYNVYQSEAHGLPLHLPGCKSPHRDPAPRGPARFLPLPGLPPAPPEPPGILAPQPPDVGSSDPLSMVYPSQGRSPSYAS

SEQ ID NO: 945 - protein, 465 aa, Artificial Sequence
  Fusion Protein
GHGEGTFTSDKSKQLEEEAVRLFIEWLKAGGGGGGGGGSGGGGSGGGGSAESKYGPPCPPCPAPEFEGGPSVFLFPPKPKDTLMISRTPEVTCVVVDVSQEDPEVQFNWYVDGVEVHNAKTKPREEQFNSTYRVVSVLTVLHQDWLNGKEYKCKVSNKGLPSSIEKTISKAKGQPREPQVYTLPPSQEEMTKNQVSLTCLVKGFYPSDIAVEWESNGQPENNYKTTPPVLDSDGSFFLYSRLTVDKSRWQEGNVFSCSVMHEALHNHYTQKSLSLSLGGGGSGSAHPIPDSSPLLQFGGQVRQRYLYTDDACQTEAHLEIREDGTVGGAADQSPESLLQLKALKPGVIQILGVKTSRFLCQRPDGALYGSLHFDPEACSFRELLLEDGYNVYQSEAHGLPLHLCGNKSPHRDPAPRGPARFLPLPGLPPAPPEPPGILAPQPPDVGSSDPLSMVGSQGRSPSYAS

SEQ ID NO: 946 - protein, 466 aa, Artificial Sequence
  Fusion Protein
GHGEGTFTSDKSKQLEEEAVRLFIEWLKAGGGGGGGGGSGGGGSGGGGSAESKYGPPCPPCPAPEFEGGPSVFLFPPKPKDTLMISRTPEVTCVVVDVSQEDPEVQFNWYVDGVEVHNAKTKPREEQFNSTYRVVSVLTVLHQDWLNGKEYKCKVSNKGLPSSIEKTISKAKGQPREPQVYTLPPSQEEMTKNQVSLTCLVKGFYPSDIAVEWESNGQPENNYKTTPPVLDSDGSFFLYSRLTVDKSRWQEGNVFSCSVMHEALHNHYTQKSLSLSLGGGGSGSAHPIPDSSPLLQFGGQVRQRYLYTDDACQTEAHLEIREDGTVGGAADQSPESLLQLKALKPGVIQILGVKTSRFLCQRPDGALYGSLHFDPEACSFRELLLEDGYNVYQSEAHGLPLHLCGNKSPHRDPAPRGPARFLPLPGLPPAPPEPPGILAPQPPDVGSSDPLSMVYPSQGRSPSYAS

SEQ ID NO: 947 - protein, 462 aa, Artificial Sequence
  Fusion Protein
GHGEGTFTSDKSKQLEEEAVRLFIEWLKAGGGGGGGGSGGGGSGGGGSADKTHTCPPCPAPEAAGGPSVFLFPPKPKDTLMISRTPEVTCVVVDVSHEDPEVKFNWYVDGVEVHNAKTKPREEQYNSTYRVVSVLTVLHQDWLNGKEYKCKVSNKALPAPIEKTISKAKGQPREPQVYTLPPSRDELTKNQVSLTCLVKGFYPSDIAVEWESNGQPENNYKTTPPVLDSDGSFFLYSKLTVDKSRWQQGNVFSCSVMHEALHNHYTQKSLSLSPGGGGSGSAHPIPDSSPLLQFGGQVRQRYLYTDDACQTEAHLEIREDGTVGGAADQSPESLLQLKALKPGVIQILGVKTSRFLCQRPDGALYGSLHFDPEACSFRELLLEDGYNVYQSEAHGLPLHLPGCKSPHRDPAPRGPARFLPLPGLPPAPPEPPGILAPQPPDVGSSDPLSMVGSQGRSPSYAS

SEQ ID NO: 948 - protein, 463 aa, Artificial Sequence
  Fusion Protein
GHGEGTFTSDKSKQLEEEAVRLFIEWLKAGGGGGGGGSGGGGSGGGGSADKTHTCPPCPAPEAAGGPSVFLFPPKPKDTLMISRTPEVTCVVVDVSHEDPEVKFNWYVDGVEVHNAKTKPREEQYNSTYRVVSVLTVLHQDWLNGKEYKCKVSNKALPAPIEKTISKAKGQPREPQVYTLPPSRDELTKNQVSLTCLVKGFYPSDIAVEWESNGQPENNYKTTPPVLDSDGSFFLYSKLTVDKSRWQQGNVFSCSVMHEALHNHYTQKSLSLSPGGGGSGSAHPIPDSSPLLQFGGQVRQRYLYTDDACQTEAHLEIREDGTVGGAADQSPESLLQLKALKPGVIQILGVKTSRFLCQRPDGALYGSLHFDPEACSFRELLLEDGYNVYQSEAHGLPLHLPGCKSPHRDPAPRGPARFLPLPGLPPAPPEPPGILAPQPPDVGSSDPLSMVYPSQGRSPSYAS

SEQ ID NO: 949 - protein, 462 aa, Artificial Sequence
  Fusion Protein
GHGEGTFTSDKSKQLEEEAVRLFIEWLKAGGGGGGGGSGGGGSGGGGSADKTHTCPPCPAPEAAGGPSVFLFPPKPKDTLMISRTPEVTCVVVDVSHEDPEVKFNWYVDGVEVHNAKTKPREEQYNSTYRVVSVLTVLHQDWLNGKEYKCKVSNKALPAPIEKTISKAKGQPREPQVYTLPPSRDELTKNQVSLTCLVKGFYPSDIAVEWESNGQPENNYKTTPPVLDSDGSFFLYSKLTVDKSRWQQGNVFSCSVMHEALHNHYTQKSLSLSPGGGGSGSAHPIPDSSPLLQFGGQVRQRYLYTDDACQTEAHLEIREDGTVGGAADQSPESLLQLKALKPGVIQILGVKTSRFLCQRPDGALYGSLHFDPEACSFRELLLEDGYNVYQSEAHGLPLHLCGNKSPHRDPAPRGPARFLPLPGLPPAPPEPPGILAPQPPDVGSSDPLSMVGSQGRSPSYAS

SEQ ID NO: 950 - protein, 463 aa, Artificial Sequence
  Fusion Protein
GHGEGTFTSDKSKQLEEEAVRLFIEWLKAGGGGGGGGSGGGGSGGGGSADKTHTCPPCPAPEAAGGPSVFLFPPKPKDTLMISRTPEVTCVVVDVSHEDPEVKFNWYVDGVEVHNAKTKPREEQYNSTYRVVSVLTVLHQDWLNGKEYKCKVSNKALPAPIEKTISKAKGQPREPQVYTLPPSRDELTKNQVSLTCLVKGFYPSDIAVEWESNGQPENNYKTTPPVLDSDGSFFLYSKLTVDKSRWQQGNVFSCSVMHEALHNHYTQKSLSLSPGGGGSGSAHPIPDSSPLLQFGGQVRQRYLYTDDACQTEAHLEIREDGTVGGAADQSPESLLQLKALKPGVIQILGVKTSRFLCQRPDGALYGSLHFDPEACSFRELLLEDGYNVYQSEAHGLPLHLCGNKSPHRDPAPRGPARFLPLPGLPPAPPEPPGILAPQPPDVGSSDPLSMVYPSQGRSPSYAS

SEQ ID NO: 951 - protein, 462 aa, Artificial Sequence
  Fusion Protein
GHGEGTFTSDKSKQLEEEAVRLFIEWLKAGGGGGGGGSGGGGSGGGGSADKTHTCPPCPAPELLGGPSVFLFPPKPKDTLMISRTPEVTCVVVDVSHEDPEVKFNWYVDGVEVHNAKTKPREEQYNNASRVVSVLTVLHQDWLNGKEYKCKVSNKALPAPIEKTISKAKGQPREPQVYTLPPSRDELTKNQVSLTCLVKGFYPSDIAVEWESNGQPENNYKTTPPVLDSDGSFFLYSKLTVDKSRWQQGNVFSCSVMHEALHNHYTQKSLSLSPGGGGSGSAHPIPDSSPLLQFGGQVRQRYLYTDDACQTEAHLEIREDGTVGGAADQSPESLLQLKALKPGVIQILGVKTSRFLCQRPDGALYGSLHFDPEACSFRELLLEDGYNVYQSEAHGLPLHLPGCKSPHRDPAPRGPARFLPLPGLPPAPPEPPGILAPQPPDVGSSDPLSMVGSQGRSPSYAS

SEQ ID NO: 952 - protein, 463 aa, Artificial Sequence
  Fusion Protein
GHGEGTFTSDKSKQLEEEAVRLFIEWLKAGGGGGGGGSGGGGSGGGGSADKTHTCPPCPAPELLGGPSVFLFPPKPKDTLMISRTPEVTCVVVDVSHEDPEVKFNWYVDGVEVHNAKTKPREEQYNNASRVVSVLTVLHQDWLNGKEYKCKVSNKALPAPIEKTISKAKGQPREPQVYTLPPSRDELTKNQVSLTCLVKGFYPSDIAVEWESNGQPENNYKTTPPVLDSDGSFFLYSKLTVDKSRWQQGNVFSCSVMHEALHNHYTQKSLSLSPGGGGSGSAHPIPDSSPLLQFGGQVRQRYLYTDDACQTEAHLEIREDGTVGGAADQSPESLLQLKALKPGVIQILGVKTSRFLCQRPDGALYGSLHFDPEACSFRELLLEDGYNVYQSEAHGLPLHLPGCKSPHRDPAPRGPARFLPLPGLPPAPPEPPGILAPQPPDVGSSDPLSMVYPSQGRSPSYAS

SEQ ID NO: 953 - protein, 462 aa, Artificial Sequence
  Fusion Protein
GHGEGTFTSDKSKQLEEEAVRLFIEWLKAGGGGGGGGSGGGGSGGGGSADKTHTCPPCPAPELLGGPSVFLFPPKPKDTLMISRTPEVTCVVVDVSHEDPEVKFNWYVDGVEVHNAKTKPREEQYNNASRVVSVLTVLHQDWLNGKEYKCKVSNKALPAPIEKTISKAKGQPREPQVYTLPPSRDELTKNQVSLTCLVKGFYPSDIAVEWESNGQPENNYKTTPPVLDSDGSFFLYSKLTVDKSRWQQGNVFSCSVMHEALHNHYTQKSLSLSPGGGGSGSAHPIPDSSPLLQFGGQVRQRYLYTDDACQTEAHLEIREDGTVGGAADQSPESLLQLKALKPGVIQILGVKTSRFLCQRPDGALYGSLHFDPEACSFRELLLEDGYNVYQSEAHGLPLHLCGNKSPHRDPAPRGPARFLPLPGLPPAPPEPPGILAPQPPDVGSSDPLSMVGSQGRSPSYAS

SEQ ID NO: 954 - protein, 463 aa, Artificial Sequence
  Fusion Protein
GHGEGTFTSDKSKQLEEEAVRLFIEWLKAGGGGGGGGSGGGGSGGGGSADKTHTCPPCPAPELLGGPSVFLFPPKPKDTLMISRTPEVTCVVVDVSHEDPEVKFNWYVDGVEVHNAKTKPREEQYNNASRVVSVLTVLHQDWLNGKEYKCKVSNKALPAPIEKTISKAKGQPREPQVYTLPPSRDELTKNQVSLTCLVKGFYPSDIAVEWESNGQPENNYKTTPPVLDSDGSFFLYSKLTVDKSRWQQGNVFSCSVMHEALHNHYTQKSLSLSPGGGGSGSAHPIPDSSPLLQFGGQVRQRYLYTDDACQTEAHLEIREDGTVGGAADQSPESLLQLKALKPGVIQILGVKTSRFLCQRPDGALYGSLHFDPEACSFRELLLEDGYNVYQSEAHGLPLHLCGNKSPHRDPAPRGPARFLPLPGLPPAPPEPPGILAPQPPDVGSSDPLSMVYPSQGRSPSYAS

SEQ ID NO: 955 - protein, 464 aa, Artificial Sequence
  Fusion Protein
GHGEGTFTSDKSKQLEEEAVRLFIEWLKAGGGGGGGGSGGGGSGGGGSAESKYGPPCPPCPAPEFEGGPSVFLFPPKPKDTLMISRTPEVTCVVVDVSQEDPEVQFNWYVDGVEVHNAKTKPREEQFNSTYRVVSVLTVLHQDWLNGKEYKCKVSNKGLPSSIEKTISKAKGQPREPQVYTLPPSQEEMTKNQVSLTCLVKGFYPSDIAVEWESNGQPENNYKTTPPVLDSDGSFFLYSRLTVDKSRWQEGNVFSCSVMHEALHNHYTQKSLSLSLGGGGSGSAHPIPDSSPLLQFGGQVRQRYLYTDDACQTEAHLEIREDGTVGGAADQSPESLLQLKALKPGVIQILGVKTSRFLCQRPDGALYGSLHFDPEACSFRELLLEDGYNVYQSEAHGLPLHLPGCKSPHRDPAPRGPARFLPLPGLPPAPPEPPGILAPQPPDVGSSDPLSMVGSQGRSPSYAS

SEQ ID NO: 956 - protein, 465 aa, Artificial Sequence
  Fusion Protein
GHGEGTFTSDKSKQLEEEAVRLFIEWLKAGGGGGGGGSGGGGSGGGGSAESKYGPPCPPCPAPEFEGGPSVFLFPPKPKDTLMISRTPEVTCVVVDVSQEDPEVQFNWYVDGVEVHNAKTKPREEQFNSTYRVVSVLTVLHQDWLNGKEYKCKVSNKGLPSSIEKTISKAKGQPREPQVYTLPPSQEEMTKNQVSLTCLVKGFYPSDIAVEWESNGQPENNYKTTPPVLDSDGSFFLYSRLTVDKSRWQEGNVFSCSVMHEALHNHYTQKSLSLSLGGGGSGSAHPIPDSSPLLQFGGQVRQRYLYTDDACQTEAHLEIREDGTVGGAADQSPESLLQLKALKPGVIQILGVKTSRFLCQRPDGALYGSLHFDPEACSFRELLLEDGYNVYQSEAHGLPLHLPGCKSPHRDPAPRGPARFLPLPGLPPAPPEPPGILAPQPPDVGSSDPLSMVYPSQGRSPSYAS

SEQ ID NO: 957 - protein, 464 aa, Artificial Sequence
  Fusion Protein
GHGEGTFTSDKSKQLEEEAVRLFIEWLKAGGGGGGGGSGGGGSGGGGSAESKYGPPCPPCPAPEFEGGPSVFLFPPKPKDTLMISRTPEVTCVVVDVSQEDPEVQFNWYVDGVEVHNAKTKPREEQFNSTYRVVSVLTVLHQDWLNGKEYKCKVSNKGLPSSIEKTISKAKGQPREPQVYTLPPSQEEMTKNQVSLTCLVKGFYPSDIAVEWESNGQPENNYKTTPPVLDSDGSFFLYSRLTVDKSRWQEGNVFSCSVMHEALHNHYTQKSLSLSLGGGGSGSAHPIPDSSPLLQFGGQVRQRYLYTDDACQTEAHLEIREDGTVGGAADQSPESLLQLKALKPGVIQILGVKTSRFLCQRPDGALYGSLHFDPEACSFRELLLEDGYNVYQSEAHGLPLHLCGNKSPHRDPAPRGPARFLPLPGLPPAPPEPPGILAPQPPDVGSSDPLSMVGSQGRSPSYAS

SEQ ID NO: 958 - protein, 465 aa, Artificial Sequence
  Fusion Protein
GHGEGTFTSDKSKQLEEEAVRLFIEWLKAGGGGGGGGSGGGGSGGGGSAESKYGPPCPPCPAPEFEGGPSVFLFPPKPKDTLMISRTPEVTCVVVDVSQEDPEVQFNWYVDGVEVHNAKTKPREEQFNSTYRVVSVLTVLHQDWLNGKEYKCKVSNKGLPSSIEKTISKAKGQPREPQVYTLPPSQEEMTKNQVSLTCLVKGFYPSDIAVEWESNGQPENNYKTTPPVLDSDGSFFLYSRLTVDKSRWQEGNVFSCSVMHEALHNHYTQKSLSLSLGGGGSGSAHPIPDSSPLLQFGGQVRQRYLYTDDACQTEAHLEIREDGTVGGAADQSPESLLQLKALKPGVIQILGVKTSRFLCQRPDGALYGSLHFDPEACSFRELLLEDGYNVYQSEAHGLPLHLCGNKSPHRDPAPRGPARFLPLPGLPPAPPEPPGILAPQPPDVGSSDPLSMVYPSQGRSPSYAS

SEQ ID NO: 959 - protein, 470 aa, Artificial Sequence
  Fusion Protein
GHGEGTFTSDKSKQLEEEAQRLFIEWLKAGGPKKIRYSGGGGGGGSGGGGSGGGGSADKTHTCPPCPAPEAAGGPSVFLFPPKPKDTLMISRTPEVTCVVVDVSHEDPEVKFNWYVDGVEVHNAKTKPREEQYNSTYRVVSVLTVLHQDWLNGKEYKCKVSNKALPAPIEKTISKAKGQPREPQVYTLPPSRDELTKNQVSLTCLVKGFYPSDIAVEWESNGQPENNYKTTPPVLDSDGSFFLYSKLTVDKSRWQQGNVFSCSVMHEALHNHYTQKSLSLSPGGGGSGSAHPIPDSSPLLQFGGQVRQRYLYTDDACQTEAHLEIREDGTVGGAADQSPESLLQLKALKPGVIQILGVKTSRFLCQRPDGALYGSLHFDPEACSFRELLLEDGYNVYQSEAHGLPLHLPGCKSPHRDPAPRGPARFLPLPGLPPAPPEPPGILAPQPPDVGSSDPLSMVGSQGRSPSYAS

SEQ ID NO: 960 - protein, 471 aa, Artificial Sequence
  Fusion Protein
GHGEGTFTSDKSKQLEEEAQRLFIEWLKAGGPKKIRYSGGGGGGGSGGGGSGGGGSADKTHTCPPCPAPEAAGGPSVFLFPPKPKDTLMISRTPEVTCVVVDVSHEDPEVKFNWYVDGVEVHNAKTKPREEQYNSTYRVVSVLTVLHQDWLNGKEYKCKVSNKALPAPIEKTISKAKGQPREPQVYTLPPSRDELTKNQVSLTCLVKGFYPSDIAVEWESNGQPENNYKTTPPVLDSDGSFFLYSKLTVDKSRWQQGNVFSCSVMHEALHNHYTQKSLSLSPGGGGSGSAHPIPDSSPLLQFGGQVRQRYLYTDDACQTEAHLEIREDGTVGGAADQSPESLLQLKALKPGVIQILGVKTSRFLCQRPDGALYGSLHFDPEACSFRELLLEDGYNVYQSEAHGLPLHLPGCKSPHRDPAPRGPARFLPLPGLPPAPPEPPGILAPQPPDVGSSDPLSMVYPSQGRSPSYAS

SEQ ID NO: 961 - protein, 470 aa, Artificial Sequence
  Fusion Protein
GHGEGTFTSDKSKQLEEEAQRLFIEWLKAGGPKKIRYSGGGGGGGSGGGGSGGGGSADKTHTCPPCPAPEAAGGPSVFLFPPKPKDTLMISRTPEVTCVVVDVSHEDPEVKFNWYVDGVEVHNAKTKPREEQYNSTYRVVSVLTVLHQDWLNGKEYKCKVSNKALPAPIEKTISKAKGQPREPQVYTLPPSRDELTKNQVSLTCLVKGFYPSDIAVEWESNGQPENNYKTTPPVLDSDGSFFLYSKLTVDKSRWQQGNVFSCSVMHEALHNHYTQKSLSLSPGGGGSGSAHPIPDSSPLLQFGGQVRQRYLYTDDACQTEAHLEIREDGTVGGAADQSPESLLQLKALKPGVIQILGVKTSRFLCQRPDGALYGSLHFDPEACSFRELLLEDGYNVYQSEAHGLPLHLCGNKSPHRDPAPRGPARFLPLPGLPPAPPEPPGILAPQPPDVGSSDPLSMVGSQGRSPSYAS

SEQ ID NO: 962 - protein, 471 aa, Artificial Sequence
  Fusion Protein
GHGEGTFTSDKSKQLEEEAQRLFIEWLKAGGPKKIRYSGGGGGGGSGGGGSGGGGSADKTHTCPPCPAPEAAGGPSVFLFPPKPKDTLMISRTPEVTCVVVDVSHEDPEVKFNWYVDGVEVHNAKTKPREEQYNSTYRVVSVLTVLHQDWLNGKEYKCKVSNKALPAPIEKTISKAKGQPREPQVYTLPPSRDELTKNQVSLTCLVKGFYPSDIAVEWESNGQPENNYKTTPPVLDSDGSFFLYSKLTVDKSRWQQGNVFSCSVMHEALHNHYTQKSLSLSPGGGGSGSAHPIPDSSPLLQFGGQVRQRYLYTDDACQTEAHLEIREDGTVGGAADQSPESLLQLKALKPGVIQILGVKTSRFLCQRPDGALYGSLHFDPEACSFRELLLEDGYNVYQSEAHGLPLHLCGNKSPHRDPAPRGPARFLPLPGLPPAPPEPPGILAPQPPDVGSSDPLSMVYPSQGRSPSYAS

SEQ ID NO: 963 - protein, 470 aa, Artificial Sequence
  Fusion Protein
GHGEGTFTSDKSKQLEEEAQRLFIEWLKAGGPKKIRYSGGGGGGGSGGGGSGGGGSADKTHTCPPCPAPELLGGPSVFLFPPKPKDTLMISRTPEVTCVVVDVSHEDPEVKFNWYVDGVEVHNAKTKPREEQYNNASRVVSVLTVLHQDWLNGKEYKCKVSNKALPAPIEKTISKAKGQPREPQVYTLPPSRDELTKNQVSLTCLVKGFYPSDIAVEWESNGQPENNYKTTPPVLDSDGSFFLYSKLTVDKSRWQQGNVFSCSVMHEALHNHYTQKSLSLSPGGGGSGSAHPIPDSSPLLQFGGQVRQRYLYTDDACQTEAHLEIREDGTVGGAADQSPESLLQLKALKPGVIQILGVKTSRFLCQRPDGALYGSLHFDPEACSFRELLLEDGYNVYQSEAHGLPLHLPGCKSPHRDPAPRGPARFLPLPGLPPAPPEPPGILAPQPPDVGSSDPLSMVGSQGRSPSYAS

SEQ ID NO: 964 - protein, 471 aa, Artificial Sequence
  Fusion Protein
GHGEGTFTSDKSKQLEEEAQRLFIEWLKAGGPKKIRYSGGGGGGGSGGGGSGGGGSADKTHTCPPCPAPELLGGPSVFLFPPKPKDTLMISRTPEVTCVVVDVSHEDPEVKFNWYVDGVEVHNAKTKPREEQYNNASRVVSVLTVLHQDWLNGKEYKCKVSNKALPAPIEKTISKAKGQPREPQVYTLPPSRDELTKNQVSLTCLVKGFYPSDIAVEWESNGQPENNYKTTPPVLDSDGSFFLYSKLTVDKSRWQQGNVFSCSVMHEALHNHYTQKSLSLSPGGGGSGSAHPIPDSSPLLQFGGQVRQRYLYTDDACQTEAHLEIREDGTVGGAADQSPESLLQLKALKPGVIQILGVKTSRFLCQRPDGALYGSLHFDPEACSFRELLLEDGYNVYQSEAHGLPLHLPGCKSPHRDPAPRGPARFLPLPGLPPAPPEPPGILAPQPPDVGSSDPLSMVYPSQGRSPSYAS

SEQ ID NO: 965 - protein, 470 aa, Artificial Sequence
  Fusion Protein
GHGEGTFTSDKSKQLEEEAQRLFIEWLKAGGPKKIRYSGGGGGGGSGGGGSGGGGSADKTHTCPPCPAPELLGGPSVFLFPPKPKDTLMISRTPEVTCVVVDVSHEDPEVKFNWYVDGVEVHNAKTKPREEQYNNASRVVSVLTVLHQDWLNGKEYKCKVSNKALPAPIEKTISKAKGQPREPQVYTLPPSRDELTKNQVSLTCLVKGFYPSDIAVEWESNGQPENNYKTTPPVLDSDGSFFLYSKLTVDKSRWQQGNVFSCSVMHEALHNHYTQKSLSLSPGGGGSGSAHPIPDSSPLLQFGGQVRQRYLYTDDACQTEAHLEIREDGTVGGAADQSPESLLQLKALKPGVIQILGVKTSRFLCQRPDGALYGSLHFDPEACSFRELLLEDGYNVYQSEAHGLPLHLCGNKSPHRDPAPRGPARFLPLPGLPPAPPEPPGILAPQPPDVGSSDPLSMVGSQGRSPSYAS

SEQ ID NO: 966 - protein, 471 aa, Artificial Sequence
  Fusion Protein
GHGEGTFTSDKSKQLEEEAQRLFIEWLKAGGPKKIRYSGGGGGGGSGGGGSGGGGSADKTHTCPPCPAPELLGGPSVFLFPPKPKDTLMISRTPEVTCVVVDVSHEDPEVKFNWYVDGVEVHNAKTKPREEQYNNASRVVSVLTVLHQDWLNGKEYKCKVSNKALPAPIEKTISKAKGQPREPQVYTLPPSRDELTKNQVSLTCLVKGFYPSDIAVEWESNGQPENNYKTTPPVLDSDGSFFLYSKLTVDKSRWQQGNVFSCSVMHEALHNHYTQKSLSLSPGGGGSGSAHPIPDSSPLLQFGGQVRQRYLYTDDACQTEAHLEIREDGTVGGAADQSPESLLQLKALKPGVIQILGVKTSRFLCQRPDGALYGSLHFDPEACSFRELLLEDGYNVYQSEAHGLPLHLCGNKSPHRDPAPRGPARFLPLPGLPPAPPEPPGILAPQPPDVGSSDPLSMVYPSQGRSPSYAS

SEQ ID NO: 967 - protein, 472 aa, Artificial Sequence
  Fusion Protein
GHGEGTFTSDKSKQLEEEAQRLFIEWLKAGGPKKIRYSGGGGGGGSGGGGSGGGGSAESKYGPPCPPCPAPEFEGGPSVFLFPPKPKDTLMISRTPEVTCVVVDVSQEDPEVQFNWYVDGVEVHNAKTKPREEQFNSTYRVVSVLTVLHQDWLNGKEYKCKVSNKGLPSSIEKTISKAKGQPREPQVYTLPPSQEEMTKNQVSLTCLVKGFYPSDIAVEWESNGQPENNYKTTPPVLDSDGSFFLYSRLTVDKSRWQEGNVFSCSVMHEALHNHYTQKSLSLSLGGGGSGSAHPIPDSSPLLQFGGQVRQRYLYTDDACQTEAHLEIREDGTVGGAADQSPESLLQLKALKPGVIQILGVKTSRFLCQRPDGALYGSLHFDPEACSFRELLLEDGYNVYQSEAHGLPLHLPGCKSPHRDPAPRGPARFLPLPGLPPAPPEPPGILAPQPPDVGSSDPLSMVGSQGRSPSYAS

SEQ ID NO: 968 - protein, 473 aa, Artificial Sequence
  Fusion Protein
GHGEGTFTSDKSKQLEEEAQRLFIEWLKAGGPKKIRYSGGGGGGGSGGGGSGGGGSAESKYGPPCPPCPAPEFEGGPSVFLFPPKPKDTLMISRTPEVTCVVVDVSQEDPEVQFNWYVDGVEVHNAKTKPREEQFNSTYRVVSVLTVLHQDWLNGKEYKCKVSNKGLPSSIEKTISKAKGQPREPQVYTLPPSQEEMTKNQVSLTCLVKGFYPSDIAVEWESNGQPENNYKTTPPVLDSDGSFFLYSRLTVDKSRWQEGNVFSCSVMHEALHNHYTQKSLSLSLGGGGSGSAHPIPDSSPLLQFGGQVRQRYLYTDDACQTEAHLEIREDGTVGGAADQSPESLLQLKALKPGVIQILGVKTSRFLCQRPDGALYGSLHFDPEACSFRELLLEDGYNVYQSEAHGLPLHLPGCKSPHRDPAPRGPARFLPLPGLPPAPPEPPGILAPQPPDVGSSDPLSMVYPSQGRSPSYAS

SEQ ID NO: 969 - protein, 472 aa, Artificial Sequence
  Fusion Protein
GHGEGTFTSDKSKQLEEEAQRLFIEWLKAGGPKKIRYSGGGGGGGSGGGGSGGGGSAESKYGPPCPPCPAPEFEGGPSVFLFPPKPKDTLMISRTPEVTCVVVDVSQEDPEVQFNWYVDGVEVHNAKTKPREEQFNSTYRVVSVLTVLHQDWLNGKEYKCKVSNKGLPSSIEKTISKAKGQPREPQVYTLPPSQEEMTKNQVSLTCLVKGFYPSDIAVEWESNGQPENNYKTTPPVLDSDGSFFLYSRLTVDKSRWQEGNVFSCSVMHEALHNHYTQKSLSLSLGGGGSGSAHPIPDSSPLLQFGGQVRQRYLYTDDACQTEAHLEIREDGTVGGAADQSPESLLQLKALKPGVIQILGVKTSRFLCQRPDGALYGSLHFDPEACSFRELLLEDGYNVYQSEAHGLPLHLCGNKSPHRDPAPRGPARFLPLPGLPPAPPEPPGILAPQPPDVGSSDPLSMVGSQGRSPSYAS

SEQ ID NO: 970 - protein, 473 aa, Artificial Sequence
  Fusion Protein
GHGEGTFTSDKSKQLEEEAQRLFIEWLKAGGPKKIRYSGGGGGGGSGGGGSGGGGSAESKYGPPCPPCPAPEFEGGPSVFLFPPKPKDTLMISRTPEVTCVVVDVSQEDPEVQFNWYVDGVEVHNAKTKPREEQFNSTYRVVSVLTVLHQDWLNGKEYKCKVSNKGLPSSIEKTISKAKGQPREPQVYTLPPSQEEMTKNQVSLTCLVKGFYPSDIAVEWESNGQPENNYKTTPPVLDSDGSFFLYSRLTVDKSRWQEGNVFSCSVMHEALHNHYTQKSLSLSLGGGGSGSAHPIPDSSPLLQFGGQVRQRYLYTDDACQTEAHLEIREDGTVGGAADQSPESLLQLKALKPGVIQILGVKTSRFLCQRPDGALYGSLHFDPEACSFRELLLEDGYNVYQSEAHGLPLHLCGNKSPHRDPAPRGPARFLPLPGLPPAPPEPPGILAPQPPDVGSSDPLSMVYPSQGRSPSYAS

SEQ ID NO: 971 - protein, 470 aa, Artificial Sequence
  Fusion Protein
GHGEGTFTSDKSKQLEEEASRLFIEWLKAGGPKKIRYSGGGGGGGSGGGGSGGGGSADKTHTCPPCPAPEAAGGPSVFLFPPKPKDTLMISRTPEVTCVVVDVSHEDPEVKFNWYVDGVEVHNAKTKPREEQYNSTYRVVSVLTVLHQDWLNGKEYKCKVSNKALPAPIEKTISKAKGQPREPQVYTLPPSRDELTKNQVSLTCLVKGFYPSDIAVEWESNGQPENNYKTTPPVLDSDGSFFLYSKLTVDKSRWQQGNVFSCSVMHEALHNHYTQKSLSLSPGGGGSGSAHPIPDSSPLLQFGGQVRQRYLYTDDACQTEAHLEIREDGTVGGAADQSPESLLQLKALKPGVIQILGVKTSRFLCQRPDGALYGSLHFDPEACSFRELLLEDGYNVYQSEAHGLPLHLPGCKSPHRDPAPRGPARFLPLPGLPPAPPEPPGILAPQPPDVGSSDPLSMVGSQGRSPSYAS

SEQ ID NO: 972 - protein, 471 aa, Artificial Sequence
  Fusion Protein
GHGEGTFTSDKSKQLEEEASRLFIEWLKAGGPKKIRYSGGGGGGGSGGGGSGGGGSADKTHTCPPCPAPEAAGGPSVFLFPPKPKDTLMISRTPEVTCVVVDVSHEDPEVKFNWYVDGVEVHNAKTKPREEQYNSTYRVVSVLTVLHQDWLNGKEYKCKVSNKALPAPIEKTISKAKGQPREPQVYTLPPSRDELTKNQVSLTCLVKGFYPSDIAVEWESNGQPENNYKTTPPVLDSDGSFFLYSKLTVDKSRWQQGNVFSCSVMHEALHNHYTQKSLSLSPGGGGSGSAHPIPDSSPLLQFGGQVRQRYLYTDDACQTEAHLEIREDGTVGGAADQSPESLLQLKALKPGVIQILGVKTSRFLCQRPDGALYGSLHFDPEACSFRELLLEDGYNVYQSEAHGLPLHLPGCKSPHRDPAPRGPARFLPLPGLPPAPPEPPGILAPQPPDVGSSDPLSMVYPSQGRSPSYAS

SEQ ID NO: 973 - protein, 470 aa, Artificial Sequence
  Fusion Protein
GHGEGTFTSDKSKQLEEEASRLFIEWLKAGGPKKIRYSGGGGGGGSGGGGSGGGGSADKTHTCPPCPAPEAAGGPSVFLFPPKPKDTLMISRTPEVTCVVVDVSHEDPEVKFNWYVDGVEVHNAKTKPREEQYNSTYRVVSVLTVLHQDWLNGKEYKCKVSNKALPAPIEKTISKAKGQPREPQVYTLPPSRDELTKNQVSLTCLVKGFYPSDIAVEWESNGQPENNYKTTPPVLDSDGSFFLYSKLTVDKSRWQQGNVFSCSVMHEALHNHYTQKSLSLSPGGGGSGSAHPIPDSSPLLQFGGQVRQRYLYTDDACQTEAHLEIREDGTVGGAADQSPESLLQLKALKPGVIQILGVKTSRFLCQRPDGALYGSLHFDPEACSFRELLLEDGYNVYQSEAHGLPLHLCGNKSPHRDPAPRGPARFLPLPGLPPAPPEPPGILAPQPPDVGSSDPLSMVGSQGRSPSYAS

SEQ ID NO: 974 - protein, 471 aa, Artificial Sequence
  Fusion Protein
GHGEGTFTSDKSKQLEEEASRLFIEWLKAGGPKKIRYSGGGGGGGSGGGGSGGGGSADKTHTCPPCPAPEAAGGPSVFLFPPKPKDTLMISRTPEVTCVVVDVSHEDPEVKFNWYVDGVEVHNAKTKPREEQYNSTYRVVSVLTVLHQDWLNGKEYKCKVSNKALPAPIEKTISKAKGQPREPQVYTLPPSRDELTKNQVSLTCLVKGFYPSDIAVEWESNGQPENNYKTTPPVLDSDGSFFLYSKLTVDKSRWQQGNVFSCSVMHEALHNHYTQKSLSLSPGGGGSGSAHPIPDSSPLLQFGGQVRQRYLYTDDACQTEAHLEIREDGTVGGAADQSPESLLQLKALKPGVIQILGVKTSRFLCQRPDGALYGSLHFDPEACSFRELLLEDGYNVYQSEAHGLPLHLCGNKSPHRDPAPRGPARFLPLPGLPPAPPEPPGILAPQPPDVGSSDPLSMVYPSQGRSPSYAS

SEQ ID NO: 975 - protein, 470 aa, Artificial Sequence
  Fusion Protein
GHGEGTFTSDKSKQLEEEASRLFIEWLKAGGPKKIRYSGGGGGGGSGGGGSGGGGSADKTHTCPPCPAPELLGGPSVFLFPPKPKDTLMISRTPEVTCVVVDVSHEDPEVKFNWYVDGVEVHNAKTKPREEQYNNASRVVSVLTVLHQDWLNGKEYKCKVSNKALPAPIEKTISKAKGQPREPQVYTLPPSRDELTKNQVSLTCLVKGFYPSDIAVEWESNGQPENNYKTTPPVLDSDGSFFLYSKLTVDKSRWQQGNVFSCSVMHEALHNHYTQKSLSLSPGGGGSGSAHPIPDSSPLLQFGGQVRQRYLYTDDACQTEAHLEIREDGTVGGAADQSPESLLQLKALKPGVIQILGVKTSRFLCQRPDGALYGSLHFDPEACSFRELLLEDGYNVYQSEAHGLPLHLPGCKSPHRDPAPRGPARFLPLPGLPPAPPEPPGILAPQPPDVGSSDPLSMVGSQGRSPSYAS

SEQ ID NO: 976 - protein, 471 aa, Artificial Sequence
  Fusion Protein
GHGEGTFTSDKSKQLEEEASRLFIEWLKAGGPKKIRYSGGGGGGGSGGGGSGGGGSADKTHTCPPCPAPELLGGPSVFLFPPKPKDTLMISRTPEVTCVVVDVSHEDPEVKFNWYVDGVEVHNAKTKPREEQYNNASRVVSVLTVLHQDWLNGKEYKCKVSNKALPAPIEKTISKAKGQPREPQVYTLPPSRDELTKNQVSLTCLVKGFYPSDIAVEWESNGQPENNYKTTPPVLDSDGSFFLYSKLTVDKSRWQQGNVFSCSVMHEALHNHYTQKSLSLSPGGGGSGSAHPIPDSSPLLQFGGQVRQRYLYTDDACQTEAHLEIREDGTVGGAADQSPESLLQLKALKPGVIQILGVKTSRFLCQRPDGALYGSLHFDPEACSFRELLLEDGYNVYQSEAHGLPLHLPGCKSPHRDPAPRGPARFLPLPGLPPAPPEPPGILAPQPPDVGSSDPLSMVYPSQGRSPSYAS

SEQ ID NO: 977 - protein, 470 aa, Artificial Sequence
  Fusion Protein
GHGEGTFTSDKSKQLEEEASRLFIEWLKAGGPKKIRYSGGGGGGGSGGGGSGGGGSADKTHTCPPCPAPELLGGPSVFLFPPKPKDTLMISRTPEVTCVVVDVSHEDPEVKFNWYVDGVEVHNAKTKPREEQYNNASRVVSVLTVLHQDWLNGKEYKCKVSNKALPAPIEKTISKAKGQPREPQVYTLPPSRDELTKNQVSLTCLVKGFYPSDIAVEWESNGQPENNYKTTPPVLDSDGSFFLYSKLTVDKSRWQQGNVFSCSVMHEALHNHYTQKSLSLSPGGGGSGSAHPIPDSSPLLQFGGQVRQRYLYTDDACQTEAHLEIREDGTVGGAADQSPESLLQLKALKPGVIQILGVKTSRFLCQRPDGALYGSLHFDPEACSFRELLLEDGYNVYQSEAHGLPLHLCGNKSPHRDPAPRGPARFLPLPGLPPAPPEPPGILAPQPPDVGSSDPLSMVGSQGRSPSYAS

SEQ ID NO: 978 - protein, 471 aa, Artificial Sequence
  Fusion Protein
GHGEGTFTSDKSKQLEEEASRLFIEWLKAGGPKKIRYSGGGGGGGSGGGGSGGGGSADKTHTCPPCPAPELLGGPSVFLFPPKPKDTLMISRTPEVTCVVVDVSHEDPEVKFNWYVDGVEVHNAKTKPREEQYNNASRVVSVLTVLHQDWLNGKEYKCKVSNKALPAPIEKTISKAKGQPREPQVYTLPPSRDELTKNQVSLTCLVKGFYPSDIAVEWESNGQPENNYKTTPPVLDSDGSFFLYSKLTVDKSRWQQGNVFSCSVMHEALHNHYTQKSLSLSPGGGGSGSAHPIPDSSPLLQFGGQVRQRYLYTDDACQTEAHLEIREDGTVGGAADQSPESLLQLKALKPGVIQILGVKTSRFLCQRPDGALYGSLHFDPEACSFRELLLEDGYNVYQSEAHGLPLHLCGNKSPHRDPAPRGPARFLPLPGLPPAPPEPPGILAPQPPDVGSSDPLSMVYPSQGRSPSYAS

SEQ ID NO: 979 - protein, 472 aa, Artificial Sequence
  Fusion Protein
GHGEGTFTSDKSKQLEEEASRLFIEWLKAGGPKKIRYSGGGGGGGSGGGGSGGGGSAESKYGPPCPPCPAPEFEGGPSVFLFPPKPKDTLMISRTPEVTCVVVDVSQEDPEVQFNWYVDGVEVHNAKTKPREEQFNSTYRVVSVLTVLHQDWLNGKEYKCKVSNKGLPSSIEKTISKAKGQPREPQVYTLPPSQEEMTKNQVSLTCLVKGFYPSDIAVEWESNGQPENNYKTTPPVLDSDGSFFLYSRLTVDKSRWQEGNVFSCSVMHEALHNHYTQKSLSLSLGGGGSGSAHPIPDSSPLLQFGGQVRQRYLYTDDACQTEAHLEIREDGTVGGAADQSPESLLQLKALKPGVIQILGVKTSRFLCQRPDGALYGSLHFDPEACSFRELLLEDGYNVYQSEAHGLPLHLPGCKSPHRDPAPRGPARFLPLPGLPPAPPEPPGILAPQPPDVGSSDPLSMVGSQGRSPSYAS

SEQ ID NO: 980 - protein, 473 aa, Artificial Sequence
  Fusion Protein
GHGEGTFTSDKSKQLEEEASRLFIEWLKAGGPKKIRYSGGGGGGGSGGGGSGGGGSAESKYGPPCPPCPAPEFEGGPSVFLFPPKPKDTLMISRTPEVTCVVVDVSQEDPEVQFNWYVDGVEVHNAKTKPREEQFNSTYRVVSVLTVLHQDWLNGKEYKCKVSNKGLPSSIEKTISKAKGQPREPQVYTLPPSQEEMTKNQVSLTCLVKGFYPSDIAVEWESNGQPENNYKTTPPVLDSDGSFFLYSRLTVDKSRWQEGNVFSCSVMHEALHNHYTQKSLSLSLGGGGSGSAHPIPDSSPLLQFGGQVRQRYLYTDDACQTEAHLEIREDGTVGGAADQSPESLLQLKALKPGVIQILGVKTSRFLCQRPDGALYGSLHFDPEACSFRELLLEDGYNVYQSEAHGLPLHLPGCKSPHRDPAPRGPARFLPLPGLPPAPPEPPGILAPQPPDVGSSDPLSMVYPSQGRSPSYAS

SEQ ID NO: 981 - protein, 472 aa, Artificial Sequence
  Fusion Protein
GHGEGTFTSDKSKQLEEEASRLFIEWLKAGGPKKIRYSGGGGGGGSGGGGSGGGGSAESKYGPPCPPCPAPEFEGGPSVFLFPPKPKDTLMISRTPEVTCVVVDVSQEDPEVQFNWYVDGVEVHNAKTKPREEQFNSTYRVVSVLTVLHQDWLNGKEYKCKVSNKGLPSSIEKTISKAKGQPREPQVYTLPPSQEEMTKNQVSLTCLVKGFYPSDIAVEWESNGQPENNYKTTPPVLDSDGSFFLYSRLTVDKSRWQEGNVFSCSVMHEALHNHYTQKSLSLSLGGGGSGSAHPIPDSSPLLQFGGQVRQRYLYTDDACQTEAHLEIREDGTVGGAADQSPESLLQLKALKPGVIQILGVKTSRFLCQRPDGALYGSLHFDPEACSFRELLLEDGYNVYQSEAHGLPLHLCGNKSPHRDPAPRGPARFLPLPGLPPAPPEPPGILAPQPPDVGSSDPLSMVGSQGRSPSYAS

SEQ ID NO: 982 - protein, 473 aa, Artificial Sequence
  Fusion Protein
GHGEGTFTSDKSKQLEEEASRLFIEWLKAGGPKKIRYSGGGGGGGSGGGGSGGGGSAESKYGPPCPPCPAPEFEGGPSVFLFPPKPKDTLMISRTPEVTCVVVDVSQEDPEVQFNWYVDGVEVHNAKTKPREEQFNSTYRVVSVLTVLHQDWLNGKEYKCKVSNKGLPSSIEKTISKAKGQPREPQVYTLPPSQEEMTKNQVSLTCLVKGFYPSDIAVEWESNGQPENNYKTTPPVLDSDGSFFLYSRLTVDKSRWQEGNVFSCSVMHEALHNHYTQKSLSLSLGGGGSGSAHPIPDSSPLLQFGGQVRQRYLYTDDACQTEAHLEIREDGTVGGAADQSPESLLQLKALKPGVIQILGVKTSRFLCQRPDGALYGSLHFDPEACSFRELLLEDGYNVYQSEAHGLPLHLCGNKSPHRDPAPRGPARFLPLPGLPPAPPEPPGILAPQPPDVGSSDPLSMVYPSQGRSPSYAS

SEQ ID NO: 983 - protein, 470 aa, Artificial Sequence
  Fusion Protein
GHGEGTFTSDKSKQLEEEATRLFIEWLKAGGPKKIRYSGGGGGGGSGGGGSGGGGSADKTHTCPPCPAPEAAGGPSVFLFPPKPKDTLMISRTPEVTCVVVDVSHEDPEVKFNWYVDGVEVHNAKTKPREEQYNSTYRVVSVLTVLHQDWLNGKEYKCKVSNKALPAPIEKTISKAKGQPREPQVYTLPPSRDELTKNQVSLTCLVKGFYPSDIAVEWESNGQPENNYKTTPPVLDSDGSFFLYSKLTVDKSRWQQGNVFSCSVMHEALHNHYTQKSLSLSPGGGGSGSAHPIPDSSPLLQFGGQVRQRYLYTDDACQTEAHLEIREDGTVGGAADQSPESLLQLKALKPGVIQILGVKTSRFLCQRPDGALYGSLHFDPEACSFRELLLEDGYNVYQSEAHGLPLHLPGCKSPHRDPAPRGPARFLPLPGLPPAPPEPPGILAPQPPDVGSSDPLSMVGSQGRSPSYAS

SEQ ID NO: 984 - protein, 471 aa, Artificial Sequence
  Fusion Protein
GHGEGTFTSDKSKQLEEEATRLFIEWLKAGGPKKIRYSGGGGGGGSGGGGSGGGGSADKTHTCPPCPAPEAAGGPSVFLFPPKPKDTLMISRTPEVTCVVVDVSHEDPEVKFNWYVDGVEVHNAKTKPREEQYNSTYRVVSVLTVLHQDWLNGKEYKCKVSNKALPAPIEKTISKAKGQPREPQVYTLPPSRDELTKNQVSLTCLVKGFYPSDIAVEWESNGQPENNYKTTPPVLDSDGSFFLYSKLTVDKSRWQQGNVFSCSVMHEALHNHYTQKSLSLSPGGGGSGSAHPIPDSSPLLQFGGQVRQRYLYTDDACQTEAHLEIREDGTVGGAADQSPESLLQLKALKPGVIQILGVKTSRFLCQRPDGALYGSLHFDPEACSFRELLLEDGYNVYQSEAHGLPLHLPGCKSPHRDPAPRGPARFLPLPGLPPAPPEPPGILAPQPPDVGSSDPLSMVYPSQGRSPSYAS

SEQ ID NO: 985 - protein, 470 aa, Artificial Sequence
  Fusion Protein
GHGEGTFTSDKSKQLEEEATRLFIEWLKAGGPKKIRYSGGGGGGGSGGGGSGGGGSADKTHTCPPCPAPEAAGGPSVFLFPPKPKDTLMISRTPEVTCVVVDVSHEDPEVKFNWYVDGVEVHNAKTKPREEQYNSTYRVVSVLTVLHQDWLNGKEYKCKVSNKALPAPIEKTISKAKGQPREPQVYTLPPSRDELTKNQVSLTCLVKGFYPSDIAVEWESNGQPENNYKTTPPVLDSDGSFFLYSKLTVDKSRWQQGNVFSCSVMHEALHNHYTQKSLSLSPGGGGSGSAHPIPDSSPLLQFGGQVRQRYLYTDDACQTEAHLEIREDGTVGGAADQSPESLLQLKALKPGVIQILGVKTSRFLCQRPDGALYGSLHFDPEACSFRELLLEDGYNVYQSEAHGLPLHLCGNKSPHRDPAPRGPARFLPLPGLPPAPPEPPGILAPQPPDVGSSDPLSMVGSQGRSPSYAS

SEQ ID NO: 986 - protein, 471 aa, Artificial Sequence
  Fusion Protein
GHGEGTFTSDKSKQLEEEATRLFIEWLKAGGPKKIRYSGGGGGGGSGGGGSGGGGSADKTHTCPPCPAPEAAGGPSVFLFPPKPKDTLMISRTPEVTCVVVDVSHEDPEVKFNWYVDGVEVHNAKTKPREEQYNSTYRVVSVLTVLHQDWLNGKEYKCKVSNKALPAPIEKTISKAKGQPREPQVYTLPPSRDELTKNQVSLTCLVKGFYPSDIAVEWESNGQPENNYKTTPPVLDSDGSFFLYSKLTVDKSRWQQGNVFSCSVMHEALHNHYTQKSLSLSPGGGGSGSAHPIPDSSPLLQFGGQVRQRYLYTDDACQTEAHLEIREDGTVGGAADQSPESLLQLKALKPGVIQILGVKTSRFLCQRPDGALYGSLHFDPEACSFRELLLEDGYNVYQSEAHGLPLHLCGNKSPHRDPAPRGPARFLPLPGLPPAPPEPPGILAPQPPDVGSSDPLSMVYPSQGRSPSYAS

SEQ ID NO: 987 - protein, 470 aa, Artificial Sequence
  Fusion Protein
GHGEGTFTSDKSKQLEEEATRLFIEWLKAGGPKKIRYSGGGGGGGSGGGGSGGGGSADKTHTCPPCPAPELLGGPSVFLFPPKPKDTLMISRTPEVTCVVVDVSHEDPEVKFNWYVDGVEVHNAKTKPREEQYNNASRVVSVLTVLHQDWLNGKEYKCKVSNKALPAPIEKTISKAKGQPREPQVYTLPPSRDELTKNQVSLTCLVKGFYPSDIAVEWESNGQPENNYKTTPPVLDSDGSFFLYSKLTVDKSRWQQGNVFSCSVMHEALHNHYTQKSLSLSPGGGGSGSAHPIPDSSPLLQFGGQVRQRYLYTDDACQTEAHLEIREDGTVGGAADQSPESLLQLKALKPGVIQILGVKTSRFLCQRPDGALYGSLHFDPEACSFRELLLEDGYNVYQSEAHGLPLHLPGCKSPHRDPAPRGPARFLPLPGLPPAPPEPPGILAPQPPDVGSSDPLSMVGSQGRSPSYAS

SEQ ID NO: 988 - protein, 471 aa, Artificial Sequence
  Fusion Protein
GHGEGTFTSDKSKQLEEEATRLFIEWLKAGGPKKIRYSGGGGGGGSGGGGSGGGGSADKTHTCPPCPAPELLGGPSVFLFPPKPKDTLMISRTPEVTCVVVDVSHEDPEVKFNWYVDGVEVHNAKTKPREEQYNNASRVVSVLTVLHQDWLNGKEYKCKVSNKALPAPIEKTISKAKGQPREPQVYTLPPSRDELTKNQVSLTCLVKGFYPSDIAVEWESNGQPENNYKTTPPVLDSDGSFFLYSKLTVDKSRWQQGNVFSCSVMHEALHNHYTQKSLSLSPGGGGSGSAHPIPDSSPLLQFGGQVRQRYLYTDDACQTEAHLEIREDGTVGGAADQSPESLLQLKALKPGVIQILGVKTSRFLCQRPDGALYGSLHFDPEACSFRELLLEDGYNVYQSEAHGLPLHLPGCKSPHRDPAPRGPARFLPLPGLPPAPPEPPGILAPQPPDVGSSDPLSMVYPSQGRSPSYAS

SEQ ID NO: 989 - protein, 470 aa, Artificial Sequence
  Fusion Protein
GHGEGTFTSDKSKQLEEEATRLFIEWLKAGGPKKIRYSGGGGGGGSGGGGSGGGGSADKTHTCPPCPAPELLGGPSVFLFPPKPKDTLMISRTPEVTCVVVDVSHEDPEVKFNWYVDGVEVHNAKTKPREEQYNNASRVVSVLTVLHQDWLNGKEYKCKVSNKALPAPIEKTISKAKGQPREPQVYTLPPSRDELTKNQVSLTCLVKGFYPSDIAVEWESNGQPENNYKTTPPVLDSDGSFFLYSKLTVDKSRWQQGNVFSCSVMHEALHNHYTQKSLSLSPGGGGSGSAHPIPDSSPLLQFGGQVRQRYLYTDDACQTEAHLEIREDGTVGGAADQSPESLLQLKALKPGVIQILGVKTSRFLCQRPDGALYGSLHFDPEACSFRELLLEDGYNVYQSEAHGLPLHLCGNKSPHRDPAPRGPARFLPLPGLPPAPPEPPGILAPQPPDVGSSDPLSMVGSQGRSPSYAS

SEQ ID NO: 990 - protein, 471 aa, Artificial Sequence
  Fusion Protein
GHGEGTFTSDKSKQLEEEATRLFIEWLKAGGPKKIRYSGGGGGGGSGGGGSGGGGSADKTHTCPPCPAPELLGGPSVFLFPPKPKDTLMISRTPEVTCVVVDVSHEDPEVKFNWYVDGVEVHNAKTKPREEQYNNASRVVSVLTVLHQDWLNGKEYKCKVSNKALPAPIEKTISKAKGQPREPQVYTLPPSRDELTKNQVSLTCLVKGFYPSDIAVEWESNGQPENNYKTTPPVLDSDGSFFLYSKLTVDKSRWQQGNVFSCSVMHEALHNHYTQKSLSLSPGGGGSGSAHPIPDSSPLLQFGGQVRQRYLYTDDACQTEAHLEIREDGTVGGAADQSPESLLQLKALKPGVIQILGVKTSRFLCQRPDGALYGSLHFDPEACSFRELLLEDGYNVYQSEAHGLPLHLCGNKSPHRDPAPRGPARFLPLPGLPPAPPEPPGILAPQPPDVGSSDPLSMVYPSQGRSPSYAS

SEQ ID NO: 991 - protein, 472 aa, Artificial Sequence
  Fusion Protein
GHGEGTFTSDKSKQLEEEATRLFIEWLKAGGPKKIRYSGGGGGGGSGGGGSGGGGSAESKYGPPCPPCPAPEFEGGPSVFLFPPKPKDTLMISRTPEVTCVVVDVSQEDPEVQFNWYVDGVEVHNAKTKPREEQFNSTYRVVSVLTVLHQDWLNGKEYKCKVSNKGLPSSIEKTISKAKGQPREPQVYTLPPSQEEMTKNQVSLTCLVKGFYPSDIAVEWESNGQPENNYKTTPPVLDSDGSFFLYSRLTVDKSRWQEGNVFSCSVMHEALHNHYTQKSLSLSLGGGGSGSAHPIPDSSPLLQFGGQVRQRYLYTDDACQTEAHLEIREDGTVGGAADQSPESLLQLKALKPGVIQILGVKTSRFLCQRPDGALYGSLHFDPEACSFRELLLEDGYNVYQSEAHGLPLHLPGCKSPHRDPAPRGPARFLPLPGLPPAPPEPPGILAPQPPDVGSSDPLSMVGSQGRSPSYAS

SEQ ID NO: 992 - protein, 473 aa, Artificial Sequence
  Fusion Protein
GHGEGTFTSDKSKQLEEEATRLFIEWLKAGGPKKIRYSGGGGGGGSGGGGSGGGGSAESKYGPPCPPCPAPEFEGGPSVFLFPPKPKDTLMISRTPEVTCVVVDVSQEDPEVQFNWYVDGVEVHNAKTKPREEQFNSTYRVVSVLTVLHQDWLNGKEYKCKVSNKGLPSSIEKTISKAKGQPREPQVYTLPPSQEEMTKNQVSLTCLVKGFYPSDIAVEWESNGQPENNYKTTPPVLDSDGSFFLYSRLTVDKSRWQEGNVFSCSVMHEALHNHYTQKSLSLSLGGGGSGSAHPIPDSSPLLQFGGQVRQRYLYTDDACQTEAHLEIREDGTVGGAADQSPESLLQLKALKPGVIQILGVKTSRFLCQRPDGALYGSLHFDPEACSFRELLLEDGYNVYQSEAHGLPLHLPGCKSPHRDPAPRGPARFLPLPGLPPAPPEPPGILAPQPPDVGSSDPLSMVYPSQGRSPSYAS

SEQ ID NO: 993 - protein, 472 aa, Artificial Sequence
  Fusion Protein
GHGEGTFTSDKSKQLEEEATRLFIEWLKAGGPKKIRYSGGGGGGGSGGGGSGGGGSAESKYGPPCPPCPAPEFEGGPSVFLFPPKPKDTLMISRTPEVTCVVVDVSQEDPEVQFNWYVDGVEVHNAKTKPREEQFNSTYRVVSVLTVLHQDWLNGKEYKCKVSNKGLPSSIEKTISKAKGQPREPQVYTLPPSQEEMTKNQVSLTCLVKGFYPSDIAVEWESNGQPENNYKTTPPVLDSDGSFFLYSRLTVDKSRWQEGNVFSCSVMHEALHNHYTQKSLSLSLGGGGSGSAHPIPDSSPLLQFGGQVRQRYLYTDDACQTEAHLEIREDGTVGGAADQSPESLLQLKALKPGVIQILGVKTSRFLCQRPDGALYGSLHFDPEACSFRELLLEDGYNVYQSEAHGLPLHLCGNKSPHRDPAPRGPARFLPLPGLPPAPPEPPGILAPQPPDVGSSDPLSMVGSQGRSPSYAS

SEQ ID NO: 994 - protein, 473 aa, Artificial Sequence
  Fusion Protein
GHGEGTFTSDKSKQLEEEATRLFIEWLKAGGPKKIRYSGGGGGGGSGGGGSGGGGSAESKYGPPCPPCPAPEFEGGPSVFLFPPKPKDTLMISRTPEVTCVVVDVSQEDPEVQFNWYVDGVEVHNAKTKPREEQFNSTYRVVSVLTVLHQDWLNGKEYKCKVSNKGLPSSIEKTISKAKGQPREPQVYTLPPSQEEMTKNQVSLTCLVKGFYPSDIAVEWESNGQPENNYKTTPPVLDSDGSFFLYSRLTVDKSRWQEGNVFSCSVMHEALHNHYTQKSLSLSLGGGGSGSAHPIPDSSPLLQFGGQVRQRYLYTDDACQTEAHLEIREDGTVGGAADQSPESLLQLKALKPGVIQILGVKTSRFLCQRPDGALYGSLHFDPEACSFRELLLEDGYNVYQSEAHGLPLHLCGNKSPHRDPAPRGPARFLPLPGLPPAPPEPPGILAPQPPDVGSSDPLSMVYPSQGRSPSYAS

SEQ ID NO: 995 - protein, 470 aa, Artificial Sequence
  Fusion Protein
GHGEGTFTSDKSKQLEEEAGRLFIEWLKAGGPKKIRYSGGGGGGGSGGGGSGGGGSADKTHTCPPCPAPEAAGGPSVFLFPPKPKDTLMISRTPEVTCVVVDVSHEDPEVKFNWYVDGVEVHNAKTKPREEQYNSTYRVVSVLTVLHQDWLNGKEYKCKVSNKALPAPIEKTISKAKGQPREPQVYTLPPSRDELTKNQVSLTCLVKGFYPSDIAVEWESNGQPENNYKTTPPVLDSDGSFFLYSKLTVDKSRWQQGNVFSCSVMHEALHNHYTQKSLSLSPGGGGSGSAHPIPDSSPLLQFGGQVRQRYLYTDDACQTEAHLEIREDGTVGGAADQSPESLLQLKALKPGVIQILGVKTSRFLCQRPDGALYGSLHFDPEACSFRELLLEDGYNVYQSEAHGLPLHLPGCKSPHRDPAPRGPARFLPLPGLPPAPPEPPGILAPQPPDVGSSDPLSMVGSQGRSPSYAS

SEQ ID NO: 996 - protein, 471 aa, Artificial Sequence
  Fusion Protein
GHGEGTFTSDKSKQLEEEAGRLFIEWLKAGGPKKIRYSGGGGGGGSGGGGSGGGGSADKTHTCPPCPAPEAAGGPSVFLFPPKPKDTLMISRTPEVTCVVVDVSHEDPEVKFNWYVDGVEVHNAKTKPREEQYNSTYRVVSVLTVLHQDWLNGKEYKCKVSNKALPAPIEKTISKAKGQPREPQVYTLPPSRDELTKNQVSLTCLVKGFYPSDIAVEWESNGQPENNYKTTPPVLDSDGSFFLYSKLTVDKSRWQQGNVFSCSVMHEALHNHYTQKSLSLSPGGGGSGSAHPIPDSSPLLQFGGQVRQRYLYTDDACQTEAHLEIREDGTVGGAADQSPESLLQLKALKPGVIQILGVKTSRFLCQRPDGALYGSLHFDPEACSFRELLLEDGYNVYQSEAHGLPLHLPGCKSPHRDPAPRGPARFLPLPGLPPAPPEPPGILAPQPPDVGSSDPLSMVYPSQGRSPSYAS

SEQ ID NO: 997 - protein, 470 aa, Artificial Sequence
  Fusion Protein
GHGEGTFTSDKSKQLEEEAGRLFIEWLKAGGPKKIRYSGGGGGGGSGGGGSGGGGSADKTHTCPPCPAPEAAGGPSVFLFPPKPKDTLMISRTPEVTCVVVDVSHEDPEVKFNWYVDGVEVHNAKTKPREEQYNSTYRVVSVLTVLHQDWLNGKEYKCKVSNKALPAPIEKTISKAKGQPREPQVYTLPPSRDELTKNQVSLTCLVKGFYPSDIAVEWESNGQPENNYKTTPPVLDSDGSFFLYSKLTVDKSRWQQGNVFSCSVMHEALHNHYTQKSLSLSPGGGGSGSAHPIPDSSPLLQFGGQVRQRYLYTDDACQTEAHLEIREDGTVGGAADQSPESLLQLKALKPGVIQILGVKTSRFLCQRPDGALYGSLHFDPEACSFRELLLEDGYNVYQSEAHGLPLHLCGNKSPHRDPAPRGPARFLPLPGLPPAPPEPPGILAPQPPDVGSSDPLSMVGSQGRSPSYAS

SEQ ID NO: 998 - protein, 471 aa, Artificial Sequence
  Fusion Protein
GHGEGTFTSDKSKQLEEEAGRLFIEWLKAGGPKKIRYSGGGGGGGSGGGGSGGGGSADKTHTCPPCPAPEAAGGPSVFLFPPKPKDTLMISRTPEVTCVVVDVSHEDPEVKFNWYVDGVEVHNAKTKPREEQYNSTYRVVSVLTVLHQDWLNGKEYKCKVSNKALPAPIEKTISKAKGQPREPQVYTLPPSRDELTKNQVSLTCLVKGFYPSDIAVEWESNGQPENNYKTTPPVLDSDGSFFLYSKLTVDKSRWQQGNVFSCSVMHEALHNHYTQKSLSLSPGGGGSGSAHPIPDSSPLLQFGGQVRQRYLYTDDACQTEAHLEIREDGTVGGAADQSPESLLQLKALKPGVIQILGVKTSRFLCQRPDGALYGSLHFDPEACSFRELLLEDGYNVYQSEAHGLPLHLCGNKSPHRDPAPRGPARFLPLPGLPPAPPEPPGILAPQPPDVGSSDPLSMVYPSQGRSPSYAS

SEQ ID NO: 999 - protein, 470 aa, Artificial Sequence
  Fusion Protein
GHGEGTFTSDKSKQLEEEAGRLFIEWLKAGGPKKIRYSGGGGGGGSGGGGSGGGGSADKTHTCPPCPAPELLGGPSVFLFPPKPKDTLMISRTPEVTCVVVDVSHEDPEVKFNWYVDGVEVHNAKTKPREEQYNNASRVVSVLTVLHQDWLNGKEYKCKVSNKALPAPIEKTISKAKGQPREPQVYTLPPSRDELTKNQVSLTCLVKGFYPSDIAVEWESNGQPENNYKTTPPVLDSDGSFFLYSKLTVDKSRWQQGNVFSCSVMHEALHNHYTQKSLSLSPGGGGSGSAHPIPDSSPLLQFGGQVRQRYLYTDDACQTEAHLEIREDGTVGGAADQSPESLLQLKALKPGVIQILGVKTSRFLCQRPDGALYGSLHFDPEACSFRELLLEDGYNVYQSEAHGLPLHLPGCKSPHRDPAPRGPARFLPLPGLPPAPPEPPGILAPQPPDVGSSDPLSMVGSQGRSPSYAS

SEQ ID NO: 1000 - protein, 471 aa, Artificial Sequence
  Fusion Protein
GHGEGTFTSDKSKQLEEEAGRLFIEWLKAGGPKKIRYSGGGGGGGSGGGGSGGGGSADKTHTCPPCPAPELLGGPSVFLFPPKPKDTLMISRTPEVTCVVVDVSHEDPEVKFNWYVDGVEVHNAKTKPREEQYNNASRVVSVLTVLHQDWLNGKEYKCKVSNKALPAPIEKTISKAKGQPREPQVYTLPPSRDELTKNQVSLTCLVKGFYPSDIAVEWESNGQPENNYKTTPPVLDSDGSFFLYSKLTVDKSRWQQGNVFSCSVMHEALHNHYTQKSLSLSPGGGGSGSAHPIPDSSPLLQFGGQVRQRYLYTDDACQTEAHLEIREDGTVGGAADQSPESLLQLKALKPGVIQILGVKTSRFLCQRPDGALYGSLHFDPEACSFRELLLEDGYNVYQSEAHGLPLHLPGCKSPHRDPAPRGPARFLPLPGLPPAPPEPPGILAPQPPDVGSSDPLSMVYPSQGRSPSYAS

SEQ ID NO: 1001 - protein, 470 aa, Artificial Sequence
  Fusion Protein
GHGEGTFTSDKSKQLEEEAGRLFIEWLKAGGPKKIRYSGGGGGGGSGGGGSGGGGSADKTHTCPPCPAPELLGGPSVFLFPPKPKDTLMISRTPEVTCVVVDVSHEDPEVKFNWYVDGVEVHNAKTKPREEQYNNASRVVSVLTVLHQDWLNGKEYKCKVSNKALPAPIEKTISKAKGQPREPQVYTLPPSRDELTKNQVSLTCLVKGFYPSDIAVEWESNGQPENNYKTTPPVLDSDGSFFLYSKLTVDKSRWQQGNVFSCSVMHEALHNHYTQKSLSLSPGGGGSGSAHPIPDSSPLLQFGGQVRQRYLYTDDACQTEAHLEIREDGTVGGAADQSPESLLQLKALKPGVIQILGVKTSRFLCQRPDGALYGSLHFDPEACSFRELLLEDGYNVYQSEAHGLPLHLCGNKSPHRDPAPRGPARFLPLPGLPPAPPEPPGILAPQPPDVGSSDPLSMVGSQGRSPSYAS

SEQ ID NO: 1002 - protein, 471 aa, Artificial Sequence
  Fusion Protein
GHGEGTFTSDKSKQLEEEAGRLFIEWLKAGGPKKIRYSGGGGGGGSGGGGSGGGGSADKTHTCPPCPAPELLGGPSVFLFPPKPKDTLMISRTPEVTCVVVDVSHEDPEVKFNWYVDGVEVHNAKTKPREEQYNNASRVVSVLTVLHQDWLNGKEYKCKVSNKALPAPIEKTISKAKGQPREPQVYTLPPSRDELTKNQVSLTCLVKGFYPSDIAVEWESNGQPENNYKTTPPVLDSDGSFFLYSKLTVDKSRWQQGNVFSCSVMHEALHNHYTQKSLSLSPGGGGSGSAHPIPDSSPLLQFGGQVRQRYLYTDDACQTEAHLEIREDGTVGGAADQSPESLLQLKALKPGVIQILGVKTSRFLCQRPDGALYGSLHFDPEACSFRELLLEDGYNVYQSEAHGLPLHLCGNKSPHRDPAPRGPARFLPLPGLPPAPPEPPGILAPQPPDVGSSDPLSMVYPSQGRSPSYAS

SEQ ID NO: 1003 - protein, 472 aa, Artificial Sequence
  Fusion Protein
GHGEGTFTSDKSKQLEEEAGRLFIEWLKAGGPKKIRYSGGGGGGGSGGGGSGGGGSAESKYGPPCPPCPAPEFEGGPSVFLFPPKPKDTLMISRTPEVTCVVVDVSQEDPEVQFNWYVDGVEVHNAKTKPREEQFNSTYRVVSVLTVLHQDWLNGKEYKCKVSNKGLPSSIEKTISKAKGQPREPQVYTLPPSQEEMTKNQVSLTCLVKGFYPSDIAVEWESNGQPENNYKTTPPVLDSDGSFFLYSRLTVDKSRWQEGNVFSCSVMHEALHNHYTQKSLSLSLGGGGSGSAHPIPDSSPLLQFGGQVRQRYLYTDDACQTEAHLEIREDGTVGGAADQSPESLLQLKALKPGVIQILGVKTSRFLCQRPDGALYGSLHFDPEACSFRELLLEDGYNVYQSEAHGLPLHLPGCKSPHRDPAPRGPARFLPLPGLPPAPPEPPGILAPQPPDVGSSDPLSMVGSQGRSPSYAS

SEQ ID NO: 1004 - protein, 473 aa, Artificial Sequence
  Fusion Protein
GHGEGTFTSDKSKQLEEEAGRLFIEWLKAGGPKKIRYSGGGGGGGSGGGGSGGGGSAESKYGPPCPPCPAPEFEGGPSVFLFPPKPKDTLMISRTPEVTCVVVDVSQEDPEVQFNWYVDGVEVHNAKTKPREEQFNSTYRVVSVLTVLHQDWLNGKEYKCKVSNKGLPSSIEKTISKAKGQPREPQVYTLPPSQEEMTKNQVSLTCLVKGFYPSDIAVEWESNGQPENNYKTTPPVLDSDGSFFLYSRLTVDKSRWQEGNVFSCSVMHEALHNHYTQKSLSLSLGGGGSGSAHPIPDSSPLLQFGGQVRQRYLYTDDACQTEAHLEIREDGTVGGAADQSPESLLQLKALKPGVIQILGVKTSRFLCQRPDGALYGSLHFDPEACSFRELLLEDGYNVYQSEAHGLPLHLPGCKSPHRDPAPRGPARFLPLPGLPPAPPEPPGILAPQPPDVGSSDPLSMVYPSQGRSPSYAS

SEQ ID NO: 1005 - protein, 472 aa, Artificial Sequence
  Fusion Protein
GHGEGTFTSDKSKQLEEEAGRLFIEWLKAGGPKKIRYSGGGGGGGSGGGGSGGGGSAESKYGPPCPPCPAPEFEGGPSVFLFPPKPKDTLMISRTPEVTCVVVDVSQEDPEVQFNWYVDGVEVHNAKTKPREEQFNSTYRVVSVLTVLHQDWLNGKEYKCKVSNKGLPSSIEKTISKAKGQPREPQVYTLPPSQEEMTKNQVSLTCLVKGFYPSDIAVEWESNGQPENNYKTTPPVLDSDGSFFLYSRLTVDKSRWQEGNVFSCSVMHEALHNHYTQKSLSLSLGGGGSGSAHPIPDSSPLLQFGGQVRQRYLYTDDACQTEAHLEIREDGTVGGAADQSPESLLQLKALKPGVIQILGVKTSRFLCQRPDGALYGSLHFDPEACSFRELLLEDGYNVYQSEAHGLPLHLCGNKSPHRDPAPRGPARFLPLPGLPPAPPEPPGILAPQPPDVGSSDPLSMVGSQGRSPSYAS

SEQ ID NO: 1006 - protein, 473 aa, Artificial Sequence
  Fusion Protein
GHGEGTFTSDKSKQLEEEAGRLFIEWLKAGGPKKIRYSGGGGGGGSGGGGSGGGGSAESKYGPPCPPCPAPEFEGGPSVFLFPPKPKDTLMISRTPEVTCVVVDVSQEDPEVQFNWYVDGVEVHNAKTKPREEQFNSTYRVVSVLTVLHQDWLNGKEYKCKVSNKGLPSSIEKTISKAKGQPREPQVYTLPPSQEEMTKNQVSLTCLVKGFYPSDIAVEWESNGQPENNYKTTPPVLDSDGSFFLYSRLTVDKSRWQEGNVFSCSVMHEALHNHYTQKSLSLSLGGGGSGSAHPIPDSSPLLQFGGQVRQRYLYTDDACQTEAHLEIREDGTVGGAADQSPESLLQLKALKPGVIQILGVKTSRFLCQRPDGALYGSLHFDPEACSFRELLLEDGYNVYQSEAHGLPLHLCGNKSPHRDPAPRGPARFLPLPGLPPAPPEPPGILAPQPPDVGSSDPLSMVYPSQGRSPSYAS

SEQ ID NO: 1007 - protein, 470 aa, Artificial Sequence
  Fusion Protein
GHGEGTFTSDKSKQLEEEAKRLFIEWLKAGGPKKIRYSGGGGGGGSGGGGSGGGGSADKTHTCPPCPAPEAAGGPSVFLFPPKPKDTLMISRTPEVTCVVVDVSHEDPEVKFNWYVDGVEVHNAKTKPREEQYNSTYRVVSVLTVLHQDWLNGKEYKCKVSNKALPAPIEKTISKAKGQPREPQVYTLPPSRDELTKNQVSLTCLVKGFYPSDIAVEWESNGQPENNYKTTPPVLDSDGSFFLYSKLTVDKSRWQQGNVFSCSVMHEALHNHYTQKSLSLSPGGGGSGSAHPIPDSSPLLQFGGQVRQRYLYTDDACQTEAHLEIREDGTVGGAADQSPESLLQLKALKPGVIQILGVKTSRFLCQRPDGALYGSLHFDPEACSFRELLLEDGYNVYQSEAHGLPLHLPGCKSPHRDPAPRGPARFLPLPGLPPAPPEPPGILAPQPPDVGSSDPLSMVGSQGRSPSYAS

SEQ ID NO: 1008 - protein, 471 aa, Artificial Sequence
  Fusion Protein
GHGEGTFTSDKSKQLEEEAKRLFIEWLKAGGPKKIRYSGGGGGGGSGGGGSGGGGSADKTHTCPPCPAPEAAGGPSVFLFPPKPKDTLMISRTPEVTCVVVDVSHEDPEVKFNWYVDGVEVHNAKTKPREEQYNSTYRVVSVLTVLHQDWLNGKEYKCKVSNKALPAPIEKTISKAKGQPREPQVYTLPPSRDELTKNQVSLTCLVKGFYPSDIAVEWESNGQPENNYKTTPPVLDSDGSFFLYSKLTVDKSRWQQGNVFSCSVMHEALHNHYTQKSLSLSPGGGGSGSAHPIPDSSPLLQFGGQVRQRYLYTDDACQTEAHLEIREDGTVGGAADQSPESLLQLKALKPGVIQILGVKTSRFLCQRPDGALYGSLHFDPEACSFRELLLEDGYNVYQSEAHGLPLHLPGCKSPHRDPAPRGPARFLPLPGLPPAPPEPPGILAPQPPDVGSSDPLSMVYPSQGRSPSYAS

SEQ ID NO: 1009 - protein, 470 aa, Artificial Sequence
  Fusion Protein
GHGEGTFTSDKSKQLEEEAKRLFIEWLKAGGPKKIRYSGGGGGGGSGGGGSGGGGSADKTHTCPPCPAPEAAGGPSVFLFPPKPKDTLMISRTPEVTCVVVDVSHEDPEVKFNWYVDGVEVHNAKTKPREEQYNSTYRVVSVLTVLHQDWLNGKEYKCKVSNKALPAPIEKTISKAKGQPREPQVYTLPPSRDELTKNQVSLTCLVKGFYPSDIAVEWESNGQPENNYKTTPPVLDSDGSFFLYSKLTVDKSRWQQGNVFSCSVMHEALHNHYTQKSLSLSPGGGGSGSAHPIPDSSPLLQFGGQVRQRYLYTDDACQTEAHLEIREDGTVGGAADQSPESLLQLKALKPGVIQILGVKTSRFLCQRPDGALYGSLHFDPEACSFRELLLEDGYNVYQSEAHGLPLHLCGNKSPHRDPAPRGPARFLPLPGLPPAPPEPPGILAPQPPDVGSSDPLSMVGSQGRSPSYAS

SEQ ID NO: 1010 - protein, 471 aa, Artificial Sequence
  Fusion Protein
GHGEGTFTSDKSKQLEEEAKRLFIEWLKAGGPKKIRYSGGGGGGGSGGGGSGGGGSADKTHTCPPCPAPEAAGGPSVFLFPPKPKDTLMISRTPEVTCVVVDVSHEDPEVKFNWYVDGVEVHNAKTKPREEQYNSTYRVVSVLTVLHQDWLNGKEYKCKVSNKALPAPIEKTISKAKGQPREPQVYTLPPSRDELTKNQVSLTCLVKGFYPSDIAVEWESNGQPENNYKTTPPVLDSDGSFFLYSKLTVDKSRWQQGNVFSCSVMHEALHNHYTQKSLSLSPGGGGSGSAHPIPDSSPLLQFGGQVRQRYLYTDDACQTEAHLEIREDGTVGGAADQSPESLLQLKALKPGVIQILGVKTSRFLCQRPDGALYGSLHFDPEACSFRELLLEDGYNVYQSEAHGLPLHLCGNKSPHRDPAPRGPARFLPLPGLPPAPPEPPGILAPQPPDVGSSDPLSMVYPSQGRSPSYAS

SEQ ID NO: 1011 - protein, 470 aa, Artificial Sequence
  Fusion Protein
GHGEGTFTSDKSKQLEEEAKRLFIEWLKAGGPKKIRYSGGGGGGGSGGGGSGGGGSADKTHTCPPCPAPELLGGPSVFLFPPKPKDTLMISRTPEVTCVVVDVSHEDPEVKFNWYVDGVEVHNAKTKPREEQYNNASRVVSVLTVLHQDWLNGKEYKCKVSNKALPAPIEKTISKAKGQPREPQVYTLPPSRDELTKNQVSLTCLVKGFYPSDIAVEWESNGQPENNYKTTPPVLDSDGSFFLYSKLTVDKSRWQQGNVFSCSVMHEALHNHYTQKSLSLSPGGGGSGSAHPIPDSSPLLQFGGQVRQRYLYTDDACQTEAHLEIREDGTVGGAADQSPESLLQLKALKPGVIQILGVKTSRFLCQRPDGALYGSLHFDPEACSFRELLLEDGYNVYQSEAHGLPLHLPGCKSPHRDPAPRGPARFLPLPGLPPAPPEPPGILAPQPPDVGSSDPLSMVGSQGRSPSYAS

SEQ ID NO: 1012 - protein, 471 aa, Artificial Sequence
  Fusion Protein
GHGEGTFTSDKSKQLEEEAKRLFIEWLKAGGPKKIRYSGGGGGGGSGGGGSGGGGSADKTHTCPPCPAPELLGGPSVFLFPPKPKDTLMISRTPEVTCVVVDVSHEDPEVKFNWYVDGVEVHNAKTKPREEQYNNASRVVSVLTVLHQDWLNGKEYKCKVSNKALPAPIEKTISKAKGQPREPQVYTLPPSRDELTKNQVSLTCLVKGFYPSDIAVEWESNGQPENNYKTTPPVLDSDGSFFLYSKLTVDKSRWQQGNVFSCSVMHEALHNHYTQKSLSLSPGGGGSGSAHPIPDSSPLLQFGGQVRQRYLYTDDACQTEAHLEIREDGTVGGAADQSPESLLQLKALKPGVIQILGVKTSRFLCQRPDGALYGSLHFDPEACSFRELLLEDGYNVYQSEAHGLPLHLPGCKSPHRDPAPRGPARFLPLPGLPPAPPEPPGILAPQPPDVGSSDPLSMVYPSQGRSPSYAS

SEQ ID NO: 1013 - protein, 470 aa, Artificial Sequence
  Fusion Protein
GHGEGTFTSDKSKQLEEEAKRLFIEWLKAGGPKKIRYSGGGGGGGSGGGGSGGGGSADKTHTCPPCPAPELLGGPSVFLFPPKPKDTLMISRTPEVTCVVVDVSHEDPEVKFNWYVDGVEVHNAKTKPREEQYNNASRVVSVLTVLHQDWLNGKEYKCKVSNKALPAPIEKTISKAKGQPREPQVYTLPPSRDELTKNQVSLTCLVKGFYPSDIAVEWESNGQPENNYKTTPPVLDSDGSFFLYSKLTVDKSRWQQGNVFSCSVMHEALHNHYTQKSLSLSPGGGGSGSAHPIPDSSPLLQFGGQVRQRYLYTDDACQTEAHLEIREDGTVGGAADQSPESLLQLKALKPGVIQILGVKTSRFLCQRPDGALYGSLHFDPEACSFRELLLEDGYNVYQSEAHGLPLHLCGNKSPHRDPAPRGPARFLPLPGLPPAPPEPPGILAPQPPDVGSSDPLSMVGSQGRSPSYAS

SEQ ID NO: 1014 - protein, 471 aa, Artificial Sequence
  Fusion Protein
GHGEGTFTSDKSKQLEEEAKRLFIEWLKAGGPKKIRYSGGGGGGGSGGGGSGGGGSADKTHTCPPCPAPELLGGPSVFLFPPKPKDTLMISRTPEVTCVVVDVSHEDPEVKFNWYVDGVEVHNAKTKPREEQYNNASRVVSVLTVLHQDWLNGKEYKCKVSNKALPAPIEKTISKAKGQPREPQVYTLPPSRDELTKNQVSLTCLVKGFYPSDIAVEWESNGQPENNYKTTPPVLDSDGSFFLYSKLTVDKSRWQQGNVFSCSVMHEALHNHYTQKSLSLSPGGGGSGSAHPIPDSSPLLQFGGQVRQRYLYTDDACQTEAHLEIREDGTVGGAADQSPESLLQLKALKPGVIQILGVKTSRFLCQRPDGALYGSLHFDPEACSFRELLLEDGYNVYQSEAHGLPLHLCGNKSPHRDPAPRGPARFLPLPGLPPAPPEPPGILAPQPPDVGSSDPLSMVYPSQGRSPSYAS

SEQ ID NO: 1015 - protein, 472 aa, Artificial Sequence
  Fusion Protein
GHGEGTFTSDKSKQLEEEAKRLFIEWLKAGGPKKIRYSGGGGGGGSGGGGSGGGGSAESKYGPPCPPCPAPEFEGGPSVFLFPPKPKDTLMISRTPEVTCVVVDVSQEDPEVQFNWYVDGVEVHNAKTKPREEQFNSTYRVVSVLTVLHQDWLNGKEYKCKVSNKGLPSSIEKTISKAKGQPREPQVYTLPPSQEEMTKNQVSLTCLVKGFYPSDIAVEWESNGQPENNYKTTPPVLDSDGSFFLYSRLTVDKSRWQEGNVFSCSVMHEALHNHYTQKSLSLSLGGGGSGSAHPIPDSSPLLQFGGQVRQRYLYTDDACQTEAHLEIREDGTVGGAADQSPESLLQLKALKPGVIQILGVKTSRFLCQRPDGALYGSLHFDPEACSFRELLLEDGYNVYQSEAHGLPLHLPGCKSPHRDPAPRGPARFLPLPGLPPAPPEPPGILAPQPPDVGSSDPLSMVGSQGRSPSYAS

SEQ ID NO: 1016 - protein, 473 aa, Artificial Sequence
  Fusion Protein
GHGEGTFTSDKSKQLEEEAKRLFIEWLKAGGPKKIRYSGGGGGGGSGGGGSGGGGSAESKYGPPCPPCPAPEFEGGPSVFLFPPKPKDTLMISRTPEVTCVVVDVSQEDPEVQFNWYVDGVEVHNAKTKPREEQFNSTYRVVSVLTVLHQDWLNGKEYKCKVSNKGLPSSIEKTISKAKGQPREPQVYTLPPSQEEMTKNQVSLTCLVKGFYPSDIAVEWESNGQPENNYKTTPPVLDSDGSFFLYSRLTVDKSRWQEGNVFSCSVMHEALHNHYTQKSLSLSLGGGGSGSAHPIPDSSPLLQFGGQVRQRYLYTDDACQTEAHLEIREDGTVGGAADQSPESLLQLKALKPGVIQILGVKTSRFLCQRPDGALYGSLHFDPEACSFRELLLEDGYNVYQSEAHGLPLHLPGCKSPHRDPAPRGPARFLPLPGLPPAPPEPPGILAPQPPDVGSSDPLSMVYPSQGRSPSYAS

SEQ ID NO: 1017 - protein, 472 aa, Artificial Sequence
  Fusion Protein
GHGEGTFTSDKSKQLEEEAKRLFIEWLKAGGPKKIRYSGGGGGGGSGGGGSGGGGSAESKYGPPCPPCPAPEFEGGPSVFLFPPKPKDTLMISRTPEVTCVVVDVSQEDPEVQFNWYVDGVEVHNAKTKPREEQFNSTYRVVSVLTVLHQDWLNGKEYKCKVSNKGLPSSIEKTISKAKGQPREPQVYTLPPSQEEMTKNQVSLTCLVKGFYPSDIAVEWESNGQPENNYKTTPPVLDSDGSFFLYSRLTVDKSRWQEGNVFSCSVMHEALHNHYTQKSLSLSLGGGGSGSAHPIPDSSPLLQFGGQVRQRYLYTDDACQTEAHLEIREDGTVGGAADQSPESLLQLKALKPGVIQILGVKTSRFLCQRPDGALYGSLHFDPEACSFRELLLEDGYNVYQSEAHGLPLHLCGNKSPHRDPAPRGPARFLPLPGLPPAPPEPPGILAPQPPDVGSSDPLSMVGSQGRSPSYAS

SEQ ID NO: 1018 - protein, 473 aa, Artificial Sequence
  Fusion Protein
GHGEGTFTSDKSKQLEEEAKRLFIEWLKAGGPKKIRYSGGGGGGGSGGGGSGGGGSAESKYGPPCPPCPAPEFEGGPSVFLFPPKPKDTLMISRTPEVTCVVVDVSQEDPEVQFNWYVDGVEVHNAKTKPREEQFNSTYRVVSVLTVLHQDWLNGKEYKCKVSNKGLPSSIEKTISKAKGQPREPQVYTLPPSQEEMTKNQVSLTCLVKGFYPSDIAVEWESNGQPENNYKTTPPVLDSDGSFFLYSRLTVDKSRWQEGNVFSCSVMHEALHNHYTQKSLSLSLGGGGSGSAHPIPDSSPLLQFGGQVRQRYLYTDDACQTEAHLEIREDGTVGGAADQSPESLLQLKALKPGVIQILGVKTSRFLCQRPDGALYGSLHFDPEACSFRELLLEDGYNVYQSEAHGLPLHLCGNKSPHRDPAPRGPARFLPLPGLPPAPPEPPGILAPQPPDVGSSDPLSMVYPSQGRSPSYAS

SEQ ID NO: 1019 - protein, 470 aa, Artificial Sequence
  Fusion Protein
GHGEGTFTSDKSKQLEEEAHRLFIEWLKAGGPKKIRYSGGGGGGGSGGGGSGGGGSADKTHTCPPCPAPEAAGGPSVFLFPPKPKDTLMISRTPEVTCVVVDVSHEDPEVKFNWYVDGVEVHNAKTKPREEQYNSTYRVVSVLTVLHQDWLNGKEYKCKVSNKALPAPIEKTISKAKGQPREPQVYTLPPSRDELTKNQVSLTCLVKGFYPSDIAVEWESNGQPENNYKTTPPVLDSDGSFFLYSKLTVDKSRWQQGNVFSCSVMHEALHNHYTQKSLSLSPGGGGSGSAHPIPDSSPLLQFGGQVRQRYLYTDDACQTEAHLEIREDGTVGGAADQSPESLLQLKALKPGVIQILGVKTSRFLCQRPDGALYGSLHFDPEACSFRELLLEDGYNVYQSEAHGLPLHLPGCKSPHRDPAPRGPARFLPLPGLPPAPPEPPGILAPQPPDVGSSDPLSMVGSQGRSPSYAS

SEQ ID NO: 1020 - protein, 471 aa, Artificial Sequence
  Fusion Protein
GHGEGTFTSDKSKQLEEEAHRLFIEWLKAGGPKKIRYSGGGGGGGSGGGGSGGGGSADKTHTCPPCPAPEAAGGPSVFLFPPKPKDTLMISRTPEVTCVVVDVSHEDPEVKFNWYVDGVEVHNAKTKPREEQYNSTYRVVSVLTVLHQDWLNGKEYKCKVSNKALPAPIEKTISKAKGQPREPQVYTLPPSRDELTKNQVSLTCLVKGFYPSDIAVEWESNGQPENNYKTTPPVLDSDGSFFLYSKLTVDKSRWQQGNVFSCSVMHEALHNHYTQKSLSLSPGGGGSGSAHPIPDSSPLLQFGGQVRQRYLYTDDACQTEAHLEIREDGTVGGAADQSPESLLQLKALKPGVIQILGVKTSRFLCQRPDGALYGSLHFDPEACSFRELLLEDGYNVYQSEAHGLPLHLPGCKSPHRDPAPRGPARFLPLPGLPPAPPEPPGILAPQPPDVGSSDPLSMVYPSQGRSPSYAS

SEQ ID NO: 1021 - protein, 470 aa, Artificial Sequence
  Fusion Protein
GHGEGTFTSDKSKQLEEEAHRLFIEWLKAGGPKKIRYSGGGGGGGSGGGGSGGGGSADKTHTCPPCPAPEAAGGPSVFLFPPKPKDTLMISRTPEVTCVVVDVSHEDPEVKFNWYVDGVEVHNAKTKPREEQYNSTYRVVSVLTVLHQDWLNGKEYKCKVSNKALPAPIEKTISKAKGQPREPQVYTLPPSRDELTKNQVSLTCLVKGFYPSDIAVEWESNGQPENNYKTTPPVLDSDGSFFLYSKLTVDKSRWQQGNVFSCSVMHEALHNHYTQKSLSLSPGGGGSGSAHPIPDSSPLLQFGGQVRQRYLYTDDACQTEAHLEIREDGTVGGAADQSPESLLQLKALKPGVIQILGVKTSRFLCQRPDGALYGSLHFDPEACSFRELLLEDGYNVYQSEAHGLPLHLCGNKSPHRDPAPRGPARFLPLPGLPPAPPEPPGILAPQPPDVGSSDPLSMVGSQGRSPSYAS

SEQ ID NO: 1022 - protein, 471 aa, Artificial Sequence
  Fusion Protein
GHGEGTFTSDKSKQLEEEAHRLFIEWLKAGGPKKIRYSGGGGGGGSGGGGSGGGGSADKTHTCPPCPAPEAAGGPSVFLFPPKPKDTLMISRTPEVTCVVVDVSHEDPEVKFNWYVDGVEVHNAKTKPREEQYNSTYRVVSVLTVLHQDWLNGKEYKCKVSNKALPAPIEKTISKAKGQPREPQVYTLPPSRDELTKNQVSLTCLVKGFYPSDIAVEWESNGQPENNYKTTPPVLDSDGSFFLYSKLTVDKSRWQQGNVFSCSVMHEALHNHYTQKSLSLSPGGGGSGSAHPIPDSSPLLQFGGQVRQRYLYTDDACQTEAHLEIREDGTVGGAADQSPESLLQLKALKPGVIQILGVKTSRFLCQRPDGALYGSLHFDPEACSFRELLLEDGYNVYQSEAHGLPLHLCGNKSPHRDPAPRGPARFLPLPGLPPAPPEPPGILAPQPPDVGSSDPLSMVYPSQGRSPSYAS

SEQ ID NO: 1023 - protein, 470 aa, Artificial Sequence
  Fusion Protein
GHGEGTFTSDKSKQLEEEAHRLFIEWLKAGGPKKIRYSGGGGGGGSGGGGSGGGGSADKTHTCPPCPAPELLGGPSVFLFPPKPKDTLMISRTPEVTCVVVDVSHEDPEVKFNWYVDGVEVHNAKTKPREEQYNNASRVVSVLTVLHQDWLNGKEYKCKVSNKALPAPIEKTISKAKGQPREPQVYTLPPSRDELTKNQVSLTCLVKGFYPSDIAVEWESNGQPENNYKTTPPVLDSDGSFFLYSKLTVDKSRWQQGNVFSCSVMHEALHNHYTQKSLSLSPGGGGSGSAHPIPDSSPLLQFGGQVRQRYLYTDDACQTEAHLEIREDGTVGGAADQSPESLLQLKALKPGVIQILGVKTSRFLCQRPDGALYGSLHFDPEACSFRELLLEDGYNVYQSEAHGLPLHLPGCKSPHRDPAPRGPARFLPLPGLPPAPPEPPGILAPQPPDVGSSDPLSMVGSQGRSPSYAS

SEQ ID NO: 1024 - protein, 471 aa, Artificial Sequence
  Fusion Protein
GHGEGTFTSDKSKQLEEEAHRLFIEWLKAGGPKKIRYSGGGGGGGSGGGGSGGGGSADKTHTCPPCPAPELLGGPSVFLFPPKPKDTLMISRTPEVTCVVVDVSHEDPEVKFNWYVDGVEVHNAKTKPREEQYNNASRVVSVLTVLHQDWLNGKEYKCKVSNKALPAPIEKTISKAKGQPREPQVYTLPPSRDELTKNQVSLTCLVKGFYPSDIAVEWESNGQPENNYKTTPPVLDSDGSFFLYSKLTVDKSRWQQGNVFSCSVMHEALHNHYTQKSLSLSPGGGGSGSAHPIPDSSPLLQFGGQVRQRYLYTDDACQTEAHLEIREDGTVGGAADQSPESLLQLKALKPGVIQILGVKTSRFLCQRPDGALYGSLHFDPEACSFRELLLEDGYNVYQSEAHGLPLHLPGCKSPHRDPAPRGPARFLPLPGLPPAPPEPPGILAPQPPDVGSSDPLSMVYPSQGRSPSYAS

SEQ ID NO: 1025 - protein, 470 aa, Artificial Sequence
  Fusion Protein
GHGEGTFTSDKSKQLEEEAHRLFIEWLKAGGPKKIRYSGGGGGGGSGGGGSGGGGSADKTHTCPPCPAPELLGGPSVFLFPPKPKDTLMISRTPEVTCVVVDVSHEDPEVKFNWYVDGVEVHNAKTKPREEQYNNASRVVSVLTVLHQDWLNGKEYKCKVSNKALPAPIEKTISKAKGQPREPQVYTLPPSRDELTKNQVSLTCLVKGFYPSDIAVEWESNGQPENNYKTTPPVLDSDGSFFLYSKLTVDKSRWQQGNVFSCSVMHEALHNHYTQKSLSLSPGGGGSGSAHPIPDSSPLLQFGGQVRQRYLYTDDACQTEAHLEIREDGTVGGAADQSPESLLQLKALKPGVIQILGVKTSRFLCQRPDGALYGSLHFDPEACSFRELLLEDGYNVYQSEAHGLPLHLCGNKSPHRDPAPRGPARFLPLPGLPPAPPEPPGILAPQPPDVGSSDPLSMVGSQGRSPSYAS

SEQ ID NO: 1026 - protein, 471 aa, Artificial Sequence
  Fusion Protein
GHGEGTFTSDKSKQLEEEAHRLFIEWLKAGGPKKIRYSGGGGGGGSGGGGSGGGGSADKTHTCPPCPAPELLGGPSVFLFPPKPKDTLMISRTPEVTCVVVDVSHEDPEVKFNWYVDGVEVHNAKTKPREEQYNNASRVVSVLTVLHQDWLNGKEYKCKVSNKALPAPIEKTISKAKGQPREPQVYTLPPSRDELTKNQVSLTCLVKGFYPSDIAVEWESNGQPENNYKTTPPVLDSDGSFFLYSKLTVDKSRWQQGNVFSCSVMHEALHNHYTQKSLSLSPGGGGSGSAHPIPDSSPLLQFGGQVRQRYLYTDDACQTEAHLEIREDGTVGGAADQSPESLLQLKALKPGVIQILGVKTSRFLCQRPDGALYGSLHFDPEACSFRELLLEDGYNVYQSEAHGLPLHLCGNKSPHRDPAPRGPARFLPLPGLPPAPPEPPGILAPQPPDVGSSDPLSMVYPSQGRSPSYAS

SEQ ID NO: 1027 - protein, 472 aa, Artificial Sequence
  Fusion Protein
GHGEGTFTSDKSKQLEEEAHRLFIEWLKAGGPKKIRYSGGGGGGGSGGGGSGGGGSAESKYGPPCPPCPAPEFEGGPSVFLFPPKPKDTLMISRTPEVTCVVVDVSQEDPEVQFNWYVDGVEVHNAKTKPREEQFNSTYRVVSVLTVLHQDWLNGKEYKCKVSNKGLPSSIEKTISKAKGQPREPQVYTLPPSQEEMTKNQVSLTCLVKGFYPSDIAVEWESNGQPENNYKTTPPVLDSDGSFFLYSRLTVDKSRWQEGNVFSCSVMHEALHNHYTQKSLSLSLGGGGSGSAHPIPDSSPLLQFGGQVRQRYLYTDDACQTEAHLEIREDGTVGGAADQSPESLLQLKALKPGVIQILGVKTSRFLCQRPDGALYGSLHFDPEACSFRELLLEDGYNVYQSEAHGLPLHLPGCKSPHRDPAPRGPARFLPLPGLPPAPPEPPGILAPQPPDVGSSDPLSMVGSQGRSPSYAS

SEQ ID NO: 1028 - protein, 473 aa, Artificial Sequence
  Fusion Protein
GHGEGTFTSDKSKQLEEEAHRLFIEWLKAGGPKKIRYSGGGGGGGSGGGGSGGGGSAESKYGPPCPPCPAPEFEGGPSVFLFPPKPKDTLMISRTPEVTCVVVDVSQEDPEVQFNWYVDGVEVHNAKTKPREEQFNSTYRVVSVLTVLHQDWLNGKEYKCKVSNKGLPSSIEKTISKAKGQPREPQVYTLPPSQEEMTKNQVSLTCLVKGFYPSDIAVEWESNGQPENNYKTTPPVLDSDGSFFLYSRLTVDKSRWQEGNVFSCSVMHEALHNHYTQKSLSLSLGGGGSGSAHPIPDSSPLLQFGGQVRQRYLYTDDACQTEAHLEIREDGTVGGAADQSPESLLQLKALKPGVIQILGVKTSRFLCQRPDGALYGSLHFDPEACSFRELLLEDGYNVYQSEAHGLPLHLPGCKSPHRDPAPRGPARFLPLPGLPPAPPEPPGILAPQPPDVGSSDPLSMVYPSQGRSPSYAS

SEQ ID NO: 1029 - protein, 472 aa, Artificial Sequence
  Fusion Protein
GHGEGTFTSDKSKQLEEEAHRLFIEWLKAGGPKKIRYSGGGGGGGSGGGGSGGGGSAESKYGPPCPPCPAPEFEGGPSVFLFPPKPKDTLMISRTPEVTCVVVDVSQEDPEVQFNWYVDGVEVHNAKTKPREEQFNSTYRVVSVLTVLHQDWLNGKEYKCKVSNKGLPSSIEKTISKAKGQPREPQVYTLPPSQEEMTKNQVSLTCLVKGFYPSDIAVEWESNGQPENNYKTTPPVLDSDGSFFLYSRLTVDKSRWQEGNVFSCSVMHEALHNHYTQKSLSLSLGGGGSGSAHPIPDSSPLLQFGGQVRQRYLYTDDACQTEAHLEIREDGTVGGAADQSPESLLQLKALKPGVIQILGVKTSRFLCQRPDGALYGSLHFDPEACSFRELLLEDGYNVYQSEAHGLPLHLCGNKSPHRDPAPRGPARFLPLPGLPPAPPEPPGILAPQPPDVGSSDPLSMVGSQGRSPSYAS

SEQ ID NO: 1030 - protein, 473 aa, Artificial Sequence
  Fusion Protein
GHGEGTFTSDKSKQLEEEAHRLFIEWLKAGGPKKIRYSGGGGGGGSGGGGSGGGGSAESKYGPPCPPCPAPEFEGGPSVFLFPPKPKDTLMISRTPEVTCVVVDVSQEDPEVQFNWYVDGVEVHNAKTKPREEQFNSTYRVVSVLTVLHQDWLNGKEYKCKVSNKGLPSSIEKTISKAKGQPREPQVYTLPPSQEEMTKNQVSLTCLVKGFYPSDIAVEWESNGQPENNYKTTPPVLDSDGSFFLYSRLTVDKSRWQEGNVFSCSVMHEALHNHYTQKSLSLSLGGGGSGSAHPIPDSSPLLQFGGQVRQRYLYTDDACQTEAHLEIREDGTVGGAADQSPESLLQLKALKPGVIQILGVKTSRFLCQRPDGALYGSLHFDPEACSFRELLLEDGYNVYQSEAHGLPLHLCGNKSPHRDPAPRGPARFLPLPGLPPAPPEPPGILAPQPPDVGSSDPLSMVYPSQGRSPSYAS

SEQ ID NO: 1031 - protein, 470 aa, Artificial Sequence
  Fusion Protein
GHGEGTFTSDKSKQLEEEAERLFIEWLKAGGPKKIRYSGGGGGGGSGGGGSGGGGSADKTHTCPPCPAPEAAGGPSVFLFPPKPKDTLMISRTPEVTCVVVDVSHEDPEVKFNWYVDGVEVHNAKTKPREEQYNSTYRVVSVLTVLHQDWLNGKEYKCKVSNKALPAPIEKTISKAKGQPREPQVYTLPPSRDELTKNQVSLTCLVKGFYPSDIAVEWESNGQPENNYKTTPPVLDSDGSFFLYSKLTVDKSRWQQGNVFSCSVMHEALHNHYTQKSLSLSPGGGGSGSAHPIPDSSPLLQFGGQVRQRYLYTDDACQTEAHLEIREDGTVGGAADQSPESLLQLKALKPGVIQILGVKTSRFLCQRPDGALYGSLHFDPEACSFRELLLEDGYNVYQSEAHGLPLHLPGCKSPHRDPAPRGPARFLPLPGLPPAPPEPPGILAPQPPDVGSSDPLSMVGSQGRSPSYAS

SEQ ID NO: 1032 - protein, 471 aa, Artificial Sequence
  Fusion Protein
GHGEGTFTSDKSKQLEEEAERLFIEWLKAGGPKKIRYSGGGGGGGSGGGGSGGGGSADKTHTCPPCPAPEAAGGPSVFLFPPKPKDTLMISRTPEVTCVVVDVSHEDPEVKFNWYVDGVEVHNAKTKPREEQYNSTYRVVSVLTVLHQDWLNGKEYKCKVSNKALPAPIEKTISKAKGQPREPQVYTLPPSRDELTKNQVSLTCLVKGFYPSDIAVEWESNGQPENNYKTTPPVLDSDGSFFLYSKLTVDKSRWQQGNVFSCSVMHEALHNHYTQKSLSLSPGGGGSGSAHPIPDSSPLLQFGGQVRQRYLYTDDACQTEAHLEIREDGTVGGAADQSPESLLQLKALKPGVIQILGVKTSRFLCQRPDGALYGSLHFDPEACSFRELLLEDGYNVYQSEAHGLPLHLPGCKSPHRDPAPRGPARFLPLPGLPPAPPEPPGILAPQPPDVGSSDPLSMVYPSQGRSPSYAS

SEQ ID NO: 1033 - protein, 470 aa, Artificial Sequence
  Fusion Protein
GHGEGTFTSDKSKQLEEEAERLFIEWLKAGGPKKIRYSGGGGGGGSGGGGSGGGGSADKTHTCPPCPAPEAAGGPSVFLFPPKPKDTLMISRTPEVTCVVVDVSHEDPEVKFNWYVDGVEVHNAKTKPREEQYNSTYRVVSVLTVLHQDWLNGKEYKCKVSNKALPAPIEKTISKAKGQPREPQVYTLPPSRDELTKNQVSLTCLVKGFYPSDIAVEWESNGQPENNYKTTPPVLDSDGSFFLYSKLTVDKSRWQQGNVFSCSVMHEALHNHYTQKSLSLSPGGGGSGSAHPIPDSSPLLQFGGQVRQRYLYTDDACQTEAHLEIREDGTVGGAADQSPESLLQLKALKPGVIQILGVKTSRFLCQRPDGALYGSLHFDPEACSFRELLLEDGYNVYQSEAHGLPLHLCGNKSPHRDPAPRGPARFLPLPGLPPAPPEPPGILAPQPPDVGSSDPLSMVGSQGRSPSYAS

SEQ ID NO: 1034 - protein, 471 aa, Artificial Sequence
  Fusion Protein
GHGEGTFTSDKSKQLEEEAERLFIEWLKAGGPKKIRYSGGGGGGGSGGGGSGGGGSADKTHTCPPCPAPEAAGGPSVFLFPPKPKDTLMISRTPEVTCVVVDVSHEDPEVKFNWYVDGVEVHNAKTKPREEQYNSTYRVVSVLTVLHQDWLNGKEYKCKVSNKALPAPIEKTISKAKGQPREPQVYTLPPSRDELTKNQVSLTCLVKGFYPSDIAVEWESNGQPENNYKTTPPVLDSDGSFFLYSKLTVDKSRWQQGNVFSCSVMHEALHNHYTQKSLSLSPGGGGSGSAHPIPDSSPLLQFGGQVRQRYLYTDDACQTEAHLEIREDGTVGGAADQSPESLLQLKALKPGVIQILGVKTSRFLCQRPDGALYGSLHFDPEACSFRELLLEDGYNVYQSEAHGLPLHLCGNKSPHRDPAPRGPARFLPLPGLPPAPPEPPGILAPQPPDVGSSDPLSMVYPSQGRSPSYAS

SEQ ID NO: 1035 - protein, 470 aa, Artificial Sequence
  Fusion Protein
GHGEGTFTSDKSKQLEEEAERLFIEWLKAGGPKKIRYSGGGGGGGSGGGGSGGGGSADKTHTCPPCPAPELLGGPSVFLFPPKPKDTLMISRTPEVTCVVVDVSHEDPEVKFNWYVDGVEVHNAKTKPREEQYNNASRVVSVLTVLHQDWLNGKEYKCKVSNKALPAPIEKTISKAKGQPREPQVYTLPPSRDELTKNQVSLTCLVKGFYPSDIAVEWESNGQPENNYKTTPPVLDSDGSFFLYSKLTVDKSRWQQGNVFSCSVMHEALHNHYTQKSLSLSPGGGGSGSAHPIPDSSPLLQFGGQVRQRYLYTDDACQTEAHLEIREDGTVGGAADQSPESLLQLKALKPGVIQILGVKTSRFLCQRPDGALYGSLHFDPEACSFRELLLEDGYNVYQSEAHGLPLHLPGCKSPHRDPAPRGPARFLPLPGLPPAPPEPPGILAPQPPDVGSSDPLSMVGSQGRSPSYAS

SEQ ID NO: 1036 - protein, 471 aa, Artificial Sequence
  Fusion Protein
GHGEGTFTSDKSKQLEEEAERLFIEWLKAGGPKKIRYSGGGGGGGSGGGGSGGGGSADKTHTCPPCPAPELLGGPSVFLFPPKPKDTLMISRTPEVTCVVVDVSHEDPEVKFNWYVDGVEVHNAKTKPREEQYNNASRVVSVLTVLHQDWLNGKEYKCKVSNKALPAPIEKTISKAKGQPREPQVYTLPPSRDELTKNQVSLTCLVKGFYPSDIAVEWESNGQPENNYKTTPPVLDSDGSFFLYSKLTVDKSRWQQGNVFSCSVMHEALHNHYTQKSLSLSPGGGGSGSAHPIPDSSPLLQFGGQVRQRYLYTDDACQTEAHLEIREDGTVGGAADQSPESLLQLKALKPGVIQILGVKTSRFLCQRPDGALYGSLHFDPEACSFRELLLEDGYNVYQSEAHGLPLHLPGCKSPHRDPAPRGPARFLPLPGLPPAPPEPPGILAPQPPDVGSSDPLSMVYPSQGRSPSYAS

SEQ ID NO: 1037 - protein, 470 aa, Artificial Sequence
  Fusion Protein
GHGEGTFTSDKSKQLEEEAERLFIEWLKAGGPKKIRYSGGGGGGGSGGGGSGGGGSADKTHTCPPCPAPELLGGPSVFLFPPKPKDTLMISRTPEVTCVVVDVSHEDPEVKFNWYVDGVEVHNAKTKPREEQYNNASRVVSVLTVLHQDWLNGKEYKCKVSNKALPAPIEKTISKAKGQPREPQVYTLPPSRDELTKNQVSLTCLVKGFYPSDIAVEWESNGQPENNYKTTPPVLDSDGSFFLYSKLTVDKSRWQQGNVFSCSVMHEALHNHYTQKSLSLSPGGGGSGSAHPIPDSSPLLQFGGQVRQRYLYTDDACQTEAHLEIREDGTVGGAADQSPESLLQLKALKPGVIQILGVKTSRFLCQRPDGALYGSLHFDPEACSFRELLLEDGYNVYQSEAHGLPLHLCGNKSPHRDPAPRGPARFLPLPGLPPAPPEPPGILAPQPPDVGSSDPLSMVGSQGRSPSYAS

SEQ ID NO: 1038 - protein, 471 aa, Artificial Sequence
  Fusion Protein
GHGEGTFTSDKSKQLEEEAERLFIEWLKAGGPKKIRYSGGGGGGGSGGGGSGGGGSADKTHTCPPCPAPELLGGPSVFLFPPKPKDTLMISRTPEVTCVVVDVSHEDPEVKFNWYVDGVEVHNAKTKPREEQYNNASRVVSVLTVLHQDWLNGKEYKCKVSNKALPAPIEKTISKAKGQPREPQVYTLPPSRDELTKNQVSLTCLVKGFYPSDIAVEWESNGQPENNYKTTPPVLDSDGSFFLYSKLTVDKSRWQQGNVFSCSVMHEALHNHYTQKSLSLSPGGGGSGSAHPIPDSSPLLQFGGQVRQRYLYTDDACQTEAHLEIREDGTVGGAADQSPESLLQLKALKPGVIQILGVKTSRFLCQRPDGALYGSLHFDPEACSFRELLLEDGYNVYQSEAHGLPLHLCGNKSPHRDPAPRGPARFLPLPGLPPAPPEPPGILAPQPPDVGSSDPLSMVYPSQGRSPSYAS

SEQ ID NO: 1039 - protein, 472 aa, Artificial Sequence
  Fusion Protein
GHGEGTFTSDKSKQLEEEAERLFIEWLKAGGPKKIRYSGGGGGGGSGGGGSGGGGSAESKYGPPCPPCPAPEFEGGPSVFLFPPKPKDTLMISRTPEVTCVVVDVSQEDPEVQFNWYVDGVEVHNAKTKPREEQFNSTYRVVSVLTVLHQDWLNGKEYKCKVSNKGLPSSIEKTISKAKGQPREPQVYTLPPSQEEMTKNQVSLTCLVKGFYPSDIAVEWESNGQPENNYKTTPPVLDSDGSFFLYSRLTVDKSRWQEGNVFSCSVMHEALHNHYTQKSLSLSLGGGGSGSAHPIPDSSPLLQFGGQVRQRYLYTDDACQTEAHLEIREDGTVGGAADQSPESLLQLKALKPGVIQILGVKTSRFLCQRPDGALYGSLHFDPEACSFRELLLEDGYNVYQSEAHGLPLHLPGCKSPHRDPAPRGPARFLPLPGLPPAPPEPPGILAPQPPDVGSSDPLSMVGSQGRSPSYAS

SEQ ID NO: 1040 - protein, 473 aa, Artificial Sequence
  Fusion Protein
GHGEGTFTSDKSKQLEEEAERLFIEWLKAGGPKKIRYSGGGGGGGSGGGGSGGGGSAESKYGPPCPPCPAPEFEGGPSVFLFPPKPKDTLMISRTPEVTCVVVDVSQEDPEVQFNWYVDGVEVHNAKTKPREEQFNSTYRVVSVLTVLHQDWLNGKEYKCKVSNKGLPSSIEKTISKAKGQPREPQVYTLPPSQEEMTKNQVSLTCLVKGFYPSDIAVEWESNGQPENNYKTTPPVLDSDGSFFLYSRLTVDKSRWQEGNVFSCSVMHEALHNHYTQKSLSLSLGGGGSGSAHPIPDSSPLLQFGGQVRQRYLYTDDACQTEAHLEIREDGTVGGAADQSPESLLQLKALKPGVIQILGVKTSRFLCQRPDGALYGSLHFDPEACSFRELLLEDGYNVYQSEAHGLPLHLPGCKSPHRDPAPRGPARFLPLPGLPPAPPEPPGILAPQPPDVGSSDPLSMVYPSQGRSPSYAS

SEQ ID NO: 1041 - protein, 472 aa, Artificial Sequence
  Fusion Protein
GHGEGTFTSDKSKQLEEEAERLFIEWLKAGGPKKIRYSGGGGGGGSGGGGSGGGGSAESKYGPPCPPCPAPEFEGGPSVFLFPPKPKDTLMISRTPEVTCVVVDVSQEDPEVQFNWYVDGVEVHNAKTKPREEQFNSTYRVVSVLTVLHQDWLNGKEYKCKVSNKGLPSSIEKTISKAKGQPREPQVYTLPPSQEEMTKNQVSLTCLVKGFYPSDIAVEWESNGQPENNYKTTPPVLDSDGSFFLYSRLTVDKSRWQEGNVFSCSVMHEALHNHYTQKSLSLSLGGGGSGSAHPIPDSSPLLQFGGQVRQRYLYTDDACQTEAHLEIREDGTVGGAADQSPESLLQLKALKPGVIQILGVKTSRFLCQRPDGALYGSLHFDPEACSFRELLLEDGYNVYQSEAHGLPLHLCGNKSPHRDPAPRGPARFLPLPGLPPAPPEPPGILAPQPPDVGSSDPLSMVGSQGRSPSYAS

SEQ ID NO: 1042 - protein, 473 aa, Artificial Sequence
  Fusion Protein
GHGEGTFTSDKSKQLEEEAERLFIEWLKAGGPKKIRYSGGGGGGGSGGGGSGGGGSAESKYGPPCPPCPAPEFEGGPSVFLFPPKPKDTLMISRTPEVTCVVVDVSQEDPEVQFNWYVDGVEVHNAKTKPREEQFNSTYRVVSVLTVLHQDWLNGKEYKCKVSNKGLPSSIEKTISKAKGQPREPQVYTLPPSQEEMTKNQVSLTCLVKGFYPSDIAVEWESNGQPENNYKTTPPVLDSDGSFFLYSRLTVDKSRWQEGNVFSCSVMHEALHNHYTQKSLSLSLGGGGSGSAHPIPDSSPLLQFGGQVRQRYLYTDDACQTEAHLEIREDGTVGGAADQSPESLLQLKALKPGVIQILGVKTSRFLCQRPDGALYGSLHFDPEACSFRELLLEDGYNVYQSEAHGLPLHLCGNKSPHRDPAPRGPARFLPLPGLPPAPPEPPGILAPQPPDVGSSDPLSMVYPSQGRSPSYAS

SEQ ID NO: 1043 - protein, 470 aa, Artificial Sequence
  Fusion Protein
GHGEGTFTSDKSKQLEEEAVRLFIEWLKAGGPKKIRYSGGGGGGGSGGGGSGGGGSADKTHTCPPCPAPEAAGGPSVFLFPPKPKDTLMISRTPEVTCVVVDVSHEDPEVKFNWYVDGVEVHNAKTKPREEQYNSTYRVVSVLTVLHQDWLNGKEYKCKVSNKALPAPIEKTISKAKGQPREPQVYTLPPSRDELTKNQVSLTCLVKGFYPSDIAVEWESNGQPENNYKTTPPVLDSDGSFFLYSKLTVDKSRWQQGNVFSCSVMHEALHNHYTQKSLSLSPGGGGSGSAHPIPDSSPLLQFGGQVRQRYLYTDDACQTEAHLEIREDGTVGGAADQSPESLLQLKALKPGVIQILGVKTSRFLCQRPDGALYGSLHFDPEACSFRELLLEDGYNVYQSEAHGLPLHLCGNKSPHRDPAPRGPARFLPLPGLPPAPPEPPGILAPQPPDVGSSDPLSMVGSQGRSPSYAS

SEQ ID NO: 1044 - protein, 471 aa, Artificial Sequence
  Fusion Protein
GHGEGTFTSDKSKQLEEEAVRLFIEWLKAGGPKKIRYSGGGGGGGSGGGGSGGGGSADKTHTCPPCPAPEAAGGPSVFLFPPKPKDTLMISRTPEVTCVVVDVSHEDPEVKFNWYVDGVEVHNAKTKPREEQYNSTYRVVSVLTVLHQDWLNGKEYKCKVSNKALPAPIEKTISKAKGQPREPQVYTLPPSRDELTKNQVSLTCLVKGFYPSDIAVEWESNGQPENNYKTTPPVLDSDGSFFLYSKLTVDKSRWQQGNVFSCSVMHEALHNHYTQKSLSLSPGGGGSGSAHPIPDSSPLLQFGGQVRQRYLYTDDACQTEAHLEIREDGTVGGAADQSPESLLQLKALKPGVIQILGVKTSRFLCQRPDGALYGSLHFDPEACSFRELLLEDGYNVYQSEAHGLPLHLCGNKSPHRDPAPRGPARFLPLPGLPPAPPEPPGILAPQPPDVGSSDPLSMVYPSQGRSPSYAS

SEQ ID NO: 1045 - protein, 470 aa, Artificial Sequence
  Fusion Protein
GHGEGTFTSDKSKQLEEEAVRLFIEWLKAGGPKKIRYSGGGGGGGSGGGGSGGGGSADKTHTCPPCPAPELLGGPSVFLFPPKPKDTLMISRTPEVTCVVVDVSHEDPEVKFNWYVDGVEVHNAKTKPREEQYNNASRVVSVLTVLHQDWLNGKEYKCKVSNKALPAPIEKTISKAKGQPREPQVYTLPPSRDELTKNQVSLTCLVKGFYPSDIAVEWESNGQPENNYKTTPPVLDSDGSFFLYSKLTVDKSRWQQGNVFSCSVMHEALHNHYTQKSLSLSPGGGGSGSAHPIPDSSPLLQFGGQVRQRYLYTDDACQTEAHLEIREDGTVGGAADQSPESLLQLKALKPGVIQILGVKTSRFLCQRPDGALYGSLHFDPEACSFRELLLEDGYNVYQSEAHGLPLHLPGCKSPHRDPAPRGPARFLPLPGLPPAPPEPPGILAPQPPDVGSSDPLSMVGSQGRSPSYAS

SEQ ID NO: 1046 - protein, 471 aa, Artificial Sequence
  Fusion Protein
GHGEGTFTSDKSKQLEEEAVRLFIEWLKAGGPKKIRYSGGGGGGGSGGGGSGGGGSADKTHTCPPCPAPELLGGPSVFLFPPKPKDTLMISRTPEVTCVVVDVSHEDPEVKFNWYVDGVEVHNAKTKPREEQYNNASRVVSVLTVLHQDWLNGKEYKCKVSNKALPAPIEKTISKAKGQPREPQVYTLPPSRDELTKNQVSLTCLVKGFYPSDIAVEWESNGQPENNYKTTPPVLDSDGSFFLYSKLTVDKSRWQQGNVFSCSVMHEALHNHYTQKSLSLSPGGGGSGSAHPIPDSSPLLQFGGQVRQRYLYTDDACQTEAHLEIREDGTVGGAADQSPESLLQLKALKPGVIQILGVKTSRFLCQRPDGALYGSLHFDPEACSFRELLLEDGYNVYQSEAHGLPLHLPGCKSPHRDPAPRGPARFLPLPGLPPAPPEPPGILAPQPPDVGSSDPLSMVYPSQGRSPSYAS

SEQ ID NO: 1047 - protein, 470 aa, Artificial Sequence
  Fusion Protein
GHGEGTFTSDKSKQLEEEAVRLFIEWLKAGGPKKIRYSGGGGGGGSGGGGSGGGGSADKTHTCPPCPAPELLGGPSVFLFPPKPKDTLMISRTPEVTCVVVDVSHEDPEVKFNWYVDGVEVHNAKTKPREEQYNNASRVVSVLTVLHQDWLNGKEYKCKVSNKALPAPIEKTISKAKGQPREPQVYTLPPSRDELTKNQVSLTCLVKGFYPSDIAVEWESNGQPENNYKTTPPVLDSDGSFFLYSKLTVDKSRWQQGNVFSCSVMHEALHNHYTQKSLSLSPGGGGSGSAHPIPDSSPLLQFGGQVRQRYLYTDDACQTEAHLEIREDGTVGGAADQSPESLLQLKALKPGVIQILGVKTSRFLCQRPDGALYGSLHFDPEACSFRELLLEDGYNVYQSEAHGLPLHLCGNKSPHRDPAPRGPARFLPLPGLPPAPPEPPGILAPQPPDVGSSDPLSMVGSQGRSPSYAS

SEQ ID NO: 1048 - protein, 471 aa, Artificial Sequence
  Fusion Protein
GHGEGTFTSDKSKQLEEEAVRLFIEWLKAGGPKKIRYSGGGGGGGSGGGGSGGGGSADKTHTCPPCPAPELLGGPSVFLFPPKPKDTLMISRTPEVTCVVVDVSHEDPEVKFNWYVDGVEVHNAKTKPREEQYNNASRVVSVLTVLHQDWLNGKEYKCKVSNKALPAPIEKTISKAKGQPREPQVYTLPPSRDELTKNQVSLTCLVKGFYPSDIAVEWESNGQPENNYKTTPPVLDSDGSFFLYSKLTVDKSRWQQGNVFSCSVMHEALHNHYTQKSLSLSPGGGGSGSAHPIPDSSPLLQFGGQVRQRYLYTDDACQTEAHLEIREDGTVGGAADQSPESLLQLKALKPGVIQILGVKTSRFLCQRPDGALYGSLHFDPEACSFRELLLEDGYNVYQSEAHGLPLHLCGNKSPHRDPAPRGPARFLPLPGLPPAPPEPPGILAPQPPDVGSSDPLSMVYPSQGRSPSYAS

SEQ ID NO: 1049 - protein, 470 aa, Artificial Sequence
  Fusion Protein
GHGEGTFTSDKSKQLEEERVRLFIEWLKAGGPKKIRYSGGGGGGGSGGGGSGGGGSADKTHTCPPCPAPEAAGGPSVFLFPPKPKDTLMISRTPEVTCVVVDVSHEDPEVKFNWYVDGVEVHNAKTKPREEQYNSTYRVVSVLTVLHQDWLNGKEYKCKVSNKALPAPIEKTISKAKGQPREPQVYTLPPSRDELTKNQVSLTCLVKGFYPSDIAVEWESNGQPENNYKTTPPVLDSDGSFFLYSKLTVDKSRWQQGNVFSCSVMHEALHNHYTQKSLSLSPGGGGSGSAHPIPDSSPLLQFGGQVRQRYLYTDDACQTEAHLEIREDGTVGGAADQSPESLLQLKALKPGVIQILGVKTSRFLCQRPDGALYGSLHFDPEACSFRELLLEDGYNVYQSEAHGLPLHLPGCKSPHRDPAPRGPARFLPLPGLPPAPPEPPGILAPQPPDVGSSDPLSMVGSQGRSPSYAS

SEQ ID NO: 1050 - protein, 471 aa, Artificial Sequence
  Fusion Protein
GHGEGTFTSDKSKQLEEERVRLFIEWLKAGGPKKIRYSGGGGGGGSGGGGSGGGGSADKTHTCPPCPAPEAAGGPSVFLFPPKPKDTLMISRTPEVTCVVVDVSHEDPEVKFNWYVDGVEVHNAKTKPREEQYNSTYRVVSVLTVLHQDWLNGKEYKCKVSNKALPAPIEKTISKAKGQPREPQVYTLPPSRDELTKNQVSLTCLVKGFYPSDIAVEWESNGQPENNYKTTPPVLDSDGSFFLYSKLTVDKSRWQQGNVFSCSVMHEALHNHYTQKSLSLSPGGGGSGSAHPIPDSSPLLQFGGQVRQRYLYTDDACQTEAHLEIREDGTVGGAADQSPESLLQLKALKPGVIQILGVKTSRFLCQRPDGALYGSLHFDPEACSFRELLLEDGYNVYQSEAHGLPLHLPGCKSPHRDPAPRGPARFLPLPGLPPAPPEPPGILAPQPPDVGSSDPLSMVYPSQGRSPSYAS

SEQ ID NO: 1051 - protein, 470 aa, Artificial Sequence
  Fusion Protein
GHGEGTFTSDKSKQLEEERVRLFIEWLKAGGPKKIRYSGGGGGGGSGGGGSGGGGSADKTHTCPPCPAPEAAGGPSVFLFPPKPKDTLMISRTPEVTCVVVDVSHEDPEVKFNWYVDGVEVHNAKTKPREEQYNSTYRVVSVLTVLHQDWLNGKEYKCKVSNKALPAPIEKTISKAKGQPREPQVYTLPPSRDELTKNQVSLTCLVKGFYPSDIAVEWESNGQPENNYKTTPPVLDSDGSFFLYSKLTVDKSRWQQGNVFSCSVMHEALHNHYTQKSLSLSPGGGGSGSAHPIPDSSPLLQFGGQVRQRYLYTDDACQTEAHLEIREDGTVGGAADQSPESLLQLKALKPGVIQILGVKTSRFLCQRPDGALYGSLHFDPEACSFRELLLEDGYNVYQSEAHGLPLHLCGNKSPHRDPAPRGPARFLPLPGLPPAPPEPPGILAPQPPDVGSSDPLSMVGSQGRSPSYAS

SEQ ID NO: 1052 - protein, 471 aa, Artificial Sequence
  Fusion Protein
GHGEGTFTSDKSKQLEEERVRLFIEWLKAGGPKKIRYSGGGGGGGSGGGGSGGGGSADKTHTCPPCPAPEAAGGPSVFLFPPKPKDTLMISRTPEVTCVVVDVSHEDPEVKFNWYVDGVEVHNAKTKPREEQYNSTYRVVSVLTVLHQDWLNGKEYKCKVSNKALPAPIEKTISKAKGQPREPQVYTLPPSRDELTKNQVSLTCLVKGFYPSDIAVEWESNGQPENNYKTTPPVLDSDGSFFLYSKLTVDKSRWQQGNVFSCSVMHEALHNHYTQKSLSLSPGGGGSGSAHPIPDSSPLLQFGGQVRQRYLYTDDACQTEAHLEIREDGTVGGAADQSPESLLQLKALKPGVIQILGVKTSRFLCQRPDGALYGSLHFDPEACSFRELLLEDGYNVYQSEAHGLPLHLCGNKSPHRDPAPRGPARFLPLPGLPPAPPEPPGILAPQPPDVGSSDPLSMVYPSQGRSPSYAS

SEQ ID NO: 1053 - protein, 470 aa, Artificial Sequence
  Fusion Protein
GHGEGTFTSDKSKQLEEERVRLFIEWLKAGGPKKIRYSGGGGGGGSGGGGSGGGGSADKTHTCPPCPAPELLGGPSVFLFPPKPKDTLMISRTPEVTCVVVDVSHEDPEVKFNWYVDGVEVHNAKTKPREEQYNNASRVVSVLTVLHQDWLNGKEYKCKVSNKALPAPIEKTISKAKGQPREPQVYTLPPSRDELTKNQVSLTCLVKGFYPSDIAVEWESNGQPENNYKTTPPVLDSDGSFFLYSKLTVDKSRWQQGNVFSCSVMHEALHNHYTQKSLSLSPGGGGSGSAHPIPDSSPLLQFGGQVRQRYLYTDDACQTEAHLEIREDGTVGGAADQSPESLLQLKALKPGVIQILGVKTSRFLCQRPDGALYGSLHFDPEACSFRELLLEDGYNVYQSEAHGLPLHLPGCKSPHRDPAPRGPARFLPLPGLPPAPPEPPGILAPQPPDVGSSDPLSMVGSQGRSPSYAS

SEQ ID NO: 1054 - protein, 471 aa, Artificial Sequence
  Fusion Protein
GHGEGTFTSDKSKQLEEERVRLFIEWLKAGGPKKIRYSGGGGGGGSGGGGSGGGGSADKTHTCPPCPAPELLGGPSVFLFPPKPKDTLMISRTPEVTCVVVDVSHEDPEVKFNWYVDGVEVHNAKTKPREEQYNNASRVVSVLTVLHQDWLNGKEYKCKVSNKALPAPIEKTISKAKGQPREPQVYTLPPSRDELTKNQVSLTCLVKGFYPSDIAVEWESNGQPENNYKTTPPVLDSDGSFFLYSKLTVDKSRWQQGNVFSCSVMHEALHNHYTQKSLSLSPGGGGSGSAHPIPDSSPLLQFGGQVRQRYLYTDDACQTEAHLEIREDGTVGGAADQSPESLLQLKALKPGVIQILGVKTSRFLCQRPDGALYGSLHFDPEACSFRELLLEDGYNVYQSEAHGLPLHLPGCKSPHRDPAPRGPARFLPLPGLPPAPPEPPGILAPQPPDVGSSDPLSMVYPSQGRSPSYAS

SEQ ID NO: 1055 - protein, 470 aa, Artificial Sequence
  Fusion Protein
GHGEGTFTSDKSKQLEEERVRLFIEWLKAGGPKKIRYSGGGGGGGSGGGGSGGGGSADKTHTCPPCPAPELLGGPSVFLFPPKPKDTLMISRTPEVTCVVVDVSHEDPEVKFNWYVDGVEVHNAKTKPREEQYNNASRVVSVLTVLHQDWLNGKEYKCKVSNKALPAPIEKTISKAKGQPREPQVYTLPPSRDELTKNQVSLTCLVKGFYPSDIAVEWESNGQPENNYKTTPPVLDSDGSFFLYSKLTVDKSRWQQGNVFSCSVMHEALHNHYTQKSLSLSPGGGGSGSAHPIPDSSPLLQFGGQVRQRYLYTDDACQTEAHLEIREDGTVGGAADQSPESLLQLKALKPGVIQILGVKTSRFLCQRPDGALYGSLHFDPEACSFRELLLEDGYNVYQSEAHGLPLHLCGNKSPHRDPAPRGPARFLPLPGLPPAPPEPPGILAPQPPDVGSSDPLSMVGSQGRSPSYAS

SEQ ID NO: 1056 - protein, 471 aa, Artificial Sequence
  Fusion Protein
GHGEGTFTSDKSKQLEEERVRLFIEWLKAGGPKKIRYSGGGGGGGSGGGGSGGGGSADKTHTCPPCPAPELLGGPSVFLFPPKPKDTLMISRTPEVTCVVVDVSHEDPEVKFNWYVDGVEVHNAKTKPREEQYNNASRVVSVLTVLHQDWLNGKEYKCKVSNKALPAPIEKTISKAKGQPREPQVYTLPPSRDELTKNQVSLTCLVKGFYPSDIAVEWESNGQPENNYKTTPPVLDSDGSFFLYSKLTVDKSRWQQGNVFSCSVMHEALHNHYTQKSLSLSPGGGGSGSAHPIPDSSPLLQFGGQVRQRYLYTDDACQTEAHLEIREDGTVGGAADQSPESLLQLKALKPGVIQILGVKTSRFLCQRPDGALYGSLHFDPEACSFRELLLEDGYNVYQSEAHGLPLHLCGNKSPHRDPAPRGPARFLPLPGLPPAPPEPPGILAPQPPDVGSSDPLSMVYPSQGRSPSYAS

SEQ ID NO: 1057 - protein, 472 aa, Artificial Sequence
  Fusion Protein
GHGEGTFTSDKSKQLEEERVRLFIEWLKAGGPKKIRYSGGGGGGGSGGGGSGGGGSAESKYGPPCPPCPAPEFEGGPSVFLFPPKPKDTLMISRTPEVTCVVVDVSQEDPEVQFNWYVDGVEVHNAKTKPREEQFNSTYRVVSVLTVLHQDWLNGKEYKCKVSNKGLPSSIEKTISKAKGQPREPQVYTLPPSQEEMTKNQVSLTCLVKGFYPSDIAVEWESNGQPENNYKTTPPVLDSDGSFFLYSRLTVDKSRWQEGNVFSCSVMHEALHNHYTQKSLSLSLGGGGSGSAHPIPDSSPLLQFGGQVRQRYLYTDDACQTEAHLEIREDGTVGGAADQSPESLLQLKALKPGVIQILGVKTSRFLCQRPDGALYGSLHFDPEACSFRELLLEDGYNVYQSEAHGLPLHLPGCKSPHRDPAPRGPARFLPLPGLPPAPPEPPGILAPQPPDVGSSDPLSMVGSQGRSPSYAS

SEQ ID NO: 1058 - protein, 473 aa, Artificial Sequence
  Fusion Protein
GHGEGTFTSDKSKQLEEERVRLFIEWLKAGGPKKIRYSGGGGGGGSGGGGSGGGGSAESKYGPPCPPCPAPEFEGGPSVFLFPPKPKDTLMISRTPEVTCVVVDVSQEDPEVQFNWYVDGVEVHNAKTKPREEQFNSTYRVVSVLTVLHQDWLNGKEYKCKVSNKGLPSSIEKTISKAKGQPREPQVYTLPPSQEEMTKNQVSLTCLVKGFYPSDIAVEWESNGQPENNYKTTPPVLDSDGSFFLYSRLTVDKSRWQEGNVFSCSVMHEALHNHYTQKSLSLSLGGGGSGSAHPIPDSSPLLQFGGQVRQRYLYTDDACQTEAHLEIREDGTVGGAADQSPESLLQLKALKPGVIQILGVKTSRFLCQRPDGALYGSLHFDPEACSFRELLLEDGYNVYQSEAHGLPLHLPGCKSPHRDPAPRGPARFLPLPGLPPAPPEPPGILAPQPPDVGSSDPLSMVYPSQGRSPSYAS

SEQ ID NO: 1059 - protein, 472 aa, Artificial Sequence
  Fusion Protein
GHGEGTFTSDKSKQLEEERVRLFIEWLKAGGPKKIRYSGGGGGGGSGGGGSGGGGSAESKYGPPCPPCPAPEFEGGPSVFLFPPKPKDTLMISRTPEVTCVVVDVSQEDPEVQFNWYVDGVEVHNAKTKPREEQFNSTYRVVSVLTVLHQDWLNGKEYKCKVSNKGLPSSIEKTISKAKGQPREPQVYTLPPSQEEMTKNQVSLTCLVKGFYPSDIAVEWESNGQPENNYKTTPPVLDSDGSFFLYSRLTVDKSRWQEGNVFSCSVMHEALHNHYTQKSLSLSLGGGGSGSAHPIPDSSPLLQFGGQVRQRYLYTDDACQTEAHLEIREDGTVGGAADQSPESLLQLKALKPGVIQILGVKTSRFLCQRPDGALYGSLHFDPEACSFRELLLEDGYNVYQSEAHGLPLHLCGNKSPHRDPAPRGPARFLPLPGLPPAPPEPPGILAPQPPDVGSSDPLSMVGSQGRSPSYAS

SEQ ID NO: 1060 - protein, 473 aa, Artificial Sequence
  Fusion Protein
GHGEGTFTSDKSKQLEEERVRLFIEWLKAGGPKKIRYSGGGGGGGSGGGGSGGGGSAESKYGPPCPPCPAPEFEGGPSVFLFPPKPKDTLMISRTPEVTCVVVDVSQEDPEVQFNWYVDGVEVHNAKTKPREEQFNSTYRVVSVLTVLHQDWLNGKEYKCKVSNKGLPSSIEKTISKAKGQPREPQVYTLPPSQEEMTKNQVSLTCLVKGFYPSDIAVEWESNGQPENNYKTTPPVLDSDGSFFLYSRLTVDKSRWQEGNVFSCSVMHEALHNHYTQKSLSLSLGGGGSGSAHPIPDSSPLLQFGGQVRQRYLYTDDACQTEAHLEIREDGTVGGAADQSPESLLQLKALKPGVIQILGVKTSRFLCQRPDGALYGSLHFDPEACSFRELLLEDGYNVYQSEAHGLPLHLCGNKSPHRDPAPRGPARFLPLPGLPPAPPEPPGILAPQPPDVGSSDPLSMVYPSQGRSPSYAS

SEQ ID NO: 1061 - protein, 469 aa, Artificial Sequence
  Fusion Protein
HGEGTFTSDKSKQLEEERVRLFIEWLKAGGPKKIRYSGGGGGGGSGGGGSGGGGSADKTHTCPPCPAPEAAGGPSVFLFPPKPKDTLMISRTPEVTCVVVDVSHEDPEVKFNWYVDGVEVHNAKTKPREEQYNSTYRVVSVLTVLHQDWLNGKEYKCKVSNKALPAPIEKTISKAKGQPREPQVYTLPPSRDELTKNQVSLTCLVKGFYPSDIAVEWESNGQPENNYKTTPPVLDSDGSFFLYSKLTVDKSRWQQGNVFSCSVMHEALHNHYTQKSLSLSPGGGGSGSAHPIPDSSPLLQFGGQVRQRYLYTDDACQTEAHLEIREDGTVGGAADQSPESLLQLKALKPGVIQILGVKTSRFLCQRPDGALYGSLHFDPEACSFRELLLEDGYNVYQSEAHGLPLHLPGCKSPHRDPAPRGPARFLPLPGLPPAPPEPPGILAPQPPDVGSSDPLSMVGSQGRSPSYAS

SEQ ID NO: 1062 - protein, 470 aa, Artificial Sequence
  Fusion Protein
HGEGTFTSDKSKQLEEERVRLFIEWLKAGGPKKIRYSGGGGGGGSGGGGSGGGGSADKTHTCPPCPAPEAAGGPSVFLFPPKPKDTLMISRTPEVTCVVVDVSHEDPEVKFNWYVDGVEVHNAKTKPREEQYNSTYRVVSVLTVLHQDWLNGKEYKCKVSNKALPAPIEKTISKAKGQPREPQVYTLPPSRDELTKNQVSLTCLVKGFYPSDIAVEWESNGQPENNYKTTPPVLDSDGSFFLYSKLTVDKSRWQQGNVFSCSVMHEALHNHYTQKSLSLSPGGGGSGSAHPIPDSSPLLQFGGQVRQRYLYTDDACQTEAHLEIREDGTVGGAADQSPESLLQLKALKPGVIQILGVKTSRFLCQRPDGALYGSLHFDPEACSFRELLLEDGYNVYQSEAHGLPLHLPGCKSPHRDPAPRGPARFLPLPGLPPAPPEPPGILAPQPPDVGSSDPLSMVYPSQGRSPSYAS

SEQ ID NO: 1063 - protein, 469 aa, Artificial Sequence
  Fusion Protein
HGEGTFTSDKSKQLEEERVRLFIEWLKAGGPKKIRYSGGGGGGGSGGGGSGGGGSADKTHTCPPCPAPEAAGGPSVFLFPPKPKDTLMISRTPEVTCVVVDVSHEDPEVKFNWYVDGVEVHNAKTKPREEQYNSTYRVVSVLTVLHQDWLNGKEYKCKVSNKALPAPIEKTISKAKGQPREPQVYTLPPSRDELTKNQVSLTCLVKGFYPSDIAVEWESNGQPENNYKTTPPVLDSDGSFFLYSKLTVDKSRWQQGNVFSCSVMHEALHNHYTQKSLSLSPGGGGSGSAHPIPDSSPLLQFGGQVRQRYLYTDDACQTEAHLEIREDGTVGGAADQSPESLLQLKALKPGVIQILGVKTSRFLCQRPDGALYGSLHFDPEACSFRELLLEDGYNVYQSEAHGLPLHLCGNKSPHRDPAPRGPARFLPLPGLPPAPPEPPGILAPQPPDVGSSDPLSMVGSQGRSPSYAS

SEQ ID NO: 1064 - protein, 470 aa, Artificial Sequence
  Fusion Protein
HGEGTFTSDKSKQLEEERVRLFIEWLKAGGPKKIRYSGGGGGGGSGGGGSGGGGSADKTHTCPPCPAPEAAGGPSVFLFPPKPKDTLMISRTPEVTCVVVDVSHEDPEVKFNWYVDGVEVHNAKTKPREEQYNSTYRVVSVLTVLHQDWLNGKEYKCKVSNKALPAPIEKTISKAKGQPREPQVYTLPPSRDELTKNQVSLTCLVKGFYPSDIAVEWESNGQPENNYKTTPPVLDSDGSFFLYSKLTVDKSRWQQGNVFSCSVMHEALHNHYTQKSLSLSPGGGGSGSAHPIPDSSPLLQFGGQVRQRYLYTDDACQTEAHLEIREDGTVGGAADQSPESLLQLKALKPGVIQILGVKTSRFLCQRPDGALYGSLHFDPEACSFRELLLEDGYNVYQSEAHGLPLHLCGNKSPHRDPAPRGPARFLPLPGLPPAPPEPPGILAPQPPDVGSSDPLSMVYPSQGRSPSYAS

SEQ ID NO: 1065 - protein, 469 aa, Artificial Sequence
  Fusion Protein
HGEGTFTSDKSKQLEEERVRLFIEWLKAGGPKKIRYSGGGGGGGSGGGGSGGGGSADKTHTCPPCPAPELLGGPSVFLFPPKPKDTLMISRTPEVTCVVVDVSHEDPEVKFNWYVDGVEVHNAKTKPREEQYNNASRVVSVLTVLHQDWLNGKEYKCKVSNKALPAPIEKTISKAKGQPREPQVYTLPPSRDELTKNQVSLTCLVKGFYPSDIAVEWESNGQPENNYKTTPPVLDSDGSFFLYSKLTVDKSRWQQGNVFSCSVMHEALHNHYTQKSLSLSPGGGGSGSAHPIPDSSPLLQFGGQVRQRYLYTDDACQTEAHLEIREDGTVGGAADQSPESLLQLKALKPGVIQILGVKTSRFLCQRPDGALYGSLHFDPEACSFRELLLEDGYNVYQSEAHGLPLHLPGCKSPHRDPAPRGPARFLPLPGLPPAPPEPPGILAPQPPDVGSSDPLSMVGSQGRSPSYAS

SEQ ID NO: 1066 - protein, 470 aa, Artificial Sequence
  Fusion Protein
HGEGTFTSDKSKQLEEERVRLFIEWLKAGGPKKIRYSGGGGGGGSGGGGSGGGGSADKTHTCPPCPAPELLGGPSVFLFPPKPKDTLMISRTPEVTCVVVDVSHEDPEVKFNWYVDGVEVHNAKTKPREEQYNNASRVVSVLTVLHQDWLNGKEYKCKVSNKALPAPIEKTISKAKGQPREPQVYTLPPSRDELTKNQVSLTCLVKGFYPSDIAVEWESNGQPENNYKTTPPVLDSDGSFFLYSKLTVDKSRWQQGNVFSCSVMHEALHNHYTQKSLSLSPGGGGSGSAHPIPDSSPLLQFGGQVRQRYLYTDDACQTEAHLEIREDGTVGGAADQSPESLLQLKALKPGVIQILGVKTSRFLCQRPDGALYGSLHFDPEACSFRELLLEDGYNVYQSEAHGLPLHLPGCKSPHRDPAPRGPARFLPLPGLPPAPPEPPGILAPQPPDVGSSDPLSMVYPSQGRSPSYAS

SEQ ID NO: 1067 - protein, 469 aa, Artificial Sequence
  Fusion Protein
HGEGTFTSDKSKQLEEERVRLFIEWLKAGGPKKIRYSGGGGGGGSGGGGSGGGGSADKTHTCPPCPAPELLGGPSVFLFPPKPKDTLMISRTPEVTCVVVDVSHEDPEVKFNWYVDGVEVHNAKTKPREEQYNNASRVVSVLTVLHQDWLNGKEYKCKVSNKALPAPIEKTISKAKGQPREPQVYTLPPSRDELTKNQVSLTCLVKGFYPSDIAVEWESNGQPENNYKTTPPVLDSDGSFFLYSKLTVDKSRWQQGNVFSCSVMHEALHNHYTQKSLSLSPGGGGSGSAHPIPDSSPLLQFGGQVRQRYLYTDDACQTEAHLEIREDGTVGGAADQSPESLLQLKALKPGVIQILGVKTSRFLCQRPDGALYGSLHFDPEACSFRELLLEDGYNVYQSEAHGLPLHLCGNKSPHRDPAPRGPARFLPLPGLPPAPPEPPGILAPQPPDVGSSDPLSMVGSQGRSPSYAS

SEQ ID NO: 1068 - protein, 470 aa, Artificial Sequence
  Fusion Protein
HGEGTFTSDKSKQLEEERVRLFIEWLKAGGPKKIRYSGGGGGGGSGGGGSGGGGSADKTHTCPPCPAPELLGGPSVFLFPPKPKDTLMISRTPEVTCVVVDVSHEDPEVKFNWYVDGVEVHNAKTKPREEQYNNASRVVSVLTVLHQDWLNGKEYKCKVSNKALPAPIEKTISKAKGQPREPQVYTLPPSRDELTKNQVSLTCLVKGFYPSDIAVEWESNGQPENNYKTTPPVLDSDGSFFLYSKLTVDKSRWQQGNVFSCSVMHEALHNHYTQKSLSLSPGGGGSGSAHPIPDSSPLLQFGGQVRQRYLYTDDACQTEAHLEIREDGTVGGAADQSPESLLQLKALKPGVIQILGVKTSRFLCQRPDGALYGSLHFDPEACSFRELLLEDGYNVYQSEAHGLPLHLCGNKSPHRDPAPRGPARFLPLPGLPPAPPEPPGILAPQPPDVGSSDPLSMVYPSQGRSPSYAS

SEQ ID NO: 1069 - protein, 471 aa, Artificial Sequence
  Fusion Protein
HGEGTFTSDKSKQLEEERVRLFIEWLKAGGPKKIRYSGGGGGGGSGGGGSGGGGSAESKYGPPCPPCPAPEFEGGPSVFLFPPKPKDTLMISRTPEVTCVVVDVSQEDPEVQFNWYVDGVEVHNAKTKPREEQFNSTYRVVSVLTVLHQDWLNGKEYKCKVSNKGLPSSIEKTISKAKGQPREPQVYTLPPSQEEMTKNQVSLTCLVKGFYPSDIAVEWESNGQPENNYKTTPPVLDSDGSFFLYSRLTVDKSRWQEGNVFSCSVMHEALHNHYTQKSLSLSLGGGGSGSAHPIPDSSPLLQFGGQVRQRYLYTDDACQTEAHLEIREDGTVGGAADQSPESLLQLKALKPGVIQILGVKTSRFLCQRPDGALYGSLHFDPEACSFRELLLEDGYNVYQSEAHGLPLHLPGCKSPHRDPAPRGPARFLPLPGLPPAPPEPPGILAPQPPDVGSSDPLSMVGSQGRSPSYAS

SEQ ID NO: 1070 - protein, 472 aa, Artificial Sequence
  Fusion Protein
HGEGTFTSDKSKQLEEERVRLFIEWLKAGGPKKIRYSGGGGGGGSGGGGSGGGGSAESKYGPPCPPCPAPEFEGGPSVFLFPPKPKDTLMISRTPEVTCVVVDVSQEDPEVQFNWYVDGVEVHNAKTKPREEQFNSTYRVVSVLTVLHQDWLNGKEYKCKVSNKGLPSSIEKTISKAKGQPREPQVYTLPPSQEEMTKNQVSLTCLVKGFYPSDIAVEWESNGQPENNYKTTPPVLDSDGSFFLYSRLTVDKSRWQEGNVFSCSVMHEALHNHYTQKSLSLSLGGGGSGSAHPIPDSSPLLQFGGQVRQRYLYTDDACQTEAHLEIREDGTVGGAADQSPESLLQLKALKPGVIQILGVKTSRFLCQRPDGALYGSLHFDPEACSFRELLLEDGYNVYQSEAHGLPLHLPGCKSPHRDPAPRGPARFLPLPGLPPAPPEPPGILAPQPPDVGSSDPLSMVYPSQGRSPSYAS

SEQ ID NO: 1071 - protein, 471 aa, Artificial Sequence
  Fusion Protein
HGEGTFTSDKSKQLEEERVRLFIEWLKAGGPKKIRYSGGGGGGGSGGGGSGGGGSAESKYGPPCPPCPAPEFEGGPSVFLFPPKPKDTLMISRTPEVTCVVVDVSQEDPEVQFNWYVDGVEVHNAKTKPREEQFNSTYRVVSVLTVLHQDWLNGKEYKCKVSNKGLPSSIEKTISKAKGQPREPQVYTLPPSQEEMTKNQVSLTCLVKGFYPSDIAVEWESNGQPENNYKTTPPVLDSDGSFFLYSRLTVDKSRWQEGNVFSCSVMHEALHNHYTQKSLSLSLGGGGSGSAHPIPDSSPLLQFGGQVRQRYLYTDDACQTEAHLEIREDGTVGGAADQSPESLLQLKALKPGVIQILGVKTSRFLCQRPDGALYGSLHFDPEACSFRELLLEDGYNVYQSEAHGLPLHLCGNKSPHRDPAPRGPARFLPLPGLPPAPPEPPGILAPQPPDVGSSDPLSMVGSQGRSPSYAS

SEQ ID NO: 1072 - protein, 472 aa, Artificial Sequence
  Fusion Protein
HGEGTFTSDKSKQLEEERVRLFIEWLKAGGPKKIRYSGGGGGGGSGGGGSGGGGSAESKYGPPCPPCPAPEFEGGPSVFLFPPKPKDTLMISRTPEVTCVVVDVSQEDPEVQFNWYVDGVEVHNAKTKPREEQFNSTYRVVSVLTVLHQDWLNGKEYKCKVSNKGLPSSIEKTISKAKGQPREPQVYTLPPSQEEMTKNQVSLTCLVKGFYPSDIAVEWESNGQPENNYKTTPPVLDSDGSFFLYSRLTVDKSRWQEGNVFSCSVMHEALHNHYTQKSLSLSLGGGGSGSAHPIPDSSPLLQFGGQVRQRYLYTDDACQTEAHLEIREDGTVGGAADQSPESLLQLKALKPGVIQILGVKTSRFLCQRPDGALYGSLHFDPEACSFRELLLEDGYNVYQSEAHGLPLHLCGNKSPHRDPAPRGPARFLPLPGLPPAPPEPPGILAPQPPDVGSSDPLSMVYPSQGRSPSYAS

SEQ ID NO: 1073 - protein, 470 aa, Artificial Sequence
  Fusion Protein
GHGEGTFTSDKSKQLEEERVQLFIEWLKAGGPKKIRYSGGGGGGGSGGGGSGGGGSADKTHTCPPCPAPEAAGGPSVFLFPPKPKDTLMISRTPEVTCVVVDVSHEDPEVKFNWYVDGVEVHNAKTKPREEQYNSTYRVVSVLTVLHQDWLNGKEYKCKVSNKALPAPIEKTISKAKGQPREPQVYTLPPSRDELTKNQVSLTCLVKGFYPSDIAVEWESNGQPENNYKTTPPVLDSDGSFFLYSKLTVDKSRWQQGNVFSCSVMHEALHNHYTQKSLSLSPGGGGSGSAHPIPDSSPLLQFGGQVRQRYLYTDDACQTEAHLEIREDGTVGGAADQSPESLLQLKALKPGVIQILGVKTSRFLCQRPDGALYGSLHFDPEACSFRELLLEDGYNVYQSEAHGLPLHLPGCKSPHRDPAPRGPARFLPLPGLPPAPPEPPGILAPQPPDVGSSDPLSMVGSQGRSPSYAS

SEQ ID NO: 1074 - protein, 471 aa, Artificial Sequence
  Fusion Protein
GHGEGTFTSDKSKQLEEERVQLFIEWLKAGGPKKIRYSGGGGGGGSGGGGSGGGGSADKTHTCPPCPAPEAAGGPSVFLFPPKPKDTLMISRTPEVTCVVVDVSHEDPEVKFNWYVDGVEVHNAKTKPREEQYNSTYRVVSVLTVLHQDWLNGKEYKCKVSNKALPAPIEKTISKAKGQPREPQVYTLPPSRDELTKNQVSLTCLVKGFYPSDIAVEWESNGQPENNYKTTPPVLDSDGSFFLYSKLTVDKSRWQQGNVFSCSVMHEALHNHYTQKSLSLSPGGGGSGSAHPIPDSSPLLQFGGQVRQRYLYTDDACQTEAHLEIREDGTVGGAADQSPESLLQLKALKPGVIQILGVKTSRFLCQRPDGALYGSLHFDPEACSFRELLLEDGYNVYQSEAHGLPLHLPGCKSPHRDPAPRGPARFLPLPGLPPAPPEPPGILAPQPPDVGSSDPLSMVYPSQGRSPSYAS

SEQ ID NO: 1075 - protein, 470 aa, Artificial Sequence
  Fusion Protein
GHGEGTFTSDKSKQLEEERVQLFIEWLKAGGPKKIRYSGGGGGGGSGGGGSGGGGSADKTHTCPPCPAPEAAGGPSVFLFPPKPKDTLMISRTPEVTCVVVDVSHEDPEVKFNWYVDGVEVHNAKTKPREEQYNSTYRVVSVLTVLHQDWLNGKEYKCKVSNKALPAPIEKTISKAKGQPREPQVYTLPPSRDELTKNQVSLTCLVKGFYPSDIAVEWESNGQPENNYKTTPPVLDSDGSFFLYSKLTVDKSRWQQGNVFSCSVMHEALHNHYTQKSLSLSPGGGGSGSAHPIPDSSPLLQFGGQVRQRYLYTDDACQTEAHLEIREDGTVGGAADQSPESLLQLKALKPGVIQILGVKTSRFLCQRPDGALYGSLHFDPEACSFRELLLEDGYNVYQSEAHGLPLHLCGNKSPHRDPAPRGPARFLPLPGLPPAPPEPPGILAPQPPDVGSSDPLSMVGSQGRSPSYAS

SEQ ID NO: 1076 - protein, 471 aa, Artificial Sequence
  Fusion Protein
GHGEGTFTSDKSKQLEEERVQLFIEWLKAGGPKKIRYSGGGGGGGSGGGGSGGGGSADKTHTCPPCPAPEAAGGPSVFLFPPKPKDTLMISRTPEVTCVVVDVSHEDPEVKFNWYVDGVEVHNAKTKPREEQYNSTYRVVSVLTVLHQDWLNGKEYKCKVSNKALPAPIEKTISKAKGQPREPQVYTLPPSRDELTKNQVSLTCLVKGFYPSDIAVEWESNGQPENNYKTTPPVLDSDGSFFLYSKLTVDKSRWQQGNVFSCSVMHEALHNHYTQKSLSLSPGGGGSGSAHPIPDSSPLLQFGGQVRQRYLYTDDACQTEAHLEIREDGTVGGAADQSPESLLQLKALKPGVIQILGVKTSRFLCQRPDGALYGSLHFDPEACSFRELLLEDGYNVYQSEAHGLPLHLCGNKSPHRDPAPRGPARFLPLPGLPPAPPEPPGILAPQPPDVGSSDPLSMVYPSQGRSPSYAS

SEQ ID NO: 1077 - protein, 470 aa, Artificial Sequence
  Fusion Protein
GHGEGTFTSDKSKQLEEERVQLFIEWLKAGGPKKIRYSGGGGGGGSGGGGSGGGGSADKTHTCPPCPAPELLGGPSVFLFPPKPKDTLMISRTPEVTCVVVDVSHEDPEVKFNWYVDGVEVHNAKTKPREEQYNNASRVVSVLTVLHQDWLNGKEYKCKVSNKALPAPIEKTISKAKGQPREPQVYTLPPSRDELTKNQVSLTCLVKGFYPSDIAVEWESNGQPENNYKTTPPVLDSDGSFFLYSKLTVDKSRWQQGNVFSCSVMHEALHNHYTQKSLSLSPGGGGSGSAHPIPDSSPLLQFGGQVRQRYLYTDDACQTEAHLEIREDGTVGGAADQSPESLLQLKALKPGVIQILGVKTSRFLCQRPDGALYGSLHFDPEACSFRELLLEDGYNVYQSEAHGLPLHLPGCKSPHRDPAPRGPARFLPLPGLPPAPPEPPGILAPQPPDVGSSDPLSMVGSQGRSPSYAS

SEQ ID NO: 1078 - protein, 471 aa, Artificial Sequence
  Fusion Protein
GHGEGTFTSDKSKQLEEERVQLFIEWLKAGGPKKIRYSGGGGGGGSGGGGSGGGGSADKTHTCPPCPAPELLGGPSVFLFPPKPKDTLMISRTPEVTCVVVDVSHEDPEVKFNWYVDGVEVHNAKTKPREEQYNNASRVVSVLTVLHQDWLNGKEYKCKVSNKALPAPIEKTISKAKGQPREPQVYTLPPSRDELTKNQVSLTCLVKGFYPSDIAVEWESNGQPENNYKTTPPVLDSDGSFFLYSKLTVDKSRWQQGNVFSCSVMHEALHNHYTQKSLSLSPGGGGSGSAHPIPDSSPLLQFGGQVRQRYLYTDDACQTEAHLEIREDGTVGGAADQSPESLLQLKALKPGVIQILGVKTSRFLCQRPDGALYGSLHFDPEACSFRELLLEDGYNVYQSEAHGLPLHLPGCKSPHRDPAPRGPARFLPLPGLPPAPPEPPGILAPQPPDVGSSDPLSMVYPSQGRSPSYAS

SEQ ID NO: 1079 - protein, 470 aa, Artificial Sequence
  Fusion Protein
GHGEGTFTSDKSKQLEEERVQLFIEWLKAGGPKKIRYSGGGGGGGSGGGGSGGGGSADKTHTCPPCPAPELLGGPSVFLFPPKPKDTLMISRTPEVTCVVVDVSHEDPEVKFNWYVDGVEVHNAKTKPREEQYNNASRVVSVLTVLHQDWLNGKEYKCKVSNKALPAPIEKTISKAKGQPREPQVYTLPPSRDELTKNQVSLTCLVKGFYPSDIAVEWESNGQPENNYKTTPPVLDSDGSFFLYSKLTVDKSRWQQGNVFSCSVMHEALHNHYTQKSLSLSPGGGGSGSAHPIPDSSPLLQFGGQVRQRYLYTDDACQTEAHLEIREDGTVGGAADQSPESLLQLKALKPGVIQILGVKTSRFLCQRPDGALYGSLHFDPEACSFRELLLEDGYNVYQSEAHGLPLHLCGNKSPHRDPAPRGPARFLPLPGLPPAPPEPPGILAPQPPDVGSSDPLSMVGSQGRSPSYAS

SEQ ID NO: 1080 - protein, 471 aa, Artificial Sequence
  Fusion Protein
GHGEGTFTSDKSKQLEEERVQLFIEWLKAGGPKKIRYSGGGGGGGSGGGGSGGGGSADKTHTCPPCPAPELLGGPSVFLFPPKPKDTLMISRTPEVTCVVVDVSHEDPEVKFNWYVDGVEVHNAKTKPREEQYNNASRVVSVLTVLHQDWLNGKEYKCKVSNKALPAPIEKTISKAKGQPREPQVYTLPPSRDELTKNQVSLTCLVKGFYPSDIAVEWESNGQPENNYKTTPPVLDSDGSFFLYSKLTVDKSRWQQGNVFSCSVMHEALHNHYTQKSLSLSPGGGGSGSAHPIPDSSPLLQFGGQVRQRYLYTDDACQTEAHLEIREDGTVGGAADQSPESLLQLKALKPGVIQILGVKTSRFLCQRPDGALYGSLHFDPEACSFRELLLEDGYNVYQSEAHGLPLHLCGNKSPHRDPAPRGPARFLPLPGLPPAPPEPPGILAPQPPDVGSSDPLSMVYPSQGRSPSYAS

SEQ ID NO: 1081 - protein, 472 aa, Artificial Sequence
  Fusion Protein
GHGEGTFTSDKSKQLEEERVQLFIEWLKAGGPKKIRYSGGGGGGGSGGGGSGGGGSAESKYGPPCPPCPAPEFEGGPSVFLFPPKPKDTLMISRTPEVTCVVVDVSQEDPEVQFNWYVDGVEVHNAKTKPREEQFNSTYRVVSVLTVLHQDWLNGKEYKCKVSNKGLPSSIEKTISKAKGQPREPQVYTLPPSQEEMTKNQVSLTCLVKGFYPSDIAVEWESNGQPENNYKTTPPVLDSDGSFFLYSRLTVDKSRWQEGNVFSCSVMHEALHNHYTQKSLSLSLGGGGSGSAHPIPDSSPLLQFGGQVRQRYLYTDDACQTEAHLEIREDGTVGGAADQSPESLLQLKALKPGVIQILGVKTSRFLCQRPDGALYGSLHFDPEACSFRELLLEDGYNVYQSEAHGLPLHLPGCKSPHRDPAPRGPARFLPLPGLPPAPPEPPGILAPQPPDVGSSDPLSMVGSQGRSPSYAS

SEQ ID NO: 1082 - protein, 473 aa, Artificial Sequence
  Fusion Protein
GHGEGTFTSDKSKQLEEERVQLFIEWLKAGGPKKIRYSGGGGGGGSGGGGSGGGGSAESKYGPPCPPCPAPEFEGGPSVFLFPPKPKDTLMISRTPEVTCVVVDVSQEDPEVQFNWYVDGVEVHNAKTKPREEQFNSTYRVVSVLTVLHQDWLNGKEYKCKVSNKGLPSSIEKTISKAKGQPREPQVYTLPPSQEEMTKNQVSLTCLVKGFYPSDIAVEWESNGQPENNYKTTPPVLDSDGSFFLYSRLTVDKSRWQEGNVFSCSVMHEALHNHYTQKSLSLSLGGGGSGSAHPIPDSSPLLQFGGQVRQRYLYTDDACQTEAHLEIREDGTVGGAADQSPESLLQLKALKPGVIQILGVKTSRFLCQRPDGALYGSLHFDPEACSFRELLLEDGYNVYQSEAHGLPLHLPGCKSPHRDPAPRGPARFLPLPGLPPAPPEPPGILAPQPPDVGSSDPLSMVYPSQGRSPSYAS

SEQ ID NO: 1083 - protein, 472 aa, Artificial Sequence
  Fusion Protein
GHGEGTFTSDKSKQLEEERVQLFIEWLKAGGPKKIRYSGGGGGGGSGGGGSGGGGSAESKYGPPCPPCPAPEFEGGPSVFLFPPKPKDTLMISRTPEVTCVVVDVSQEDPEVQFNWYVDGVEVHNAKTKPREEQFNSTYRVVSVLTVLHQDWLNGKEYKCKVSNKGLPSSIEKTISKAKGQPREPQVYTLPPSQEEMTKNQVSLTCLVKGFYPSDIAVEWESNGQPENNYKTTPPVLDSDGSFFLYSRLTVDKSRWQEGNVFSCSVMHEALHNHYTQKSLSLSLGGGGSGSAHPIPDSSPLLQFGGQVRQRYLYTDDACQTEAHLEIREDGTVGGAADQSPESLLQLKALKPGVIQILGVKTSRFLCQRPDGALYGSLHFDPEACSFRELLLEDGYNVYQSEAHGLPLHLCGNKSPHRDPAPRGPARFLPLPGLPPAPPEPPGILAPQPPDVGSSDPLSMVGSQGRSPSYAS

SEQ ID NO: 1084 - protein, 473 aa, Artificial Sequence
  Fusion Protein
GHGEGTFTSDKSKQLEEERVQLFIEWLKAGGPKKIRYSGGGGGGGSGGGGSGGGGSAESKYGPPCPPCPAPEFEGGPSVFLFPPKPKDTLMISRTPEVTCVVVDVSQEDPEVQFNWYVDGVEVHNAKTKPREEQFNSTYRVVSVLTVLHQDWLNGKEYKCKVSNKGLPSSIEKTISKAKGQPREPQVYTLPPSQEEMTKNQVSLTCLVKGFYPSDIAVEWESNGQPENNYKTTPPVLDSDGSFFLYSRLTVDKSRWQEGNVFSCSVMHEALHNHYTQKSLSLSLGGGGSGSAHPIPDSSPLLQFGGQVRQRYLYTDDACQTEAHLEIREDGTVGGAADQSPESLLQLKALKPGVIQILGVKTSRFLCQRPDGALYGSLHFDPEACSFRELLLEDGYNVYQSEAHGLPLHLCGNKSPHRDPAPRGPARFLPLPGLPPAPPEPPGILAPQPPDVGSSDPLSMVYPSQGRSPSYAS

SEQ ID NO: 1085 - protein, 469 aa, Artificial Sequence
  Fusion Protein
HGEGTFTSDKSKQLEEERVQLFIEWLKAGGPKKIRYSGGGGGGGSGGGGSGGGGSADKTHTCPPCPAPEAAGGPSVFLFPPKPKDTLMISRTPEVTCVVVDVSHEDPEVKFNWYVDGVEVHNAKTKPREEQYNSTYRVVSVLTVLHQDWLNGKEYKCKVSNKALPAPIEKTISKAKGQPREPQVYTLPPSRDELTKNQVSLTCLVKGFYPSDIAVEWESNGQPENNYKTTPPVLDSDGSFFLYSKLTVDKSRWQQGNVFSCSVMHEALHNHYTQKSLSLSPGGGGSGSAHPIPDSSPLLQFGGQVRQRYLYTDDACQTEAHLEIREDGTVGGAADQSPESLLQLKALKPGVIQILGVKTSRFLCQRPDGALYGSLHFDPEACSFRELLLEDGYNVYQSEAHGLPLHLPGCKSPHRDPAPRGPARFLPLPGLPPAPPEPPGILAPQPPDVGSSDPLSMVGSQGRSPSYAS

SEQ ID NO: 1086 - protein, 470 aa, Artificial Sequence
  Fusion Protein
HGEGTFTSDKSKQLEEERVQLFIEWLKAGGPKKIRYSGGGGGGGSGGGGSGGGGSADKTHTCPPCPAPEAAGGPSVFLFPPKPKDTLMISRTPEVTCVVVDVSHEDPEVKFNWYVDGVEVHNAKTKPREEQYNSTYRVVSVLTVLHQDWLNGKEYKCKVSNKALPAPIEKTISKAKGQPREPQVYTLPPSRDELTKNQVSLTCLVKGFYPSDIAVEWESNGQPENNYKTTPPVLDSDGSFFLYSKLTVDKSRWQQGNVFSCSVMHEALHNHYTQKSLSLSPGGGGSGSAHPIPDSSPLLQFGGQVRQRYLYTDDACQTEAHLEIREDGTVGGAADQSPESLLQLKALKPGVIQILGVKTSRFLCQRPDGALYGSLHFDPEACSFRELLLEDGYNVYQSEAHGLPLHLPGCKSPHRDPAPRGPARFLPLPGLPPAPPEPPGILAPQPPDVGSSDPLSMVYPSQGRSPSYAS

SEQ ID NO: 1087 - protein, 469 aa, Artificial Sequence
  Fusion Protein
HGEGTFTSDKSKQLEEERVQLFIEWLKAGGPKKIRYSGGGGGGGSGGGGSGGGGSADKTHTCPPCPAPEAAGGPSVFLFPPKPKDTLMISRTPEVTCVVVDVSHEDPEVKFNWYVDGVEVHNAKTKPREEQYNSTYRVVSVLTVLHQDWLNGKEYKCKVSNKALPAPIEKTISKAKGQPREPQVYTLPPSRDELTKNQVSLTCLVKGFYPSDIAVEWESNGQPENNYKTTPPVLDSDGSFFLYSKLTVDKSRWQQGNVFSCSVMHEALHNHYTQKSLSLSPGGGGSGSAHPIPDSSPLLQFGGQVRQRYLYTDDACQTEAHLEIREDGTVGGAADQSPESLLQLKALKPGVIQILGVKTSRFLCQRPDGALYGSLHFDPEACSFRELLLEDGYNVYQSEAHGLPLHLCGNKSPHRDPAPRGPARFLPLPGLPPAPPEPPGILAPQPPDVGSSDPLSMVGSQGRSPSYAS

SEQ ID NO: 1088 - protein, 470 aa, Artificial Sequence
  Fusion Protein
HGEGTFTSDKSKQLEEERVQLFIEWLKAGGPKKIRYSGGGGGGGSGGGGSGGGGSADKTHTCPPCPAPEAAGGPSVFLFPPKPKDTLMISRTPEVTCVVVDVSHEDPEVKFNWYVDGVEVHNAKTKPREEQYNSTYRVVSVLTVLHQDWLNGKEYKCKVSNKALPAPIEKTISKAKGQPREPQVYTLPPSRDELTKNQVSLTCLVKGFYPSDIAVEWESNGQPENNYKTTPPVLDSDGSFFLYSKLTVDKSRWQQGNVFSCSVMHEALHNHYTQKSLSLSPGGGGSGSAHPIPDSSPLLQFGGQVRQRYLYTDDACQTEAHLEIREDGTVGGAADQSPESLLQLKALKPGVIQILGVKTSRFLCQRPDGALYGSLHFDPEACSFRELLLEDGYNVYQSEAHGLPLHLCGNKSPHRDPAPRGPARFLPLPGLPPAPPEPPGILAPQPPDVGSSDPLSMVYPSQGRSPSYAS

SEQ ID NO: 1089 - protein, 469 aa, Artificial Sequence
  Fusion Protein
HGEGTFTSDKSKQLEEERVQLFIEWLKAGGPKKIRYSGGGGGGGSGGGGSGGGGSADKTHTCPPCPAPELLGGPSVFLFPPKPKDTLMISRTPEVTCVVVDVSHEDPEVKFNWYVDGVEVHNAKTKPREEQYNNASRVVSVLTVLHQDWLNGKEYKCKVSNKALPAPIEKTISKAKGQPREPQVYTLPPSRDELTKNQVSLTCLVKGFYPSDIAVEWESNGQPENNYKTTPPVLDSDGSFFLYSKLTVDKSRWQQGNVFSCSVMHEALHNHYTQKSLSLSPGGGGSGSAHPIPDSSPLLQFGGQVRQRYLYTDDACQTEAHLEIREDGTVGGAADQSPESLLQLKALKPGVIQILGVKTSRFLCQRPDGALYGSLHFDPEACSFRELLLEDGYNVYQSEAHGLPLHLPGCKSPHRDPAPRGPARFLPLPGLPPAPPEPPGILAPQPPDVGSSDPLSMVGSQGRSPSYAS

SEQ ID NO: 1090 - protein, 470 aa, Artificial Sequence
  Fusion Protein
HGEGTFTSDKSKQLEEERVQLFIEWLKAGGPKKIRYSGGGGGGGSGGGGSGGGGSADKTHTCPPCPAPELLGGPSVFLFPPKPKDTLMISRTPEVTCVVVDVSHEDPEVKFNWYVDGVEVHNAKTKPREEQYNNASRVVSVLTVLHQDWLNGKEYKCKVSNKALPAPIEKTISKAKGQPREPQVYTLPPSRDELTKNQVSLTCLVKGFYPSDIAVEWESNGQPENNYKTTPPVLDSDGSFFLYSKLTVDKSRWQQGNVFSCSVMHEALHNHYTQKSLSLSPGGGGSGSAHPIPDSSPLLQFGGQVRQRYLYTDDACQTEAHLEIREDGTVGGAADQSPESLLQLKALKPGVIQILGVKTSRFLCQRPDGALYGSLHFDPEACSFRELLLEDGYNVYQSEAHGLPLHLPGCKSPHRDPAPRGPARFLPLPGLPPAPPEPPGILAPQPPDVGSSDPLSMVYPSQGRSPSYAS

SEQ ID NO: 1091 - protein, 469 aa, Artificial Sequence
  Fusion Protein
HGEGTFTSDKSKQLEEERVQLFIEWLKAGGPKKIRYSGGGGGGGSGGGGSGGGGSADKTHTCPPCPAPELLGGPSVFLFPPKPKDTLMISRTPEVTCVVVDVSHEDPEVKFNWYVDGVEVHNAKTKPREEQYNNASRVVSVLTVLHQDWLNGKEYKCKVSNKALPAPIEKTISKAKGQPREPQVYTLPPSRDELTKNQVSLTCLVKGFYPSDIAVEWESNGQPENNYKTTPPVLDSDGSFFLYSKLTVDKSRWQQGNVFSCSVMHEALHNHYTQKSLSLSPGGGGSGSAHPIPDSSPLLQFGGQVRQRYLYTDDACQTEAHLEIREDGTVGGAADQSPESLLQLKALKPGVIQILGVKTSRFLCQRPDGALYGSLHFDPEACSFRELLLEDGYNVYQSEAHGLPLHLCGNKSPHRDPAPRGPARFLPLPGLPPAPPEPPGILAPQPPDVGSSDPLSMVGSQGRSPSYAS

SEQ ID NO: 1092 - protein, 470 aa, Artificial Sequence
  Fusion Protein
HGEGTFTSDKSKQLEEERVQLFIEWLKAGGPKKIRYSGGGGGGGSGGGGSGGGGSADKTHTCPPCPAPELLGGPSVFLFPPKPKDTLMISRTPEVTCVVVDVSHEDPEVKFNWYVDGVEVHNAKTKPREEQYNNASRVVSVLTVLHQDWLNGKEYKCKVSNKALPAPIEKTISKAKGQPREPQVYTLPPSRDELTKNQVSLTCLVKGFYPSDIAVEWESNGQPENNYKTTPPVLDSDGSFFLYSKLTVDKSRWQQGNVFSCSVMHEALHNHYTQKSLSLSPGGGGSGSAHPIPDSSPLLQFGGQVRQRYLYTDDACQTEAHLEIREDGTVGGAADQSPESLLQLKALKPGVIQILGVKTSRFLCQRPDGALYGSLHFDPEACSFRELLLEDGYNVYQSEAHGLPLHLCGNKSPHRDPAPRGPARFLPLPGLPPAPPEPPGILAPQPPDVGSSDPLSMVYPSQGRSPSYAS

SEQ ID NO: 1093 - protein, 471 aa, Artificial Sequence
  Fusion Protein
HGEGTFTSDKSKQLEEERVQLFIEWLKAGGPKKIRYSGGGGGGGSGGGGSGGGGSAESKYGPPCPPCPAPEFEGGPSVFLFPPKPKDTLMISRTPEVTCVVVDVSQEDPEVQFNWYVDGVEVHNAKTKPREEQFNSTYRVVSVLTVLHQDWLNGKEYKCKVSNKGLPSSIEKTISKAKGQPREPQVYTLPPSQEEMTKNQVSLTCLVKGFYPSDIAVEWESNGQPENNYKTTPPVLDSDGSFFLYSRLTVDKSRWQEGNVFSCSVMHEALHNHYTQKSLSLSLGGGGSGSAHPIPDSSPLLQFGGQVRQRYLYTDDACQTEAHLEIREDGTVGGAADQSPESLLQLKALKPGVIQILGVKTSRFLCQRPDGALYGSLHFDPEACSFRELLLEDGYNVYQSEAHGLPLHLPGCKSPHRDPAPRGPARFLPLPGLPPAPPEPPGILAPQPPDVGSSDPLSMVGSQGRSPSYAS

SEQ ID NO: 1094 - protein, 472 aa, Artificial Sequence
  Fusion Protein
HGEGTFTSDKSKQLEEERVQLFIEWLKAGGPKKIRYSGGGGGGGSGGGGSGGGGSAESKYGPPCPPCPAPEFEGGPSVFLFPPKPKDTLMISRTPEVTCVVVDVSQEDPEVQFNWYVDGVEVHNAKTKPREEQFNSTYRVVSVLTVLHQDWLNGKEYKCKVSNKGLPSSIEKTISKAKGQPREPQVYTLPPSQEEMTKNQVSLTCLVKGFYPSDIAVEWESNGQPENNYKTTPPVLDSDGSFFLYSRLTVDKSRWQEGNVFSCSVMHEALHNHYTQKSLSLSLGGGGSGSAHPIPDSSPLLQFGGQVRQRYLYTDDACQTEAHLEIREDGTVGGAADQSPESLLQLKALKPGVIQILGVKTSRFLCQRPDGALYGSLHFDPEACSFRELLLEDGYNVYQSEAHGLPLHLPGCKSPHRDPAPRGPARFLPLPGLPPAPPEPPGILAPQPPDVGSSDPLSMVYPSQGRSPSYAS

SEQ ID NO: 1095 - protein, 471 aa, Artificial Sequence
  Fusion Protein
HGEGTFTSDKSKQLEEERVQLFIEWLKAGGPKKIRYSGGGGGGGSGGGGSGGGGSAESKYGPPCPPCPAPEFEGGPSVFLFPPKPKDTLMISRTPEVTCVVVDVSQEDPEVQFNWYVDGVEVHNAKTKPREEQFNSTYRVVSVLTVLHQDWLNGKEYKCKVSNKGLPSSIEKTISKAKGQPREPQVYTLPPSQEEMTKNQVSLTCLVKGFYPSDIAVEWESNGQPENNYKTTPPVLDSDGSFFLYSRLTVDKSRWQEGNVFSCSVMHEALHNHYTQKSLSLSLGGGGSGSAHPIPDSSPLLQFGGQVRQRYLYTDDACQTEAHLEIREDGTVGGAADQSPESLLQLKALKPGVIQILGVKTSRFLCQRPDGALYGSLHFDPEACSFRELLLEDGYNVYQSEAHGLPLHLCGNKSPHRDPAPRGPARFLPLPGLPPAPPEPPGILAPQPPDVGSSDPLSMVGSQGRSPSYAS

SEQ ID NO: 1096 - protein, 472 aa, Artificial Sequence
  Fusion Protein
HGEGTFTSDKSKQLEEERVQLFIEWLKAGGPKKIRYSGGGGGGGSGGGGSGGGGSAESKYGPPCPPCPAPEFEGGPSVFLFPPKPKDTLMISRTPEVTCVVVDVSQEDPEVQFNWYVDGVEVHNAKTKPREEQFNSTYRVVSVLTVLHQDWLNGKEYKCKVSNKGLPSSIEKTISKAKGQPREPQVYTLPPSQEEMTKNQVSLTCLVKGFYPSDIAVEWESNGQPENNYKTTPPVLDSDGSFFLYSRLTVDKSRWQEGNVFSCSVMHEALHNHYTQKSLSLSLGGGGSGSAHPIPDSSPLLQFGGQVRQRYLYTDDACQTEAHLEIREDGTVGGAADQSPESLLQLKALKPGVIQILGVKTSRFLCQRPDGALYGSLHFDPEACSFRELLLEDGYNVYQSEAHGLPLHLCGNKSPHRDPAPRGPARFLPLPGLPPAPPEPPGILAPQPPDVGSSDPLSMVYPSQGRSPSYAS

SEQ ID NO: 1097 - protein, 469 aa, Artificial Sequence
  Fusion Protein
HGEGTFTSDLSKQLEEERVRLFIEWLKAGGPKKIRYSGGGGGGGSGGGGSGGGGSADKTHTCPPCPAPEAAGGPSVFLFPPKPKDTLMISRTPEVTCVVVDVSHEDPEVKFNWYVDGVEVHNAKTKPREEQYNSTYRVVSVLTVLHQDWLNGKEYKCKVSNKALPAPIEKTISKAKGQPREPQVYTLPPSRDELTKNQVSLTCLVKGFYPSDIAVEWESNGQPENNYKTTPPVLDSDGSFFLYSKLTVDKSRWQQGNVFSCSVMHEALHNHYTQKSLSLSPGGGGSGSAHPIPDSSPLLQFGGQVRQRYLYTDDACQTEAHLEIREDGTVGGAADQSPESLLQLKALKPGVIQILGVKTSRFLCQRPDGALYGSLHFDPEACSFRELLLEDGYNVYQSEAHGLPLHLPGCKSPHRDPAPRGPARFLPLPGLPPAPPEPPGILAPQPPDVGSSDPLSMVGSQGRSPSYAS

SEQ ID NO: 1098 - protein, 470 aa, Artificial Sequence
  Fusion Protein
HGEGTFTSDLSKQLEEERVRLFIEWLKAGGPKKIRYSGGGGGGGSGGGGSGGGGSADKTHTCPPCPAPEAAGGPSVFLFPPKPKDTLMISRTPEVTCVVVDVSHEDPEVKFNWYVDGVEVHNAKTKPREEQYNSTYRVVSVLTVLHQDWLNGKEYKCKVSNKALPAPIEKTISKAKGQPREPQVYTLPPSRDELTKNQVSLTCLVKGFYPSDIAVEWESNGQPENNYKTTPPVLDSDGSFFLYSKLTVDKSRWQQGNVFSCSVMHEALHNHYTQKSLSLSPGGGGSGSAHPIPDSSPLLQFGGQVRQRYLYTDDACQTEAHLEIREDGTVGGAADQSPESLLQLKALKPGVIQILGVKTSRFLCQRPDGALYGSLHFDPEACSFRELLLEDGYNVYQSEAHGLPLHLPGCKSPHRDPAPRGPARFLPLPGLPPAPPEPPGILAPQPPDVGSSDPLSMVYPSQGRSPSYAS

SEQ ID NO: 1099 - protein, 469 aa, Artificial Sequence
  Fusion Protein
HGEGTFTSDLSKQLEEERVRLFIEWLKAGGPKKIRYSGGGGGGGSGGGGSGGGGSADKTHTCPPCPAPEAAGGPSVFLFPPKPKDTLMISRTPEVTCVVVDVSHEDPEVKFNWYVDGVEVHNAKTKPREEQYNSTYRVVSVLTVLHQDWLNGKEYKCKVSNKALPAPIEKTISKAKGQPREPQVYTLPPSRDELTKNQVSLTCLVKGFYPSDIAVEWESNGQPENNYKTTPPVLDSDGSFFLYSKLTVDKSRWQQGNVFSCSVMHEALHNHYTQKSLSLSPGGGGSGSAHPIPDSSPLLQFGGQVRQRYLYTDDACQTEAHLEIREDGTVGGAADQSPESLLQLKALKPGVIQILGVKTSRFLCQRPDGALYGSLHFDPEACSFRELLLEDGYNVYQSEAHGLPLHLCGNKSPHRDPAPRGPARFLPLPGLPPAPPEPPGILAPQPPDVGSSDPLSMVGSQGRSPSYAS

SEQ ID NO: 1100 - protein, 470 aa, Artificial Sequence
  Fusion Protein
HGEGTFTSDLSKQLEEERVRLFIEWLKAGGPKKIRYSGGGGGGGSGGGGSGGGGSADKTHTCPPCPAPEAAGGPSVFLFPPKPKDTLMISRTPEVTCVVVDVSHEDPEVKFNWYVDGVEVHNAKTKPREEQYNSTYRVVSVLTVLHQDWLNGKEYKCKVSNKALPAPIEKTISKAKGQPREPQVYTLPPSRDELTKNQVSLTCLVKGFYPSDIAVEWESNGQPENNYKTTPPVLDSDGSFFLYSKLTVDKSRWQQGNVFSCSVMHEALHNHYTQKSLSLSPGGGGSGSAHPIPDSSPLLQFGGQVRQRYLYTDDACQTEAHLEIREDGTVGGAADQSPESLLQLKALKPGVIQILGVKTSRFLCQRPDGALYGSLHFDPEACSFRELLLEDGYNVYQSEAHGLPLHLCGNKSPHRDPAPRGPARFLPLPGLPPAPPEPPGILAPQPPDVGSSDPLSMVYPSQGRSPSYAS

SEQ ID NO: 1101 - protein, 469 aa, Artificial Sequence
  Fusion Protein
HGEGTFTSDLSKQLEEERVRLFIEWLKAGGPKKIRYSGGGGGGGSGGGGSGGGGSADKTHTCPPCPAPELLGGPSVFLFPPKPKDTLMISRTPEVTCVVVDVSHEDPEVKFNWYVDGVEVHNAKTKPREEQYNNASRVVSVLTVLHQDWLNGKEYKCKVSNKALPAPIEKTISKAKGQPREPQVYTLPPSRDELTKNQVSLTCLVKGFYPSDIAVEWESNGQPENNYKTTPPVLDSDGSFFLYSKLTVDKSRWQQGNVFSCSVMHEALHNHYTQKSLSLSPGGGGSGSAHPIPDSSPLLQFGGQVRQRYLYTDDACQTEAHLEIREDGTVGGAADQSPESLLQLKALKPGVIQILGVKTSRFLCQRPDGALYGSLHFDPEACSFRELLLEDGYNVYQSEAHGLPLHLPGCKSPHRDPAPRGPARFLPLPGLPPAPPEPPGILAPQPPDVGSSDPLSMVGSQGRSPSYAS

SEQ ID NO: 1102 - protein, 470 aa, Artificial Sequence
  Fusion Protein
HGEGTFTSDLSKQLEEERVRLFIEWLKAGGPKKIRYSGGGGGGGSGGGGSGGGGSADKTHTCPPCPAPELLGGPSVFLFPPKPKDTLMISRTPEVTCVVVDVSHEDPEVKFNWYVDGVEVHNAKTKPREEQYNNASRVVSVLTVLHQDWLNGKEYKCKVSNKALPAPIEKTISKAKGQPREPQVYTLPPSRDELTKNQVSLTCLVKGFYPSDIAVEWESNGQPENNYKTTPPVLDSDGSFFLYSKLTVDKSRWQQGNVFSCSVMHEALHNHYTQKSLSLSPGGGGSGSAHPIPDSSPLLQFGGQVRQRYLYTDDACQTEAHLEIREDGTVGGAADQSPESLLQLKALKPGVIQILGVKTSRFLCQRPDGALYGSLHFDPEACSFRELLLEDGYNVYQSEAHGLPLHLPGCKSPHRDPAPRGPARFLPLPGLPPAPPEPPGILAPQPPDVGSSDPLSMVYPSQGRSPSYAS

SEQ ID NO: 1103 - protein, 469 aa, Artificial Sequence
  Fusion Protein
HGEGTFTSDLSKQLEEERVRLFIEWLKAGGPKKIRYSGGGGGGGSGGGGSGGGGSADKTHTCPPCPAPELLGGPSVFLFPPKPKDTLMISRTPEVTCVVVDVSHEDPEVKFNWYVDGVEVHNAKTKPREEQYNNASRVVSVLTVLHQDWLNGKEYKCKVSNKALPAPIEKTISKAKGQPREPQVYTLPPSRDELTKNQVSLTCLVKGFYPSDIAVEWESNGQPENNYKTTPPVLDSDGSFFLYSKLTVDKSRWQQGNVFSCSVMHEALHNHYTQKSLSLSPGGGGSGSAHPIPDSSPLLQFGGQVRQRYLYTDDACQTEAHLEIREDGTVGGAADQSPESLLQLKALKPGVIQILGVKTSRFLCQRPDGALYGSLHFDPEACSFRELLLEDGYNVYQSEAHGLPLHLCGNKSPHRDPAPRGPARFLPLPGLPPAPPEPPGILAPQPPDVGSSDPLSMVGSQGRSPSYAS

SEQ ID NO: 1104 - protein, 470 aa, Artificial Sequence
  Fusion Protein
HGEGTFTSDLSKQLEEERVRLFIEWLKAGGPKKIRYSGGGGGGGSGGGGSGGGGSADKTHTCPPCPAPELLGGPSVFLFPPKPKDTLMISRTPEVTCVVVDVSHEDPEVKFNWYVDGVEVHNAKTKPREEQYNNASRVVSVLTVLHQDWLNGKEYKCKVSNKALPAPIEKTISKAKGQPREPQVYTLPPSRDELTKNQVSLTCLVKGFYPSDIAVEWESNGQPENNYKTTPPVLDSDGSFFLYSKLTVDKSRWQQGNVFSCSVMHEALHNHYTQKSLSLSPGGGGSGSAHPIPDSSPLLQFGGQVRQRYLYTDDACQTEAHLEIREDGTVGGAADQSPESLLQLKALKPGVIQILGVKTSRFLCQRPDGALYGSLHFDPEACSFRELLLEDGYNVYQSEAHGLPLHLCGNKSPHRDPAPRGPARFLPLPGLPPAPPEPPGILAPQPPDVGSSDPLSMVYPSQGRSPSYAS

SEQ ID NO: 1105 - protein, 471 aa, Artificial Sequence
  Fusion Protein
HGEGTFTSDLSKQLEEERVRLFIEWLKAGGPKKIRYSGGGGGGGSGGGGSGGGGSAESKYGPPCPPCPAPEFEGGPSVFLFPPKPKDTLMISRTPEVTCVVVDVSQEDPEVQFNWYVDGVEVHNAKTKPREEQFNSTYRVVSVLTVLHQDWLNGKEYKCKVSNKGLPSSIEKTISKAKGQPREPQVYTLPPSQEEMTKNQVSLTCLVKGFYPSDIAVEWESNGQPENNYKTTPPVLDSDGSFFLYSRLTVDKSRWQEGNVFSCSVMHEALHNHYTQKSLSLSLGGGGSGSAHPIPDSSPLLQFGGQVRQRYLYTDDACQTEAHLEIREDGTVGGAADQSPESLLQLKALKPGVIQILGVKTSRFLCQRPDGALYGSLHFDPEACSFRELLLEDGYNVYQSEAHGLPLHLPGCKSPHRDPAPRGPARFLPLPGLPPAPPEPPGILAPQPPDVGSSDPLSMVGSQGRSPSYAS

SEQ ID NO: 1106 - protein, 472 aa, Artificial Sequence
  Fusion Protein
HGEGTFTSDLSKQLEEERVRLFIEWLKAGGPKKIRYSGGGGGGGSGGGGSGGGGSAESKYGPPCPPCPAPEFEGGPSVFLFPPKPKDTLMISRTPEVTCVVVDVSQEDPEVQFNWYVDGVEVHNAKTKPREEQFNSTYRVVSVLTVLHQDWLNGKEYKCKVSNKGLPSSIEKTISKAKGQPREPQVYTLPPSQEEMTKNQVSLTCLVKGFYPSDIAVEWESNGQPENNYKTTPPVLDSDGSFFLYSRLTVDKSRWQEGNVFSCSVMHEALHNHYTQKSLSLSLGGGGSGSAHPIPDSSPLLQFGGQVRQRYLYTDDACQTEAHLEIREDGTVGGAADQSPESLLQLKALKPGVIQILGVKTSRFLCQRPDGALYGSLHFDPEACSFRELLLEDGYNVYQSEAHGLPLHLPGCKSPHRDPAPRGPARFLPLPGLPPAPPEPPGILAPQPPDVGSSDPLSMVYPSQGRSPSYAS

SEQ ID NO: 1107 - protein, 471 aa, Artificial Sequence
  Fusion Protein
HGEGTFTSDLSKQLEEERVRLFIEWLKAGGPKKIRYSGGGGGGGSGGGGSGGGGSAESKYGPPCPPCPAPEFEGGPSVFLFPPKPKDTLMISRTPEVTCVVVDVSQEDPEVQFNWYVDGVEVHNAKTKPREEQFNSTYRVVSVLTVLHQDWLNGKEYKCKVSNKGLPSSIEKTISKAKGQPREPQVYTLPPSQEEMTKNQVSLTCLVKGFYPSDIAVEWESNGQPENNYKTTPPVLDSDGSFFLYSRLTVDKSRWQEGNVFSCSVMHEALHNHYTQKSLSLSLGGGGSGSAHPIPDSSPLLQFGGQVRQRYLYTDDACQTEAHLEIREDGTVGGAADQSPESLLQLKALKPGVIQILGVKTSRFLCQRPDGALYGSLHFDPEACSFRELLLEDGYNVYQSEAHGLPLHLCGNKSPHRDPAPRGPARFLPLPGLPPAPPEPPGILAPQPPDVGSSDPLSMVGSQGRSPSYAS

SEQ ID NO: 1108 - protein, 472 aa, Artificial Sequence
  Fusion Protein
HGEGTFTSDLSKQLEEERVRLFIEWLKAGGPKKIRYSGGGGGGGSGGGGSGGGGSAESKYGPPCPPCPAPEFEGGPSVFLFPPKPKDTLMISRTPEVTCVVVDVSQEDPEVQFNWYVDGVEVHNAKTKPREEQFNSTYRVVSVLTVLHQDWLNGKEYKCKVSNKGLPSSIEKTISKAKGQPREPQVYTLPPSQEEMTKNQVSLTCLVKGFYPSDIAVEWESNGQPENNYKTTPPVLDSDGSFFLYSRLTVDKSRWQEGNVFSCSVMHEALHNHYTQKSLSLSLGGGGSGSAHPIPDSSPLLQFGGQVRQRYLYTDDACQTEAHLEIREDGTVGGAADQSPESLLQLKALKPGVIQILGVKTSRFLCQRPDGALYGSLHFDPEACSFRELLLEDGYNVYQSEAHGLPLHLCGNKSPHRDPAPRGPARFLPLPGLPPAPPEPPGILAPQPPDVGSSDPLSMVYPSQGRSPSYAS

SEQ ID NO: 1109 - protein, 470 aa, Artificial Sequence
  Fusion Protein
GHGEGTFTSDLSKQLEEERVQLFIEWLKAGGPKKIRYSGGGGGGGSGGGGSGGGGSADKTHTCPPCPAPEAAGGPSVFLFPPKPKDTLMISRTPEVTCVVVDVSHEDPEVKFNWYVDGVEVHNAKTKPREEQYNSTYRVVSVLTVLHQDWLNGKEYKCKVSNKALPAPIEKTISKAKGQPREPQVYTLPPSRDELTKNQVSLTCLVKGFYPSDIAVEWESNGQPENNYKTTPPVLDSDGSFFLYSKLTVDKSRWQQGNVFSCSVMHEALHNHYTQKSLSLSPGGGGSGSAHPIPDSSPLLQFGGQVRQRYLYTDDACQTEAHLEIREDGTVGGAADQSPESLLQLKALKPGVIQILGVKTSRFLCQRPDGALYGSLHFDPEACSFRELLLEDGYNVYQSEAHGLPLHLPGCKSPHRDPAPRGPARFLPLPGLPPAPPEPPGILAPQPPDVGSSDPLSMVGSQGRSPSYAS

SEQ ID NO: 1110 - protein, 471 aa, Artificial Sequence
  Fusion Protein
GHGEGTFTSDLSKQLEEERVQLFIEWLKAGGPKKIRYSGGGGGGGSGGGGSGGGGSADKTHTCPPCPAPEAAGGPSVFLFPPKPKDTLMISRTPEVTCVVVDVSHEDPEVKFNWYVDGVEVHNAKTKPREEQYNSTYRVVSVLTVLHQDWLNGKEYKCKVSNKALPAPIEKTISKAKGQPREPQVYTLPPSRDELTKNQVSLTCLVKGFYPSDIAVEWESNGQPENNYKTTPPVLDSDGSFFLYSKLTVDKSRWQQGNVFSCSVMHEALHNHYTQKSLSLSPGGGGSGSAHPIPDSSPLLQFGGQVRQRYLYTDDACQTEAHLEIREDGTVGGAADQSPESLLQLKALKPGVIQILGVKTSRFLCQRPDGALYGSLHFDPEACSFRELLLEDGYNVYQSEAHGLPLHLPGCKSPHRDPAPRGPARFLPLPGLPPAPPEPPGILAPQPPDVGSSDPLSMVYPSQGRSPSYAS

SEQ ID NO: 1111 - protein, 470 aa, Artificial Sequence
  Fusion Protein
GHGEGTFTSDLSKQLEEERVQLFIEWLKAGGPKKIRYSGGGGGGGSGGGGSGGGGSADKTHTCPPCPAPEAAGGPSVFLFPPKPKDTLMISRTPEVTCVVVDVSHEDPEVKFNWYVDGVEVHNAKTKPREEQYNSTYRVVSVLTVLHQDWLNGKEYKCKVSNKALPAPIEKTISKAKGQPREPQVYTLPPSRDELTKNQVSLTCLVKGFYPSDIAVEWESNGQPENNYKTTPPVLDSDGSFFLYSKLTVDKSRWQQGNVFSCSVMHEALHNHYTQKSLSLSPGGGGSGSAHPIPDSSPLLQFGGQVRQRYLYTDDACQTEAHLEIREDGTVGGAADQSPESLLQLKALKPGVIQILGVKTSRFLCQRPDGALYGSLHFDPEACSFRELLLEDGYNVYQSEAHGLPLHLCGNKSPHRDPAPRGPARFLPLPGLPPAPPEPPGILAPQPPDVGSSDPLSMVGSQGRSPSYAS

SEQ ID NO: 1112 - protein, 471 aa, Artificial Sequence
  Fusion Protein
GHGEGTFTSDLSKQLEEERVQLFIEWLKAGGPKKIRYSGGGGGGGSGGGGSGGGGSADKTHTCPPCPAPEAAGGPSVFLFPPKPKDTLMISRTPEVTCVVVDVSHEDPEVKFNWYVDGVEVHNAKTKPREEQYNSTYRVVSVLTVLHQDWLNGKEYKCKVSNKALPAPIEKTISKAKGQPREPQVYTLPPSRDELTKNQVSLTCLVKGFYPSDIAVEWESNGQPENNYKTTPPVLDSDGSFFLYSKLTVDKSRWQQGNVFSCSVMHEALHNHYTQKSLSLSPGGGGSGSAHPIPDSSPLLQFGGQVRQRYLYTDDACQTEAHLEIREDGTVGGAADQSPESLLQLKALKPGVIQILGVKTSRFLCQRPDGALYGSLHFDPEACSFRELLLEDGYNVYQSEAHGLPLHLCGNKSPHRDPAPRGPARFLPLPGLPPAPPEPPGILAPQPPDVGSSDPLSMVYPSQGRSPSYAS

SEQ ID NO: 1113 - protein, 470 aa, Artificial Sequence
  Fusion Protein
GHGEGTFTSDLSKQLEEERVQLFIEWLKAGGPKKIRYSGGGGGGGSGGGGSGGGGSADKTHTCPPCPAPELLGGPSVFLFPPKPKDTLMISRTPEVTCVVVDVSHEDPEVKFNWYVDGVEVHNAKTKPREEQYNNASRVVSVLTVLHQDWLNGKEYKCKVSNKALPAPIEKTISKAKGQPREPQVYTLPPSRDELTKNQVSLTCLVKGFYPSDIAVEWESNGQPENNYKTTPPVLDSDGSFFLYSKLTVDKSRWQQGNVFSCSVMHEALHNHYTQKSLSLSPGGGGSGSAHPIPDSSPLLQFGGQVRQRYLYTDDACQTEAHLEIREDGTVGGAADQSPESLLQLKALKPGVIQILGVKTSRFLCQRPDGALYGSLHFDPEACSFRELLLEDGYNVYQSEAHGLPLHLPGCKSPHRDPAPRGPARFLPLPGLPPAPPEPPGILAPQPPDVGSSDPLSMVGSQGRSPSYAS

SEQ ID NO: 1114 - protein, 471 aa, Artificial Sequence
  Fusion Protein
GHGEGTFTSDLSKQLEEERVQLFIEWLKAGGPKKIRYSGGGGGGGSGGGGSGGGGSADKTHTCPPCPAPELLGGPSVFLFPPKPKDTLMISRTPEVTCVVVDVSHEDPEVKFNWYVDGVEVHNAKTKPREEQYNNASRVVSVLTVLHQDWLNGKEYKCKVSNKALPAPIEKTISKAKGQPREPQVYTLPPSRDELTKNQVSLTCLVKGFYPSDIAVEWESNGQPENNYKTTPPVLDSDGSFFLYSKLTVDKSRWQQGNVFSCSVMHEALHNHYTQKSLSLSPGGGGSGSAHPIPDSSPLLQFGGQVRQRYLYTDDACQTEAHLEIREDGTVGGAADQSPESLLQLKALKPGVIQILGVKTSRFLCQRPDGALYGSLHFDPEACSFRELLLEDGYNVYQSEAHGLPLHLPGCKSPHRDPAPRGPARFLPLPGLPPAPPEPPGILAPQPPDVGSSDPLSMVYPSQGRSPSYAS

SEQ ID NO: 1115 - protein, 470 aa, Artificial Sequence
  Fusion Protein
GHGEGTFTSDLSKQLEEERVQLFIEWLKAGGPKKIRYSGGGGGGGSGGGGSGGGGSADKTHTCPPCPAPELLGGPSVFLFPPKPKDTLMISRTPEVTCVVVDVSHEDPEVKFNWYVDGVEVHNAKTKPREEQYNNASRVVSVLTVLHQDWLNGKEYKCKVSNKALPAPIEKTISKAKGQPREPQVYTLPPSRDELTKNQVSLTCLVKGFYPSDIAVEWESNGQPENNYKTTPPVLDSDGSFFLYSKLTVDKSRWQQGNVFSCSVMHEALHNHYTQKSLSLSPGGGGSGSAHPIPDSSPLLQFGGQVRQRYLYTDDACQTEAHLEIREDGTVGGAADQSPESLLQLKALKPGVIQILGVKTSRFLCQRPDGALYGSLHFDPEACSFRELLLEDGYNVYQSEAHGLPLHLCGNKSPHRDPAPRGPARFLPLPGLPPAPPEPPGILAPQPPDVGSSDPLSMVGSQGRSPSYAS

SEQ ID NO: 1116 - protein, 471 aa, Artificial Sequence
  Fusion Protein
GHGEGTFTSDLSKQLEEERVQLFIEWLKAGGPKKIRYSGGGGGGGSGGGGSGGGGSADKTHTCPPCPAPELLGGPSVFLFPPKPKDTLMISRTPEVTCVVVDVSHEDPEVKFNWYVDGVEVHNAKTKPREEQYNNASRVVSVLTVLHQDWLNGKEYKCKVSNKALPAPIEKTISKAKGQPREPQVYTLPPSRDELTKNQVSLTCLVKGFYPSDIAVEWESNGQPENNYKTTPPVLDSDGSFFLYSKLTVDKSRWQQGNVFSCSVMHEALHNHYTQKSLSLSPGGGGSGSAHPIPDSSPLLQFGGQVRQRYLYTDDACQTEAHLEIREDGTVGGAADQSPESLLQLKALKPGVIQILGVKTSRFLCQRPDGALYGSLHFDPEACSFRELLLEDGYNVYQSEAHGLPLHLCGNKSPHRDPAPRGPARFLPLPGLPPAPPEPPGILAPQPPDVGSSDPLSMVYPSQGRSPSYAS

SEQ ID NO: 1117 - protein, 472 aa, Artificial Sequence
  Fusion Protein
GHGEGTFTSDLSKQLEEERVQLFIEWLKAGGPKKIRYSGGGGGGGSGGGGSGGGGSAESKYGPPCPPCPAPEFEGGPSVFLFPPKPKDTLMISRTPEVTCVVVDVSQEDPEVQFNWYVDGVEVHNAKTKPREEQFNSTYRVVSVLTVLHQDWLNGKEYKCKVSNKGLPSSIEKTISKAKGQPREPQVYTLPPSQEEMTKNQVSLTCLVKGFYPSDIAVEWESNGQPENNYKTTPPVLDSDGSFFLYSRLTVDKSRWQEGNVFSCSVMHEALHNHYTQKSLSLSLGGGGSGSAHPIPDSSPLLQFGGQVRQRYLYTDDACQTEAHLEIREDGTVGGAADQSPESLLQLKALKPGVIQILGVKTSRFLCQRPDGALYGSLHFDPEACSFRELLLEDGYNVYQSEAHGLPLHLPGCKSPHRDPAPRGPARFLPLPGLPPAPPEPPGILAPQPPDVGSSDPLSMVGSQGRSPSYAS

SEQ ID NO: 1118 - protein, 473 aa, Artificial Sequence
  Fusion Protein
GHGEGTFTSDLSKQLEEERVQLFIEWLKAGGPKKIRYSGGGGGGGSGGGGSGGGGSAESKYGPPCPPCPAPEFEGGPSVFLFPPKPKDTLMISRTPEVTCVVVDVSQEDPEVQFNWYVDGVEVHNAKTKPREEQFNSTYRVVSVLTVLHQDWLNGKEYKCKVSNKGLPSSIEKTISKAKGQPREPQVYTLPPSQEEMTKNQVSLTCLVKGFYPSDIAVEWESNGQPENNYKTTPPVLDSDGSFFLYSRLTVDKSRWQEGNVFSCSVMHEALHNHYTQKSLSLSLGGGGSGSAHPIPDSSPLLQFGGQVRQRYLYTDDACQTEAHLEIREDGTVGGAADQSPESLLQLKALKPGVIQILGVKTSRFLCQRPDGALYGSLHFDPEACSFRELLLEDGYNVYQSEAHGLPLHLPGCKSPHRDPAPRGPARFLPLPGLPPAPPEPPGILAPQPPDVGSSDPLSMVYPSQGRSPSYAS

SEQ ID NO: 1119 - protein, 472 aa, Artificial Sequence
  Fusion Protein
GHGEGTFTSDLSKQLEEERVQLFIEWLKAGGPKKIRYSGGGGGGGSGGGGSGGGGSAESKYGPPCPPCPAPEFEGGPSVFLFPPKPKDTLMISRTPEVTCVVVDVSQEDPEVQFNWYVDGVEVHNAKTKPREEQFNSTYRVVSVLTVLHQDWLNGKEYKCKVSNKGLPSSIEKTISKAKGQPREPQVYTLPPSQEEMTKNQVSLTCLVKGFYPSDIAVEWESNGQPENNYKTTPPVLDSDGSFFLYSRLTVDKSRWQEGNVFSCSVMHEALHNHYTQKSLSLSLGGGGSGSAHPIPDSSPLLQFGGQVRQRYLYTDDACQTEAHLEIREDGTVGGAADQSPESLLQLKALKPGVIQILGVKTSRFLCQRPDGALYGSLHFDPEACSFRELLLEDGYNVYQSEAHGLPLHLCGNKSPHRDPAPRGPARFLPLPGLPPAPPEPPGILAPQPPDVGSSDPLSMVGSQGRSPSYAS

SEQ ID NO: 1120 - protein, 473 aa, Artificial Sequence
  Fusion Protein
GHGEGTFTSDLSKQLEEERVQLFIEWLKAGGPKKIRYSGGGGGGGSGGGGSGGGGSAESKYGPPCPPCPAPEFEGGPSVFLFPPKPKDTLMISRTPEVTCVVVDVSQEDPEVQFNWYVDGVEVHNAKTKPREEQFNSTYRVVSVLTVLHQDWLNGKEYKCKVSNKGLPSSIEKTISKAKGQPREPQVYTLPPSQEEMTKNQVSLTCLVKGFYPSDIAVEWESNGQPENNYKTTPPVLDSDGSFFLYSRLTVDKSRWQEGNVFSCSVMHEALHNHYTQKSLSLSLGGGGSGSAHPIPDSSPLLQFGGQVRQRYLYTDDACQTEAHLEIREDGTVGGAADQSPESLLQLKALKPGVIQILGVKTSRFLCQRPDGALYGSLHFDPEACSFRELLLEDGYNVYQSEAHGLPLHLCGNKSPHRDPAPRGPARFLPLPGLPPAPPEPPGILAPQPPDVGSSDPLSMVYPSQGRSPSYAS

SEQ ID NO: 1121 - protein, 469 aa, Artificial Sequence
  Fusion Protein
HGEGTFTSDLSKQLEEEAVRLFIEWLKAGGPKKIRYSGGGGGGGSGGGGSGGGGSADKTHTCPPCPAPEAAGGPSVFLFPPKPKDTLMISRTPEVTCVVVDVSHEDPEVKFNWYVDGVEVHNAKTKPREEQYNSTYRVVSVLTVLHQDWLNGKEYKCKVSNKALPAPIEKTISKAKGQPREPQVYTLPPSRDELTKNQVSLTCLVKGFYPSDIAVEWESNGQPENNYKTTPPVLDSDGSFFLYSKLTVDKSRWQQGNVFSCSVMHEALHNHYTQKSLSLSPGGGGSGSAHPIPDSSPLLQFGGQVRQRYLYTDDACQTEAHLEIREDGTVGGAADQSPESLLQLKALKPGVIQILGVKTSRFLCQRPDGALYGSLHFDPEACSFRELLLEDGYNVYQSEAHGLPLHLPGCKSPHRDPAPRGPARFLPLPGLPPAPPEPPGILAPQPPDVGSSDPLSMVGSQGRSPSYAS

SEQ ID NO: 1122 - protein, 470 aa, Artificial Sequence
  Fusion Protein
HGEGTFTSDLSKQLEEEAVRLFIEWLKAGGPKKIRYSGGGGGGGSGGGGSGGGGSADKTHTCPPCPAPEAAGGPSVFLFPPKPKDTLMISRTPEVTCVVVDVSHEDPEVKFNWYVDGVEVHNAKTKPREEQYNSTYRVVSVLTVLHQDWLNGKEYKCKVSNKALPAPIEKTISKAKGQPREPQVYTLPPSRDELTKNQVSLTCLVKGFYPSDIAVEWESNGQPENNYKTTPPVLDSDGSFFLYSKLTVDKSRWQQGNVFSCSVMHEALHNHYTQKSLSLSPGGGGSGSAHPIPDSSPLLQFGGQVRQRYLYTDDACQTEAHLEIREDGTVGGAADQSPESLLQLKALKPGVIQILGVKTSRFLCQRPDGALYGSLHFDPEACSFRELLLEDGYNVYQSEAHGLPLHLPGCKSPHRDPAPRGPARFLPLPGLPPAPPEPPGILAPQPPDVGSSDPLSMVYPSQGRSPSYAS

SEQ ID NO: 1123 - protein, 469 aa, Artificial Sequence
  Fusion Protein
HGEGTFTSDLSKQLEEEAVRLFIEWLKAGGPKKIRYSGGGGGGGSGGGGSGGGGSADKTHTCPPCPAPEAAGGPSVFLFPPKPKDTLMISRTPEVTCVVVDVSHEDPEVKFNWYVDGVEVHNAKTKPREEQYNSTYRVVSVLTVLHQDWLNGKEYKCKVSNKALPAPIEKTISKAKGQPREPQVYTLPPSRDELTKNQVSLTCLVKGFYPSDIAVEWESNGQPENNYKTTPPVLDSDGSFFLYSKLTVDKSRWQQGNVFSCSVMHEALHNHYTQKSLSLSPGGGGSGSAHPIPDSSPLLQFGGQVRQRYLYTDDACQTEAHLEIREDGTVGGAADQSPESLLQLKALKPGVIQILGVKTSRFLCQRPDGALYGSLHFDPEACSFRELLLEDGYNVYQSEAHGLPLHLCGNKSPHRDPAPRGPARFLPLPGLPPAPPEPPGILAPQPPDVGSSDPLSMVGSQGRSPSYAS

SEQ ID NO: 1124 - protein, 470 aa, Artificial Sequence
  Fusion Protein
HGEGTFTSDLSKQLEEEAVRLFIEWLKAGGPKKIRYSGGGGGGGSGGGGSGGGGSADKTHTCPPCPAPEAAGGPSVFLFPPKPKDTLMISRTPEVTCVVVDVSHEDPEVKFNWYVDGVEVHNAKTKPREEQYNSTYRVVSVLTVLHQDWLNGKEYKCKVSNKALPAPIEKTISKAKGQPREPQVYTLPPSRDELTKNQVSLTCLVKGFYPSDIAVEWESNGQPENNYKTTPPVLDSDGSFFLYSKLTVDKSRWQQGNVFSCSVMHEALHNHYTQKSLSLSPGGGGSGSAHPIPDSSPLLQFGGQVRQRYLYTDDACQTEAHLEIREDGTVGGAADQSPESLLQLKALKPGVIQILGVKTSRFLCQRPDGALYGSLHFDPEACSFRELLLEDGYNVYQSEAHGLPLHLCGNKSPHRDPAPRGPARFLPLPGLPPAPPEPPGILAPQPPDVGSSDPLSMVYPSQGRSPSYAS

SEQ ID NO: 1125 - protein, 469 aa, Artificial Sequence
  Fusion Protein
HGEGTFTSDLSKQLEEEAVRLFIEWLKAGGPKKIRYSGGGGGGGSGGGGSGGGGSADKTHTCPPCPAPELLGGPSVFLFPPKPKDTLMISRTPEVTCVVVDVSHEDPEVKFNWYVDGVEVHNAKTKPREEQYNNASRVVSVLTVLHQDWLNGKEYKCKVSNKALPAPIEKTISKAKGQPREPQVYTLPPSRDELTKNQVSLTCLVKGFYPSDIAVEWESNGQPENNYKTTPPVLDSDGSFFLYSKLTVDKSRWQQGNVFSCSVMHEALHNHYTQKSLSLSPGGGGSGSAHPIPDSSPLLQFGGQVRQRYLYTDDACQTEAHLEIREDGTVGGAADQSPESLLQLKALKPGVIQILGVKTSRFLCQRPDGALYGSLHFDPEACSFRELLLEDGYNVYQSEAHGLPLHLPGCKSPHRDPAPRGPARFLPLPGLPPAPPEPPGILAPQPPDVGSSDPLSMVGSQGRSPSYAS

SEQ ID NO: 1126 - protein, 470 aa, Artificial Sequence
  Fusion Protein
HGEGTFTSDLSKQLEEEAVRLFIEWLKAGGPKKIRYSGGGGGGGSGGGGSGGGGSADKTHTCPPCPAPELLGGPSVFLFPPKPKDTLMISRTPEVTCVVVDVSHEDPEVKFNWYVDGVEVHNAKTKPREEQYNNASRVVSVLTVLHQDWLNGKEYKCKVSNKALPAPIEKTISKAKGQPREPQVYTLPPSRDELTKNQVSLTCLVKGFYPSDIAVEWESNGQPENNYKTTPPVLDSDGSFFLYSKLTVDKSRWQQGNVFSCSVMHEALHNHYTQKSLSLSPGGGGSGSAHPIPDSSPLLQFGGQVRQRYLYTDDACQTEAHLEIREDGTVGGAADQSPESLLQLKALKPGVIQILGVKTSRFLCQRPDGALYGSLHFDPEACSFRELLLEDGYNVYQSEAHGLPLHLPGCKSPHRDPAPRGPARFLPLPGLPPAPPEPPGILAPQPPDVGSSDPLSMVYPSQGRSPSYAS

SEQ ID NO: 1127 - protein, 469 aa, Artificial Sequence
  Fusion Protein
HGEGTFTSDLSKQLEEEAVRLFIEWLKAGGPKKIRYSGGGGGGGSGGGGSGGGGSADKTHTCPPCPAPELLGGPSVFLFPPKPKDTLMISRTPEVTCVVVDVSHEDPEVKFNWYVDGVEVHNAKTKPREEQYNNASRVVSVLTVLHQDWLNGKEYKCKVSNKALPAPIEKTISKAKGQPREPQVYTLPPSRDELTKNQVSLTCLVKGFYPSDIAVEWESNGQPENNYKTTPPVLDSDGSFFLYSKLTVDKSRWQQGNVFSCSVMHEALHNHYTQKSLSLSPGGGGSGSAHPIPDSSPLLQFGGQVRQRYLYTDDACQTEAHLEIREDGTVGGAADQSPESLLQLKALKPGVIQILGVKTSRFLCQRPDGALYGSLHFDPEACSFRELLLEDGYNVYQSEAHGLPLHLCGNKSPHRDPAPRGPARFLPLPGLPPAPPEPPGILAPQPPDVGSSDPLSMVGSQGRSPSYAS

SEQ ID NO: 1128 - protein, 470 aa, Artificial Sequence
  Fusion Protein
HGEGTFTSDLSKQLEEEAVRLFIEWLKAGGPKKIRYSGGGGGGGSGGGGSGGGGSADKTHTCPPCPAPELLGGPSVFLFPPKPKDTLMISRTPEVTCVVVDVSHEDPEVKFNWYVDGVEVHNAKTKPREEQYNNASRVVSVLTVLHQDWLNGKEYKCKVSNKALPAPIEKTISKAKGQPREPQVYTLPPSRDELTKNQVSLTCLVKGFYPSDIAVEWESNGQPENNYKTTPPVLDSDGSFFLYSKLTVDKSRWQQGNVFSCSVMHEALHNHYTQKSLSLSPGGGGSGSAHPIPDSSPLLQFGGQVRQRYLYTDDACQTEAHLEIREDGTVGGAADQSPESLLQLKALKPGVIQILGVKTSRFLCQRPDGALYGSLHFDPEACSFRELLLEDGYNVYQSEAHGLPLHLCGNKSPHRDPAPRGPARFLPLPGLPPAPPEPPGILAPQPPDVGSSDPLSMVYPSQGRSPSYAS

SEQ ID NO: 1129 - protein, 471 aa, Artificial Sequence
  Fusion Protein
HGEGTFTSDLSKQLEEEAVRLFIEWLKAGGPKKIRYSGGGGGGGSGGGGSGGGGSAESKYGPPCPPCPAPEFEGGPSVFLFPPKPKDTLMISRTPEVTCVVVDVSQEDPEVQFNWYVDGVEVHNAKTKPREEQFNSTYRVVSVLTVLHQDWLNGKEYKCKVSNKGLPSSIEKTISKAKGQPREPQVYTLPPSQEEMTKNQVSLTCLVKGFYPSDIAVEWESNGQPENNYKTTPPVLDSDGSFFLYSRLTVDKSRWQEGNVFSCSVMHEALHNHYTQKSLSLSLGGGGSGSAHPIPDSSPLLQFGGQVRQRYLYTDDACQTEAHLEIREDGTVGGAADQSPESLLQLKALKPGVIQILGVKTSRFLCQRPDGALYGSLHFDPEACSFRELLLEDGYNVYQSEAHGLPLHLPGCKSPHRDPAPRGPARFLPLPGLPPAPPEPPGILAPQPPDVGSSDPLSMVGSQGRSPSYAS

SEQ ID NO: 1130 - protein, 472 aa, Artificial Sequence
  Fusion Protein
HGEGTFTSDLSKQLEEEAVRLFIEWLKAGGPKKIRYSGGGGGGGSGGGGSGGGGSAESKYGPPCPPCPAPEFEGGPSVFLFPPKPKDTLMISRTPEVTCVVVDVSQEDPEVQFNWYVDGVEVHNAKTKPREEQFNSTYRVVSVLTVLHQDWLNGKEYKCKVSNKGLPSSIEKTISKAKGQPREPQVYTLPPSQEEMTKNQVSLTCLVKGFYPSDIAVEWESNGQPENNYKTTPPVLDSDGSFFLYSRLTVDKSRWQEGNVFSCSVMHEALHNHYTQKSLSLSLGGGGSGSAHPIPDSSPLLQFGGQVRQRYLYTDDACQTEAHLEIREDGTVGGAADQSPESLLQLKALKPGVIQILGVKTSRFLCQRPDGALYGSLHFDPEACSFRELLLEDGYNVYQSEAHGLPLHLPGCKSPHRDPAPRGPARFLPLPGLPPAPPEPPGILAPQPPDVGSSDPLSMVYPSQGRSPSYAS

SEQ ID NO: 1131 - protein, 471 aa, Artificial Sequence
  Fusion Protein
HGEGTFTSDLSKQLEEEAVRLFIEWLKAGGPKKIRYSGGGGGGGSGGGGSGGGGSAESKYGPPCPPCPAPEFEGGPSVFLFPPKPKDTLMISRTPEVTCVVVDVSQEDPEVQFNWYVDGVEVHNAKTKPREEQFNSTYRVVSVLTVLHQDWLNGKEYKCKVSNKGLPSSIEKTISKAKGQPREPQVYTLPPSQEEMTKNQVSLTCLVKGFYPSDIAVEWESNGQPENNYKTTPPVLDSDGSFFLYSRLTVDKSRWQEGNVFSCSVMHEALHNHYTQKSLSLSLGGGGSGSAHPIPDSSPLLQFGGQVRQRYLYTDDACQTEAHLEIREDGTVGGAADQSPESLLQLKALKPGVIQILGVKTSRFLCQRPDGALYGSLHFDPEACSFRELLLEDGYNVYQSEAHGLPLHLCGNKSPHRDPAPRGPARFLPLPGLPPAPPEPPGILAPQPPDVGSSDPLSMVGSQGRSPSYAS

SEQ ID NO: 1132 - protein, 472 aa, Artificial Sequence
  Fusion Protein
HGEGTFTSDLSKQLEEEAVRLFIEWLKAGGPKKIRYSGGGGGGGSGGGGSGGGGSAESKYGPPCPPCPAPEFEGGPSVFLFPPKPKDTLMISRTPEVTCVVVDVSQEDPEVQFNWYVDGVEVHNAKTKPREEQFNSTYRVVSVLTVLHQDWLNGKEYKCKVSNKGLPSSIEKTISKAKGQPREPQVYTLPPSQEEMTKNQVSLTCLVKGFYPSDIAVEWESNGQPENNYKTTPPVLDSDGSFFLYSRLTVDKSRWQEGNVFSCSVMHEALHNHYTQKSLSLSLGGGGSGSAHPIPDSSPLLQFGGQVRQRYLYTDDACQTEAHLEIREDGTVGGAADQSPESLLQLKALKPGVIQILGVKTSRFLCQRPDGALYGSLHFDPEACSFRELLLEDGYNVYQSEAHGLPLHLCGNKSPHRDPAPRGPARFLPLPGLPPAPPEPPGILAPQPPDVGSSDPLSMVYPSQGRSPSYAS

SEQ ID NO: 1133 - protein, 469 aa, Artificial Sequence
  Fusion Protein
HGEGTFTSDLSKQLEEEAVQLFIEWLKAGGPKKIRYSGGGGGGGSGGGGSGGGGSADKTHTCPPCPAPEAAGGPSVFLFPPKPKDTLMISRTPEVTCVVVDVSHEDPEVKFNWYVDGVEVHNAKTKPREEQYNSTYRVVSVLTVLHQDWLNGKEYKCKVSNKALPAPIEKTISKAKGQPREPQVYTLPPSRDELTKNQVSLTCLVKGFYPSDIAVEWESNGQPENNYKTTPPVLDSDGSFFLYSKLTVDKSRWQQGNVFSCSVMHEALHNHYTQKSLSLSPGGGGSGSAHPIPDSSPLLQFGGQVRQRYLYTDDACQTEAHLEIREDGTVGGAADQSPESLLQLKALKPGVIQILGVKTSRFLCQRPDGALYGSLHFDPEACSFRELLLEDGYNVYQSEAHGLPLHLPGCKSPHRDPAPRGPARFLPLPGLPPAPPEPPGILAPQPPDVGSSDPLSMVGSQGRSPSYAS

SEQ ID NO: 1134 - protein, 470 aa, Artificial Sequence
  Fusion Protein
HGEGTFTSDLSKQLEEEAVQLFIEWLKAGGPKKIRYSGGGGGGGSGGGGSGGGGSADKTHTCPPCPAPEAAGGPSVFLFPPKPKDTLMISRTPEVTCVVVDVSHEDPEVKFNWYVDGVEVHNAKTKPREEQYNSTYRVVSVLTVLHQDWLNGKEYKCKVSNKALPAPIEKTISKAKGQPREPQVYTLPPSRDELTKNQVSLTCLVKGFYPSDIAVEWESNGQPENNYKTTPPVLDSDGSFFLYSKLTVDKSRWQQGNVFSCSVMHEALHNHYTQKSLSLSPGGGGSGSAHPIPDSSPLLQFGGQVRQRYLYTDDACQTEAHLEIREDGTVGGAADQSPESLLQLKALKPGVIQILGVKTSRFLCQRPDGALYGSLHFDPEACSFRELLLEDGYNVYQSEAHGLPLHLPGCKSPHRDPAPRGPARFLPLPGLPPAPPEPPGILAPQPPDVGSSDPLSMVYPSQGRSPSYAS

SEQ ID NO: 1135 - protein, 469 aa, Artificial Sequence
  Fusion Protein
HGEGTFTSDLSKQLEEEAVQLFIEWLKAGGPKKIRYSGGGGGGGSGGGGSGGGGSADKTHTCPPCPAPEAAGGPSVFLFPPKPKDTLMISRTPEVTCVVVDVSHEDPEVKFNWYVDGVEVHNAKTKPREEQYNSTYRVVSVLTVLHQDWLNGKEYKCKVSNKALPAPIEKTISKAKGQPREPQVYTLPPSRDELTKNQVSLTCLVKGFYPSDIAVEWESNGQPENNYKTTPPVLDSDGSFFLYSKLTVDKSRWQQGNVFSCSVMHEALHNHYTQKSLSLSPGGGGSGSAHPIPDSSPLLQFGGQVRQRYLYTDDACQTEAHLEIREDGTVGGAADQSPESLLQLKALKPGVIQILGVKTSRFLCQRPDGALYGSLHFDPEACSFRELLLEDGYNVYQSEAHGLPLHLCGNKSPHRDPAPRGPARFLPLPGLPPAPPEPPGILAPQPPDVGSSDPLSMVGSQGRSPSYAS

SEQ ID NO: 1136 - protein, 470 aa, Artificial Sequence
  Fusion Protein
HGEGTFTSDLSKQLEEEAVQLFIEWLKAGGPKKIRYSGGGGGGGSGGGGSGGGGSADKTHTCPPCPAPEAAGGPSVFLFPPKPKDTLMISRTPEVTCVVVDVSHEDPEVKFNWYVDGVEVHNAKTKPREEQYNSTYRVVSVLTVLHQDWLNGKEYKCKVSNKALPAPIEKTISKAKGQPREPQVYTLPPSRDELTKNQVSLTCLVKGFYPSDIAVEWESNGQPENNYKTTPPVLDSDGSFFLYSKLTVDKSRWQQGNVFSCSVMHEALHNHYTQKSLSLSPGGGGSGSAHPIPDSSPLLQFGGQVRQRYLYTDDACQTEAHLEIREDGTVGGAADQSPESLLQLKALKPGVIQILGVKTSRFLCQRPDGALYGSLHFDPEACSFRELLLEDGYNVYQSEAHGLPLHLCGNKSPHRDPAPRGPARFLPLPGLPPAPPEPPGILAPQPPDVGSSDPLSMVYPSQGRSPSYAS

SEQ ID NO: 1137 - protein, 469 aa, Artificial Sequence
  Fusion Protein
HGEGTFTSDLSKQLEEEAVQLFIEWLKAGGPKKIRYSGGGGGGGSGGGGSGGGGSADKTHTCPPCPAPELLGGPSVFLFPPKPKDTLMISRTPEVTCVVVDVSHEDPEVKFNWYVDGVEVHNAKTKPREEQYNNASRVVSVLTVLHQDWLNGKEYKCKVSNKALPAPIEKTISKAKGQPREPQVYTLPPSRDELTKNQVSLTCLVKGFYPSDIAVEWESNGQPENNYKTTPPVLDSDGSFFLYSKLTVDKSRWQQGNVFSCSVMHEALHNHYTQKSLSLSPGGGGSGSAHPIPDSSPLLQFGGQVRQRYLYTDDACQTEAHLEIREDGTVGGAADQSPESLLQLKALKPGVIQILGVKTSRFLCQRPDGALYGSLHFDPEACSFRELLLEDGYNVYQSEAHGLPLHLPGCKSPHRDPAPRGPARFLPLPGLPPAPPEPPGILAPQPPDVGSSDPLSMVGSQGRSPSYAS

SEQ ID NO: 1138 - protein, 470 aa, Artificial Sequence
  Fusion Protein
HGEGTFTSDLSKQLEEEAVQLFIEWLKAGGPKKIRYSGGGGGGGSGGGGSGGGGSADKTHTCPPCPAPELLGGPSVFLFPPKPKDTLMISRTPEVTCVVVDVSHEDPEVKFNWYVDGVEVHNAKTKPREEQYNNASRVVSVLTVLHQDWLNGKEYKCKVSNKALPAPIEKTISKAKGQPREPQVYTLPPSRDELTKNQVSLTCLVKGFYPSDIAVEWESNGQPENNYKTTPPVLDSDGSFFLYSKLTVDKSRWQQGNVFSCSVMHEALHNHYTQKSLSLSPGGGGSGSAHPIPDSSPLLQFGGQVRQRYLYTDDACQTEAHLEIREDGTVGGAADQSPESLLQLKALKPGVIQILGVKTSRFLCQRPDGALYGSLHFDPEACSFRELLLEDGYNVYQSEAHGLPLHLPGCKSPHRDPAPRGPARFLPLPGLPPAPPEPPGILAPQPPDVGSSDPLSMVYPSQGRSPSYAS

SEQ ID NO: 1139 - protein, 469 aa, Artificial Sequence
  Fusion Protein
HGEGTFTSDLSKQLEEEAVQLFIEWLKAGGPKKIRYSGGGGGGGSGGGGSGGGGSADKTHTCPPCPAPELLGGPSVFLFPPKPKDTLMISRTPEVTCVVVDVSHEDPEVKFNWYVDGVEVHNAKTKPREEQYNNASRVVSVLTVLHQDWLNGKEYKCKVSNKALPAPIEKTISKAKGQPREPQVYTLPPSRDELTKNQVSLTCLVKGFYPSDIAVEWESNGQPENNYKTTPPVLDSDGSFFLYSKLTVDKSRWQQGNVFSCSVMHEALHNHYTQKSLSLSPGGGGSGSAHPIPDSSPLLQFGGQVRQRYLYTDDACQTEAHLEIREDGTVGGAADQSPESLLQLKALKPGVIQILGVKTSRFLCQRPDGALYGSLHFDPEACSFRELLLEDGYNVYQSEAHGLPLHLCGNKSPHRDPAPRGPARFLPLPGLPPAPPEPPGILAPQPPDVGSSDPLSMVGSQGRSPSYAS

SEQ ID NO: 1140 - protein, 470 aa, Artificial Sequence
  Fusion Protein
HGEGTFTSDLSKQLEEEAVQLFIEWLKAGGPKKIRYSGGGGGGGSGGGGSGGGGSADKTHTCPPCPAPELLGGPSVFLFPPKPKDTLMISRTPEVTCVVVDVSHEDPEVKFNWYVDGVEVHNAKTKPREEQYNNASRVVSVLTVLHQDWLNGKEYKCKVSNKALPAPIEKTISKAKGQPREPQVYTLPPSRDELTKNQVSLTCLVKGFYPSDIAVEWESNGQPENNYKTTPPVLDSDGSFFLYSKLTVDKSRWQQGNVFSCSVMHEALHNHYTQKSLSLSPGGGGSGSAHPIPDSSPLLQFGGQVRQRYLYTDDACQTEAHLEIREDGTVGGAADQSPESLLQLKALKPGVIQILGVKTSRFLCQRPDGALYGSLHFDPEACSFRELLLEDGYNVYQSEAHGLPLHLCGNKSPHRDPAPRGPARFLPLPGLPPAPPEPPGILAPQPPDVGSSDPLSMVYPSQGRSPSYAS

SEQ ID NO: 1141 - protein, 471 aa, Artificial Sequence
  Fusion Protein
HGEGTFTSDLSKQLEEEAVQLFIEWLKAGGPKKIRYSGGGGGGGSGGGGSGGGGSAESKYGPPCPPCPAPEFEGGPSVFLFPPKPKDTLMISRTPEVTCVVVDVSQEDPEVQFNWYVDGVEVHNAKTKPREEQFNSTYRVVSVLTVLHQDWLNGKEYKCKVSNKGLPSSIEKTISKAKGQPREPQVYTLPPSQEEMTKNQVSLTCLVKGFYPSDIAVEWESNGQPENNYKTTPPVLDSDGSFFLYSRLTVDKSRWQEGNVFSCSVMHEALHNHYTQKSLSLSLGGGGSGSAHPIPDSSPLLQFGGQVRQRYLYTDDACQTEAHLEIREDGTVGGAADQSPESLLQLKALKPGVIQILGVKTSRFLCQRPDGALYGSLHFDPEACSFRELLLEDGYNVYQSEAHGLPLHLPGCKSPHRDPAPRGPARFLPLPGLPPAPPEPPGILAPQPPDVGSSDPLSMVGSQGRSPSYAS

SEQ ID NO: 1142 - protein, 472 aa, Artificial Sequence
  Fusion Protein
HGEGTFTSDLSKQLEEEAVQLFIEWLKAGGPKKIRYSGGGGGGGSGGGGSGGGGSAESKYGPPCPPCPAPEFEGGPSVFLFPPKPKDTLMISRTPEVTCVVVDVSQEDPEVQFNWYVDGVEVHNAKTKPREEQFNSTYRVVSVLTVLHQDWLNGKEYKCKVSNKGLPSSIEKTISKAKGQPREPQVYTLPPSQEEMTKNQVSLTCLVKGFYPSDIAVEWESNGQPENNYKTTPPVLDSDGSFFLYSRLTVDKSRWQEGNVFSCSVMHEALHNHYTQKSLSLSLGGGGSGSAHPIPDSSPLLQFGGQVRQRYLYTDDACQTEAHLEIREDGTVGGAADQSPESLLQLKALKPGVIQILGVKTSRFLCQRPDGALYGSLHFDPEACSFRELLLEDGYNVYQSEAHGLPLHLPGCKSPHRDPAPRGPARFLPLPGLPPAPPEPPGILAPQPPDVGSSDPLSMVYPSQGRSPSYAS

SEQ ID NO: 1143 - protein, 471 aa, Artificial Sequence
  Fusion Protein
HGEGTFTSDLSKQLEEEAVQLFIEWLKAGGPKKIRYSGGGGGGGSGGGGSGGGGSAESKYGPPCPPCPAPEFEGGPSVFLFPPKPKDTLMISRTPEVTCVVVDVSQEDPEVQFNWYVDGVEVHNAKTKPREEQFNSTYRVVSVLTVLHQDWLNGKEYKCKVSNKGLPSSIEKTISKAKGQPREPQVYTLPPSQEEMTKNQVSLTCLVKGFYPSDIAVEWESNGQPENNYKTTPPVLDSDGSFFLYSRLTVDKSRWQEGNVFSCSVMHEALHNHYTQKSLSLSLGGGGSGSAHPIPDSSPLLQFGGQVRQRYLYTDDACQTEAHLEIREDGTVGGAADQSPESLLQLKALKPGVIQILGVKTSRFLCQRPDGALYGSLHFDPEACSFRELLLEDGYNVYQSEAHGLPLHLCGNKSPHRDPAPRGPARFLPLPGLPPAPPEPPGILAPQPPDVGSSDPLSMVGSQGRSPSYAS

SEQ ID NO: 1144 - protein, 472 aa, Artificial Sequence
  Fusion Protein
HGEGTFTSDLSKQLEEEAVQLFIEWLKAGGPKKIRYSGGGGGGGSGGGGSGGGGSAESKYGPPCPPCPAPEFEGGPSVFLFPPKPKDTLMISRTPEVTCVVVDVSQEDPEVQFNWYVDGVEVHNAKTKPREEQFNSTYRVVSVLTVLHQDWLNGKEYKCKVSNKGLPSSIEKTISKAKGQPREPQVYTLPPSQEEMTKNQVSLTCLVKGFYPSDIAVEWESNGQPENNYKTTPPVLDSDGSFFLYSRLTVDKSRWQEGNVFSCSVMHEALHNHYTQKSLSLSLGGGGSGSAHPIPDSSPLLQFGGQVRQRYLYTDDACQTEAHLEIREDGTVGGAADQSPESLLQLKALKPGVIQILGVKTSRFLCQRPDGALYGSLHFDPEACSFRELLLEDGYNVYQSEAHGLPLHLCGNKSPHRDPAPRGPARFLPLPGLPPAPPEPPGILAPQPPDVGSSDPLSMVYPSQGRSPSYAS

SEQ ID NO: 1145 - protein, 469 aa, Artificial Sequence
  Fusion Protein
HGEGTFTSDKSKQLEEEAVRLFIEWLKAGGPKKIRYSGGGGGGGSGGGGSGGGGSADKTHTCPPCPAPEAAGGPSVFLFPPKPKDTLMISRTPEVTCVVVDVSHEDPEVKFNWYVDGVEVHNAKTKPREEQYNSTYRVVSVLTVLHQDWLNGKEYKCKVSNKALPAPIEKTISKAKGQPREPQVYTLPPSRDELTKNQVSLTCLVKGFYPSDIAVEWESNGQPENNYKTTPPVLDSDGSFFLYSKLTVDKSRWQQGNVFSCSVMHEALHNHYTQKSLSLSPGGGGSGSAHPIPDSSPLLQFGGQVRQRYLYTDDACQTEAHLEIREDGTVGGAADQSPESLLQLKALKPGVIQILGVKTSRFLCQRPDGALYGSLHFDPEACSFRELLLEDGYNVYQSEAHGLPLHLPGCKSPHRDPAPRGPARFLPLPGLPPAPPEPPGILAPQPPDVGSSDPLSMVGSQGRSPSYAS

SEQ ID NO: 1146 - protein, 470 aa, Artificial Sequence
  Fusion Protein
HGEGTFTSDKSKQLEEEAVRLFIEWLKAGGPKKIRYSGGGGGGGSGGGGSGGGGSADKTHTCPPCPAPEAAGGPSVFLFPPKPKDTLMISRTPEVTCVVVDVSHEDPEVKFNWYVDGVEVHNAKTKPREEQYNSTYRVVSVLTVLHQDWLNGKEYKCKVSNKALPAPIEKTISKAKGQPREPQVYTLPPSRDELTKNQVSLTCLVKGFYPSDIAVEWESNGQPENNYKTTPPVLDSDGSFFLYSKLTVDKSRWQQGNVFSCSVMHEALHNHYTQKSLSLSPGGGGSGSAHPIPDSSPLLQFGGQVRQRYLYTDDACQTEAHLEIREDGTVGGAADQSPESLLQLKALKPGVIQILGVKTSRFLCQRPDGALYGSLHFDPEACSFRELLLEDGYNVYQSEAHGLPLHLPGCKSPHRDPAPRGPARFLPLPGLPPAPPEPPGILAPQPPDVGSSDPLSMVYPSQGRSPSYAS

SEQ ID NO: 1147 - protein, 469 aa, Artificial Sequence
  Fusion Protein
HGEGTFTSDKSKQLEEEAVRLFIEWLKAGGPKKIRYSGGGGGGGSGGGGSGGGGSADKTHTCPPCPAPEAAGGPSVFLFPPKPKDTLMISRTPEVTCVVVDVSHEDPEVKFNWYVDGVEVHNAKTKPREEQYNSTYRVVSVLTVLHQDWLNGKEYKCKVSNKALPAPIEKTISKAKGQPREPQVYTLPPSRDELTKNQVSLTCLVKGFYPSDIAVEWESNGQPENNYKTTPPVLDSDGSFFLYSKLTVDKSRWQQGNVFSCSVMHEALHNHYTQKSLSLSPGGGGSGSAHPIPDSSPLLQFGGQVRQRYLYTDDACQTEAHLEIREDGTVGGAADQSPESLLQLKALKPGVIQILGVKTSRFLCQRPDGALYGSLHFDPEACSFRELLLEDGYNVYQSEAHGLPLHLCGNKSPHRDPAPRGPARFLPLPGLPPAPPEPPGILAPQPPDVGSSDPLSMVGSQGRSPSYAS

SEQ ID NO: 1148 - protein, 470 aa, Artificial Sequence
  Fusion Protein
HGEGTFTSDKSKQLEEEAVRLFIEWLKAGGPKKIRYSGGGGGGGSGGGGSGGGGSADKTHTCPPCPAPEAAGGPSVFLFPPKPKDTLMISRTPEVTCVVVDVSHEDPEVKFNWYVDGVEVHNAKTKPREEQYNSTYRVVSVLTVLHQDWLNGKEYKCKVSNKALPAPIEKTISKAKGQPREPQVYTLPPSRDELTKNQVSLTCLVKGFYPSDIAVEWESNGQPENNYKTTPPVLDSDGSFFLYSKLTVDKSRWQQGNVFSCSVMHEALHNHYTQKSLSLSPGGGGSGSAHPIPDSSPLLQFGGQVRQRYLYTDDACQTEAHLEIREDGTVGGAADQSPESLLQLKALKPGVIQILGVKTSRFLCQRPDGALYGSLHFDPEACSFRELLLEDGYNVYQSEAHGLPLHLCGNKSPHRDPAPRGPARFLPLPGLPPAPPEPPGILAPQPPDVGSSDPLSMVYPSQGRSPSYAS

SEQ ID NO: 1149 - protein, 469 aa, Artificial Sequence
  Fusion Protein
HGEGTFTSDKSKQLEEEAVRLFIEWLKAGGPKKIRYSGGGGGGGSGGGGSGGGGSADKTHTCPPCPAPELLGGPSVFLFPPKPKDTLMISRTPEVTCVVVDVSHEDPEVKFNWYVDGVEVHNAKTKPREEQYNNASRVVSVLTVLHQDWLNGKEYKCKVSNKALPAPIEKTISKAKGQPREPQVYTLPPSRDELTKNQVSLTCLVKGFYPSDIAVEWESNGQPENNYKTTPPVLDSDGSFFLYSKLTVDKSRWQQGNVFSCSVMHEALHNHYTQKSLSLSPGGGGSGSAHPIPDSSPLLQFGGQVRQRYLYTDDACQTEAHLEIREDGTVGGAADQSPESLLQLKALKPGVIQILGVKTSRFLCQRPDGALYGSLHFDPEACSFRELLLEDGYNVYQSEAHGLPLHLPGCKSPHRDPAPRGPARFLPLPGLPPAPPEPPGILAPQPPDVGSSDPLSMVGSQGRSPSYAS

SEQ ID NO: 1150 - protein, 470 aa, Artificial Sequence
  Fusion Protein
HGEGTFTSDKSKQLEEEAVRLFIEWLKAGGPKKIRYSGGGGGGGSGGGGSGGGGSADKTHTCPPCPAPELLGGPSVFLFPPKPKDTLMISRTPEVTCVVVDVSHEDPEVKFNWYVDGVEVHNAKTKPREEQYNNASRVVSVLTVLHQDWLNGKEYKCKVSNKALPAPIEKTISKAKGQPREPQVYTLPPSRDELTKNQVSLTCLVKGFYPSDIAVEWESNGQPENNYKTTPPVLDSDGSFFLYSKLTVDKSRWQQGNVFSCSVMHEALHNHYTQKSLSLSPGGGGSGSAHPIPDSSPLLQFGGQVRQRYLYTDDACQTEAHLEIREDGTVGGAADQSPESLLQLKALKPGVIQILGVKTSRFLCQRPDGALYGSLHFDPEACSFRELLLEDGYNVYQSEAHGLPLHLPGCKSPHRDPAPRGPARFLPLPGLPPAPPEPPGILAPQPPDVGSSDPLSMVYPSQGRSPSYAS

SEQ ID NO: 1151 - protein, 469 aa, Artificial Sequence
  Fusion Protein
HGEGTFTSDKSKQLEEEAVRLFIEWLKAGGPKKIRYSGGGGGGGSGGGGSGGGGSADKTHTCPPCPAPELLGGPSVFLFPPKPKDTLMISRTPEVTCVVVDVSHEDPEVKFNWYVDGVEVHNAKTKPREEQYNNASRVVSVLTVLHQDWLNGKEYKCKVSNKALPAPIEKTISKAKGQPREPQVYTLPPSRDELTKNQVSLTCLVKGFYPSDIAVEWESNGQPENNYKTTPPVLDSDGSFFLYSKLTVDKSRWQQGNVFSCSVMHEALHNHYTQKSLSLSPGGGGSGSAHPIPDSSPLLQFGGQVRQRYLYTDDACQTEAHLEIREDGTVGGAADQSPESLLQLKALKPGVIQILGVKTSRFLCQRPDGALYGSLHFDPEACSFRELLLEDGYNVYQSEAHGLPLHLCGNKSPHRDPAPRGPARFLPLPGLPPAPPEPPGILAPQPPDVGSSDPLSMVGSQGRSPSYAS

SEQ ID NO: 1152 - protein, 470 aa, Artificial Sequence
  Fusion Protein
HGEGTFTSDKSKQLEEEAVRLFIEWLKAGGPKKIRYSGGGGGGGSGGGGSGGGGSADKTHTCPPCPAPELLGGPSVFLFPPKPKDTLMISRTPEVTCVVVDVSHEDPEVKFNWYVDGVEVHNAKTKPREEQYNNASRVVSVLTVLHQDWLNGKEYKCKVSNKALPAPIEKTISKAKGQPREPQVYTLPPSRDELTKNQVSLTCLVKGFYPSDIAVEWESNGQPENNYKTTPPVLDSDGSFFLYSKLTVDKSRWQQGNVFSCSVMHEALHNHYTQKSLSLSPGGGGSGSAHPIPDSSPLLQFGGQVRQRYLYTDDACQTEAHLEIREDGTVGGAADQSPESLLQLKALKPGVIQILGVKTSRFLCQRPDGALYGSLHFDPEACSFRELLLEDGYNVYQSEAHGLPLHLCGNKSPHRDPAPRGPARFLPLPGLPPAPPEPPGILAPQPPDVGSSDPLSMVYPSQGRSPSYAS

SEQ ID NO: 1153 - protein, 471 aa, Artificial Sequence
  Fusion Protein
HGEGTFTSDKSKQLEEEAVRLFIEWLKAGGPKKIRYSGGGGGGGSGGGGSGGGGSAESKYGPPCPPCPAPEFEGGPSVFLFPPKPKDTLMISRTPEVTCVVVDVSQEDPEVQFNWYVDGVEVHNAKTKPREEQFNSTYRVVSVLTVLHQDWLNGKEYKCKVSNKGLPSSIEKTISKAKGQPREPQVYTLPPSQEEMTKNQVSLTCLVKGFYPSDIAVEWESNGQPENNYKTTPPVLDSDGSFFLYSRLTVDKSRWQEGNVFSCSVMHEALHNHYTQKSLSLSLGGGGSGSAHPIPDSSPLLQFGGQVRQRYLYTDDACQTEAHLEIREDGTVGGAADQSPESLLQLKALKPGVIQILGVKTSRFLCQRPDGALYGSLHFDPEACSFRELLLEDGYNVYQSEAHGLPLHLPGCKSPHRDPAPRGPARFLPLPGLPPAPPEPPGILAPQPPDVGSSDPLSMVGSQGRSPSYAS

SEQ ID NO: 1154 - protein, 472 aa, Artificial Sequence
  Fusion Protein
HGEGTFTSDKSKQLEEEAVRLFIEWLKAGGPKKIRYSGGGGGGGSGGGGSGGGGSAESKYGPPCPPCPAPEFEGGPSVFLFPPKPKDTLMISRTPEVTCVVVDVSQEDPEVQFNWYVDGVEVHNAKTKPREEQFNSTYRVVSVLTVLHQDWLNGKEYKCKVSNKGLPSSIEKTISKAKGQPREPQVYTLPPSQEEMTKNQVSLTCLVKGFYPSDIAVEWESNGQPENNYKTTPPVLDSDGSFFLYSRLTVDKSRWQEGNVFSCSVMHEALHNHYTQKSLSLSLGGGGSGSAHPIPDSSPLLQFGGQVRQRYLYTDDACQTEAHLEIREDGTVGGAADQSPESLLQLKALKPGVIQILGVKTSRFLCQRPDGALYGSLHFDPEACSFRELLLEDGYNVYQSEAHGLPLHLPGCKSPHRDPAPRGPARFLPLPGLPPAPPEPPGILAPQPPDVGSSDPLSMVYPSQGRSPSYAS

SEQ ID NO: 1155 - protein, 471 aa, Artificial Sequence
  Fusion Protein
HGEGTFTSDKSKQLEEEAVRLFIEWLKAGGPKKIRYSGGGGGGGSGGGGSGGGGSAESKYGPPCPPCPAPEFEGGPSVFLFPPKPKDTLMISRTPEVTCVVVDVSQEDPEVQFNWYVDGVEVHNAKTKPREEQFNSTYRVVSVLTVLHQDWLNGKEYKCKVSNKGLPSSIEKTISKAKGQPREPQVYTLPPSQEEMTKNQVSLTCLVKGFYPSDIAVEWESNGQPENNYKTTPPVLDSDGSFFLYSRLTVDKSRWQEGNVFSCSVMHEALHNHYTQKSLSLSLGGGGSGSAHPIPDSSPLLQFGGQVRQRYLYTDDACQTEAHLEIREDGTVGGAADQSPESLLQLKALKPGVIQILGVKTSRFLCQRPDGALYGSLHFDPEACSFRELLLEDGYNVYQSEAHGLPLHLCGNKSPHRDPAPRGPARFLPLPGLPPAPPEPPGILAPQPPDVGSSDPLSMVGSQGRSPSYAS

SEQ ID NO: 1156 - protein, 472 aa, Artificial Sequence
  Fusion Protein
HGEGTFTSDKSKQLEEEAVRLFIEWLKAGGPKKIRYSGGGGGGGSGGGGSGGGGSAESKYGPPCPPCPAPEFEGGPSVFLFPPKPKDTLMISRTPEVTCVVVDVSQEDPEVQFNWYVDGVEVHNAKTKPREEQFNSTYRVVSVLTVLHQDWLNGKEYKCKVSNKGLPSSIEKTISKAKGQPREPQVYTLPPSQEEMTKNQVSLTCLVKGFYPSDIAVEWESNGQPENNYKTTPPVLDSDGSFFLYSRLTVDKSRWQEGNVFSCSVMHEALHNHYTQKSLSLSLGGGGSGSAHPIPDSSPLLQFGGQVRQRYLYTDDACQTEAHLEIREDGTVGGAADQSPESLLQLKALKPGVIQILGVKTSRFLCQRPDGALYGSLHFDPEACSFRELLLEDGYNVYQSEAHGLPLHLCGNKSPHRDPAPRGPARFLPLPGLPPAPPEPPGILAPQPPDVGSSDPLSMVYPSQGRSPSYAS

SEQ ID NO: 1157 - protein, 469 aa, Artificial Sequence
  Fusion Protein
HGEGTFTSDKSKQLEEEAVQLFIEWLKAGGPKKIRYSGGGGGGGSGGGGSGGGGSADKTHTCPPCPAPEAAGGPSVFLFPPKPKDTLMISRTPEVTCVVVDVSHEDPEVKFNWYVDGVEVHNAKTKPREEQYNSTYRVVSVLTVLHQDWLNGKEYKCKVSNKALPAPIEKTISKAKGQPREPQVYTLPPSRDELTKNQVSLTCLVKGFYPSDIAVEWESNGQPENNYKTTPPVLDSDGSFFLYSKLTVDKSRWQQGNVFSCSVMHEALHNHYTQKSLSLSPGGGGSGSAHPIPDSSPLLQFGGQVRQRYLYTDDACQTEAHLEIREDGTVGGAADQSPESLLQLKALKPGVIQILGVKTSRFLCQRPDGALYGSLHFDPEACSFRELLLEDGYNVYQSEAHGLPLHLPGCKSPHRDPAPRGPARFLPLPGLPPAPPEPPGILAPQPPDVGSSDPLSMVGSQGRSPSYAS

SEQ ID NO: 1158 - protein, 470 aa, Artificial Sequence
  Fusion Protein
HGEGTFTSDKSKQLEEEAVQLFIEWLKAGGPKKIRYSGGGGGGGSGGGGSGGGGSADKTHTCPPCPAPEAAGGPSVFLFPPKPKDTLMISRTPEVTCVVVDVSHEDPEVKFNWYVDGVEVHNAKTKPREEQYNSTYRVVSVLTVLHQDWLNGKEYKCKVSNKALPAPIEKTISKAKGQPREPQVYTLPPSRDELTKNQVSLTCLVKGFYPSDIAVEWESNGQPENNYKTTPPVLDSDGSFFLYSKLTVDKSRWQQGNVFSCSVMHEALHNHYTQKSLSLSPGGGGSGSAHPIPDSSPLLQFGGQVRQRYLYTDDACQTEAHLEIREDGTVGGAADQSPESLLQLKALKPGVIQILGVKTSRFLCQRPDGALYGSLHFDPEACSFRELLLEDGYNVYQSEAHGLPLHLPGCKSPHRDPAPRGPARFLPLPGLPPAPPEPPGILAPQPPDVGSSDPLSMVYPSQGRSPSYAS

SEQ ID NO: 1159 - protein, 469 aa, Artificial Sequence
  Fusion Protein
HGEGTFTSDKSKQLEEEAVQLFIEWLKAGGPKKIRYSGGGGGGGSGGGGSGGGGSADKTHTCPPCPAPEAAGGPSVFLFPPKPKDTLMISRTPEVTCVVVDVSHEDPEVKFNWYVDGVEVHNAKTKPREEQYNSTYRVVSVLTVLHQDWLNGKEYKCKVSNKALPAPIEKTISKAKGQPREPQVYTLPPSRDELTKNQVSLTCLVKGFYPSDIAVEWESNGQPENNYKTTPPVLDSDGSFFLYSKLTVDKSRWQQGNVFSCSVMHEALHNHYTQKSLSLSPGGGGSGSAHPIPDSSPLLQFGGQVRQRYLYTDDACQTEAHLEIREDGTVGGAADQSPESLLQLKALKPGVIQILGVKTSRFLCQRPDGALYGSLHFDPEACSFRELLLEDGYNVYQSEAHGLPLHLCGNKSPHRDPAPRGPARFLPLPGLPPAPPEPPGILAPQPPDVGSSDPLSMVGSQGRSPSYAS

SEQ ID NO: 1160 - protein, 470 aa, Artificial Sequence
  Fusion Protein
HGEGTFTSDKSKQLEEEAVQLFIEWLKAGGPKKIRYSGGGGGGGSGGGGSGGGGSADKTHTCPPCPAPEAAGGPSVFLFPPKPKDTLMISRTPEVTCVVVDVSHEDPEVKFNWYVDGVEVHNAKTKPREEQYNSTYRVVSVLTVLHQDWLNGKEYKCKVSNKALPAPIEKTISKAKGQPREPQVYTLPPSRDELTKNQVSLTCLVKGFYPSDIAVEWESNGQPENNYKTTPPVLDSDGSFFLYSKLTVDKSRWQQGNVFSCSVMHEALHNHYTQKSLSLSPGGGGSGSAHPIPDSSPLLQFGGQVRQRYLYTDDACQTEAHLEIREDGTVGGAADQSPESLLQLKALKPGVIQILGVKTSRFLCQRPDGALYGSLHFDPEACSFRELLLEDGYNVYQSEAHGLPLHLCGNKSPHRDPAPRGPARFLPLPGLPPAPPEPPGILAPQPPDVGSSDPLSMVYPSQGRSPSYAS

SEQ ID NO: 1161 - protein, 469 aa, Artificial Sequence
  Fusion Protein
HGEGTFTSDKSKQLEEEAVQLFIEWLKAGGPKKIRYSGGGGGGGSGGGGSGGGGSADKTHTCPPCPAPELLGGPSVFLFPPKPKDTLMISRTPEVTCVVVDVSHEDPEVKFNWYVDGVEVHNAKTKPREEQYNNASRVVSVLTVLHQDWLNGKEYKCKVSNKALPAPIEKTISKAKGQPREPQVYTLPPSRDELTKNQVSLTCLVKGFYPSDIAVEWESNGQPENNYKTTPPVLDSDGSFFLYSKLTVDKSRWQQGNVFSCSVMHEALHNHYTQKSLSLSPGGGGSGSAHPIPDSSPLLQFGGQVRQRYLYTDDACQTEAHLEIREDGTVGGAADQSPESLLQLKALKPGVIQILGVKTSRFLCQRPDGALYGSLHFDPEACSFRELLLEDGYNVYQSEAHGLPLHLPGCKSPHRDPAPRGPARFLPLPGLPPAPPEPPGILAPQPPDVGSSDPLSMVGSQGRSPSYAS

SEQ ID NO: 1162 - protein, 470 aa, Artificial Sequence
  Fusion Protein
HGEGTFTSDKSKQLEEEAVQLFIEWLKAGGPKKIRYSGGGGGGGSGGGGSGGGGSADKTHTCPPCPAPELLGGPSVFLFPPKPKDTLMISRTPEVTCVVVDVSHEDPEVKFNWYVDGVEVHNAKTKPREEQYNNASRVVSVLTVLHQDWLNGKEYKCKVSNKALPAPIEKTISKAKGQPREPQVYTLPPSRDELTKNQVSLTCLVKGFYPSDIAVEWESNGQPENNYKTTPPVLDSDGSFFLYSKLTVDKSRWQQGNVFSCSVMHEALHNHYTQKSLSLSPGGGGSGSAHPIPDSSPLLQFGGQVRQRYLYTDDACQTEAHLEIREDGTVGGAADQSPESLLQLKALKPGVIQILGVKTSRFLCQRPDGALYGSLHFDPEACSFRELLLEDGYNVYQSEAHGLPLHLPGCKSPHRDPAPRGPARFLPLPGLPPAPPEPPGILAPQPPDVGSSDPLSMVYPSQGRSPSYAS

SEQ ID NO: 1163 - protein, 469 aa, Artificial Sequence
  Fusion Protein
HGEGTFTSDKSKQLEEEAVQLFIEWLKAGGPKKIRYSGGGGGGGSGGGGSGGGGSADKTHTCPPCPAPELLGGPSVFLFPPKPKDTLMISRTPEVTCVVVDVSHEDPEVKFNWYVDGVEVHNAKTKPREEQYNNASRVVSVLTVLHQDWLNGKEYKCKVSNKALPAPIEKTISKAKGQPREPQVYTLPPSRDELTKNQVSLTCLVKGFYPSDIAVEWESNGQPENNYKTTPPVLDSDGSFFLYSKLTVDKSRWQQGNVFSCSVMHEALHNHYTQKSLSLSPGGGGSGSAHPIPDSSPLLQFGGQVRQRYLYTDDACQTEAHLEIREDGTVGGAADQSPESLLQLKALKPGVIQILGVKTSRFLCQRPDGALYGSLHFDPEACSFRELLLEDGYNVYQSEAHGLPLHLCGNKSPHRDPAPRGPARFLPLPGLPPAPPEPPGILAPQPPDVGSSDPLSMVGSQGRSPSYAS

SEQ ID NO: 1164 - protein, 470 aa, Artificial Sequence
  Fusion Protein
HGEGTFTSDKSKQLEEEAVQLFIEWLKAGGPKKIRYSGGGGGGGSGGGGSGGGGSADKTHTCPPCPAPELLGGPSVFLFPPKPKDTLMISRTPEVTCVVVDVSHEDPEVKFNWYVDGVEVHNAKTKPREEQYNNASRVVSVLTVLHQDWLNGKEYKCKVSNKALPAPIEKTISKAKGQPREPQVYTLPPSRDELTKNQVSLTCLVKGFYPSDIAVEWESNGQPENNYKTTPPVLDSDGSFFLYSKLTVDKSRWQQGNVFSCSVMHEALHNHYTQKSLSLSPGGGGSGSAHPIPDSSPLLQFGGQVRQRYLYTDDACQTEAHLEIREDGTVGGAADQSPESLLQLKALKPGVIQILGVKTSRFLCQRPDGALYGSLHFDPEACSFRELLLEDGYNVYQSEAHGLPLHLCGNKSPHRDPAPRGPARFLPLPGLPPAPPEPPGILAPQPPDVGSSDPLSMVYPSQGRSPSYAS

SEQ ID NO: 1165 - protein, 471 aa, Artificial Sequence
  Fusion Protein
HGEGTFTSDKSKQLEEEAVQLFIEWLKAGGPKKIRYSGGGGGGGSGGGGSGGGGSAESKYGPPCPPCPAPEFEGGPSVFLFPPKPKDTLMISRTPEVTCVVVDVSQEDPEVQFNWYVDGVEVHNAKTKPREEQFNSTYRVVSVLTVLHQDWLNGKEYKCKVSNKGLPSSIEKTISKAKGQPREPQVYTLPPSQEEMTKNQVSLTCLVKGFYPSDIAVEWESNGQPENNYKTTPPVLDSDGSFFLYSRLTVDKSRWQEGNVFSCSVMHEALHNHYTQKSLSLSLGGGGSGSAHPIPDSSPLLQFGGQVRQRYLYTDDACQTEAHLEIREDGTVGGAADQSPESLLQLKALKPGVIQILGVKTSRFLCQRPDGALYGSLHFDPEACSFRELLLEDGYNVYQSEAHGLPLHLPGCKSPHRDPAPRGPARFLPLPGLPPAPPEPPGILAPQPPDVGSSDPLSMVGSQGRSPSYAS

SEQ ID NO: 1166 - protein, 472 aa, Artificial Sequence
  Fusion Protein
HGEGTFTSDKSKQLEEEAVQLFIEWLKAGGPKKIRYSGGGGGGGSGGGGSGGGGSAESKYGPPCPPCPAPEFEGGPSVFLFPPKPKDTLMISRTPEVTCVVVDVSQEDPEVQFNWYVDGVEVHNAKTKPREEQFNSTYRVVSVLTVLHQDWLNGKEYKCKVSNKGLPSSIEKTISKAKGQPREPQVYTLPPSQEEMTKNQVSLTCLVKGFYPSDIAVEWESNGQPENNYKTTPPVLDSDGSFFLYSRLTVDKSRWQEGNVFSCSVMHEALHNHYTQKSLSLSLGGGGSGSAHPIPDSSPLLQFGGQVRQRYLYTDDACQTEAHLEIREDGTVGGAADQSPESLLQLKALKPGVIQILGVKTSRFLCQRPDGALYGSLHFDPEACSFRELLLEDGYNVYQSEAHGLPLHLPGCKSPHRDPAPRGPARFLPLPGLPPAPPEPPGILAPQPPDVGSSDPLSMVYPSQGRSPSYAS

SEQ ID NO: 1167 - protein, 471 aa, Artificial Sequence
  Fusion Protein
HGEGTFTSDKSKQLEEEAVQLFIEWLKAGGPKKIRYSGGGGGGGSGGGGSGGGGSAESKYGPPCPPCPAPEFEGGPSVFLFPPKPKDTLMISRTPEVTCVVVDVSQEDPEVQFNWYVDGVEVHNAKTKPREEQFNSTYRVVSVLTVLHQDWLNGKEYKCKVSNKGLPSSIEKTISKAKGQPREPQVYTLPPSQEEMTKNQVSLTCLVKGFYPSDIAVEWESNGQPENNYKTTPPVLDSDGSFFLYSRLTVDKSRWQEGNVFSCSVMHEALHNHYTQKSLSLSLGGGGSGSAHPIPDSSPLLQFGGQVRQRYLYTDDACQTEAHLEIREDGTVGGAADQSPESLLQLKALKPGVIQILGVKTSRFLCQRPDGALYGSLHFDPEACSFRELLLEDGYNVYQSEAHGLPLHLCGNKSPHRDPAPRGPARFLPLPGLPPAPPEPPGILAPQPPDVGSSDPLSMVGSQGRSPSYAS

SEQ ID NO: 1168 - protein, 472 aa, Artificial Sequence
  Fusion Protein
HGEGTFTSDKSKQLEEEAVQLFIEWLKAGGPKKIRYSGGGGGGGSGGGGSGGGGSAESKYGPPCPPCPAPEFEGGPSVFLFPPKPKDTLMISRTPEVTCVVVDVSQEDPEVQFNWYVDGVEVHNAKTKPREEQFNSTYRVVSVLTVLHQDWLNGKEYKCKVSNKGLPSSIEKTISKAKGQPREPQVYTLPPSQEEMTKNQVSLTCLVKGFYPSDIAVEWESNGQPENNYKTTPPVLDSDGSFFLYSRLTVDKSRWQEGNVFSCSVMHEALHNHYTQKSLSLSLGGGGSGSAHPIPDSSPLLQFGGQVRQRYLYTDDACQTEAHLEIREDGTVGGAADQSPESLLQLKALKPGVIQILGVKTSRFLCQRPDGALYGSLHFDPEACSFRELLLEDGYNVYQSEAHGLPLHLCGNKSPHRDPAPRGPARFLPLPGLPPAPPEPPGILAPQPPDVGSSDPLSMVYPSQGRSPSYAS

SEQ ID NO: 1169 - protein, 470 aa, Artificial Sequence
  Fusion Protein
GHGEGTFTSDKSKQLEEEAVRLFIEWLKAGGPKKQRLSGGGGGGGSGGGGSGGGGSADKTHTCPPCPAPEAAGGPSVFLFPPKPKDTLMISRTPEVTCVVVDVSHEDPEVKFNWYVDGVEVHNAKTKPREEQYNSTYRVVSVLTVLHQDWLNGKEYKCKVSNKALPAPIEKTISKAKGQPREPQVYTLPPSRDELTKNQVSLTCLVKGFYPSDIAVEWESNGQPENNYKTTPPVLDSDGSFFLYSKLTVDKSRWQQGNVFSCSVMHEALHNHYTQKSLSLSPGGGGSGSAHPIPDSSPLLQFGGQVRQRYLYTDDACQTEAHLEIREDGTVGGAADQSPESLLQLKALKPGVIQILGVKTSRFLCQRPDGALYGSLHFDPEACSFRELLLEDGYNVYQSEAHGLPLHLPGCKSPHRDPAPRGPARFLPLPGLPPAPPEPPGILAPQPPDVGSSDPLSMVGSQGRSPSYAS

SEQ ID NO: 1170 - protein, 471 aa, Artificial Sequence
  Fusion Protein
GHGEGTFTSDKSKQLEEEAVRLFIEWLKAGGPKKQRLSGGGGGGGSGGGGSGGGGSADKTHTCPPCPAPEAAGGPSVFLFPPKPKDTLMISRTPEVTCVVVDVSHEDPEVKFNWYVDGVEVHNAKTKPREEQYNSTYRVVSVLTVLHQDWLNGKEYKCKVSNKALPAPIEKTISKAKGQPREPQVYTLPPSRDELTKNQVSLTCLVKGFYPSDIAVEWESNGQPENNYKTTPPVLDSDGSFFLYSKLTVDKSRWQQGNVFSCSVMHEALHNHYTQKSLSLSPGGGGSGSAHPIPDSSPLLQFGGQVRQRYLYTDDACQTEAHLEIREDGTVGGAADQSPESLLQLKALKPGVIQILGVKTSRFLCQRPDGALYGSLHFDPEACSFRELLLEDGYNVYQSEAHGLPLHLPGCKSPHRDPAPRGPARFLPLPGLPPAPPEPPGILAPQPPDVGSSDPLSMVYPSQGRSPSYAS

SEQ ID NO: 1171 - protein, 470 aa, Artificial Sequence
  Fusion Protein
GHGEGTFTSDKSKQLEEEAVRLFIEWLKAGGPKKQRLSGGGGGGGSGGGGSGGGGSADKTHTCPPCPAPEAAGGPSVFLFPPKPKDTLMISRTPEVTCVVVDVSHEDPEVKFNWYVDGVEVHNAKTKPREEQYNSTYRVVSVLTVLHQDWLNGKEYKCKVSNKALPAPIEKTISKAKGQPREPQVYTLPPSRDELTKNQVSLTCLVKGFYPSDIAVEWESNGQPENNYKTTPPVLDSDGSFFLYSKLTVDKSRWQQGNVFSCSVMHEALHNHYTQKSLSLSPGGGGSGSAHPIPDSSPLLQFGGQVRQRYLYTDDACQTEAHLEIREDGTVGGAADQSPESLLQLKALKPGVIQILGVKTSRFLCQRPDGALYGSLHFDPEACSFRELLLEDGYNVYQSEAHGLPLHLCGNKSPHRDPAPRGPARFLPLPGLPPAPPEPPGILAPQPPDVGSSDPLSMVGSQGRSPSYAS

SEQ ID NO: 1172 - protein, 471 aa, Artificial Sequence
  Fusion Protein
GHGEGTFTSDKSKQLEEEAVRLFIEWLKAGGPKKQRLSGGGGGGGSGGGGSGGGGSADKTHTCPPCPAPEAAGGPSVFLFPPKPKDTLMISRTPEVTCVVVDVSHEDPEVKFNWYVDGVEVHNAKTKPREEQYNSTYRVVSVLTVLHQDWLNGKEYKCKVSNKALPAPIEKTISKAKGQPREPQVYTLPPSRDELTKNQVSLTCLVKGFYPSDIAVEWESNGQPENNYKTTPPVLDSDGSFFLYSKLTVDKSRWQQGNVFSCSVMHEALHNHYTQKSLSLSPGGGGSGSAHPIPDSSPLLQFGGQVRQRYLYTDDACQTEAHLEIREDGTVGGAADQSPESLLQLKALKPGVIQILGVKTSRFLCQRPDGALYGSLHFDPEACSFRELLLEDGYNVYQSEAHGLPLHLCGNKSPHRDPAPRGPARFLPLPGLPPAPPEPPGILAPQPPDVGSSDPLSMVYPSQGRSPSYAS

SEQ ID NO: 1173 - protein, 470 aa, Artificial Sequence
  Fusion Protein
GHGEGTFTSDKSKQLEEEAVRLFIEWLKAGGPKKQRLSGGGGGGGSGGGGSGGGGSADKTHTCPPCPAPELLGGPSVFLFPPKPKDTLMISRTPEVTCVVVDVSHEDPEVKFNWYVDGVEVHNAKTKPREEQYNNASRVVSVLTVLHQDWLNGKEYKCKVSNKALPAPIEKTISKAKGQPREPQVYTLPPSRDELTKNQVSLTCLVKGFYPSDIAVEWESNGQPENNYKTTPPVLDSDGSFFLYSKLTVDKSRWQQGNVFSCSVMHEALHNHYTQKSLSLSPGGGGSGSAHPIPDSSPLLQFGGQVRQRYLYTDDACQTEAHLEIREDGTVGGAADQSPESLLQLKALKPGVIQILGVKTSRFLCQRPDGALYGSLHFDPEACSFRELLLEDGYNVYQSEAHGLPLHLPGCKSPHRDPAPRGPARFLPLPGLPPAPPEPPGILAPQPPDVGSSDPLSMVGSQGRSPSYAS

SEQ ID NO: 1174 - protein, 471 aa, Artificial Sequence
  Fusion Protein
GHGEGTFTSDKSKQLEEEAVRLFIEWLKAGGPKKQRLSGGGGGGGSGGGGSGGGGSADKTHTCPPCPAPELLGGPSVFLFPPKPKDTLMISRTPEVTCVVVDVSHEDPEVKFNWYVDGVEVHNAKTKPREEQYNNASRVVSVLTVLHQDWLNGKEYKCKVSNKALPAPIEKTISKAKGQPREPQVYTLPPSRDELTKNQVSLTCLVKGFYPSDIAVEWESNGQPENNYKTTPPVLDSDGSFFLYSKLTVDKSRWQQGNVFSCSVMHEALHNHYTQKSLSLSPGGGGSGSAHPIPDSSPLLQFGGQVRQRYLYTDDACQTEAHLEIREDGTVGGAADQSPESLLQLKALKPGVIQILGVKTSRFLCQRPDGALYGSLHFDPEACSFRELLLEDGYNVYQSEAHGLPLHLPGCKSPHRDPAPRGPARFLPLPGLPPAPPEPPGILAPQPPDVGSSDPLSMVYPSQGRSPSYAS

SEQ ID NO: 1175 - protein, 470 aa, Artificial Sequence
  Fusion Protein
GHGEGTFTSDKSKQLEEEAVRLFIEWLKAGGPKKQRLSGGGGGGGSGGGGSGGGGSADKTHTCPPCPAPELLGGPSVFLFPPKPKDTLMISRTPEVTCVVVDVSHEDPEVKFNWYVDGVEVHNAKTKPREEQYNNASRVVSVLTVLHQDWLNGKEYKCKVSNKALPAPIEKTISKAKGQPREPQVYTLPPSRDELTKNQVSLTCLVKGFYPSDIAVEWESNGQPENNYKTTPPVLDSDGSFFLYSKLTVDKSRWQQGNVFSCSVMHEALHNHYTQKSLSLSPGGGGSGSAHPIPDSSPLLQFGGQVRQRYLYTDDACQTEAHLEIREDGTVGGAADQSPESLLQLKALKPGVIQILGVKTSRFLCQRPDGALYGSLHFDPEACSFRELLLEDGYNVYQSEAHGLPLHLCGNKSPHRDPAPRGPARFLPLPGLPPAPPEPPGILAPQPPDVGSSDPLSMVGSQGRSPSYAS

SEQ ID NO: 1176 - protein, 471 aa, Artificial Sequence
  Fusion Protein
GHGEGTFTSDKSKQLEEEAVRLFIEWLKAGGPKKQRLSGGGGGGGSGGGGSGGGGSADKTHTCPPCPAPELLGGPSVFLFPPKPKDTLMISRTPEVTCVVVDVSHEDPEVKFNWYVDGVEVHNAKTKPREEQYNNASRVVSVLTVLHQDWLNGKEYKCKVSNKALPAPIEKTISKAKGQPREPQVYTLPPSRDELTKNQVSLTCLVKGFYPSDIAVEWESNGQPENNYKTTPPVLDSDGSFFLYSKLTVDKSRWQQGNVFSCSVMHEALHNHYTQKSLSLSPGGGGSGSAHPIPDSSPLLQFGGQVRQRYLYTDDACQTEAHLEIREDGTVGGAADQSPESLLQLKALKPGVIQILGVKTSRFLCQRPDGALYGSLHFDPEACSFRELLLEDGYNVYQSEAHGLPLHLCGNKSPHRDPAPRGPARFLPLPGLPPAPPEPPGILAPQPPDVGSSDPLSMVYPSQGRSPSYAS

SEQ ID NO: 1177 - protein, 473 aa, Artificial Sequence
  Fusion Protein
GHGEGTFTSDKSKQLEEEAVRLFIEWLKAGGPKKQRLSGGGGGGGSGGGGSGGGGSAESKYGPPCPPCPAPEFEGGPSVFLFPPKPKDTLMISRTPEVTCVVVDVSQEDPEVQFNWYVDGVEVHNAKTKPREEQFNSTYRVVSVLTVLHQDWLNGKEYKCKVSNKGLPSSIEKTISKAKGQPREPQVYTLPPSQEEMTKNQVSLTCLVKGFYPSDIAVEWESNGQPENNYKTTPPVLDSDGSFFLYSRLTVDKSRWQEGNVFSCSVMHEALHNHYTQKSLSLSLGGGGSGSAHPIPDSSPLLQFGGQVRQRYLYTDDACQTEAHLEIREDGTVGGAADQSPESLLQLKALKPGVIQILGVKTSRFLCQRPDGALYGSLHFDPEACSFRELLLEDGYNVYQSEAHGLPLHLPGCKSPHRDPAPRGPARFLPLPGLPPAPPEPPGILAPQPPDVGSSDPLSMVYPSQGRSPSYAS

SEQ ID NO: 1178 - protein, 472 aa, Artificial Sequence
  Fusion Protein
GHGEGTFTSDKSKQLEEEAVRLFIEWLKAGGPKKQRLSGGGGGGGSGGGGSGGGGSAESKYGPPCPPCPAPEFEGGPSVFLFPPKPKDTLMISRTPEVTCVVVDVSQEDPEVQFNWYVDGVEVHNAKTKPREEQFNSTYRVVSVLTVLHQDWLNGKEYKCKVSNKGLPSSIEKTISKAKGQPREPQVYTLPPSQEEMTKNQVSLTCLVKGFYPSDIAVEWESNGQPENNYKTTPPVLDSDGSFFLYSRLTVDKSRWQEGNVFSCSVMHEALHNHYTQKSLSLSLGGGGSGSAHPIPDSSPLLQFGGQVRQRYLYTDDACQTEAHLEIREDGTVGGAADQSPESLLQLKALKPGVIQILGVKTSRFLCQRPDGALYGSLHFDPEACSFRELLLEDGYNVYQSEAHGLPLHLCGNKSPHRDPAPRGPARFLPLPGLPPAPPEPPGILAPQPPDVGSSDPLSMVGSQGRSPSYAS

SEQ ID NO: 1179 - protein, 473 aa, Artificial Sequence
  Fusion Protein
GHGEGTFTSDKSKQLEEEAVRLFIEWLKAGGPKKQRLSGGGGGGGSGGGGSGGGGSAESKYGPPCPPCPAPEFEGGPSVFLFPPKPKDTLMISRTPEVTCVVVDVSQEDPEVQFNWYVDGVEVHNAKTKPREEQFNSTYRVVSVLTVLHQDWLNGKEYKCKVSNKGLPSSIEKTISKAKGQPREPQVYTLPPSQEEMTKNQVSLTCLVKGFYPSDIAVEWESNGQPENNYKTTPPVLDSDGSFFLYSRLTVDKSRWQEGNVFSCSVMHEALHNHYTQKSLSLSLGGGGSGSAHPIPDSSPLLQFGGQVRQRYLYTDDACQTEAHLEIREDGTVGGAADQSPESLLQLKALKPGVIQILGVKTSRFLCQRPDGALYGSLHFDPEACSFRELLLEDGYNVYQSEAHGLPLHLCGNKSPHRDPAPRGPARFLPLPGLPPAPPEPPGILAPQPPDVGSSDPLSMVYPSQGRSPSYAS

SEQ ID NO: 1180 - protein, 472 aa, Artificial Sequence
  Fusion Protein
GHGEGTFTSDLSIQLEEEAVRLFIEWLLAGGPSSGKPPPKGGGGGGGSGGGGSGGGGSADKTHTCPPCPAPEAAGGPSVFLFPPKPKDTLMISRTPEVTCVVVDVSHEDPEVKFNWYVDGVEVHNAKTKPREEQYNSTYRVVSVLTVLHQDWLNGKEYKCKVSNKALPAPIEKTISKAKGQPREPQVYTLPPSRDELTKNQVSLTCLVKGFYPSDIAVEWESNGQPENNYKTTPPVLDSDGSFFLYSKLTVDKSRWQQGNVFSCSVMHEALHNHYTQKSLSLSPGGGGSGSAHPIPDSSPLLQFGGQVRQRYLYTDDACQTEAHLEIREDGTVGGAADQSPESLLQLKALKPGVIQILGVKTSRFLCQRPDGALYGSLHFDPEACSFRELLLEDGYNVYQSEAHGLPLHLPGCKSPHRDPAPRGPARFLPLPGLPPAPPEPPGILAPQPPDVGSSDPLSMVGSQGRSPSYAS

SEQ ID NO: 1181 - protein, 473 aa, Artificial Sequence
  Fusion Protein
GHGEGTFTSDLSIQLEEEAVRLFIEWLLAGGPSSGKPPPKGGGGGGGSGGGGSGGGGSADKTHTCPPCPAPEAAGGPSVFLFPPKPKDTLMISRTPEVTCVVVDVSHEDPEVKFNWYVDGVEVHNAKTKPREEQYNSTYRVVSVLTVLHQDWLNGKEYKCKVSNKALPAPIEKTISKAKGQPREPQVYTLPPSRDELTKNQVSLTCLVKGFYPSDIAVEWESNGQPENNYKTTPPVLDSDGSFFLYSKLTVDKSRWQQGNVFSCSVMHEALHNHYTQKSLSLSPGGGGSGSAHPIPDSSPLLQFGGQVRQRYLYTDDACQTEAHLEIREDGTVGGAADQSPESLLQLKALKPGVIQILGVKTSRFLCQRPDGALYGSLHFDPEACSFRELLLEDGYNVYQSEAHGLPLHLPGCKSPHRDPAPRGPARFLPLPGLPPAPPEPPGILAPQPPDVGSSDPLSMVYPSQGRSPSYAS

SEQ ID NO: 1182 - protein, 472 aa, Artificial Sequence
  Fusion Protein
GHGEGTFTSDLSIQLEEEAVRLFIEWLLAGGPSSGKPPPKGGGGGGGSGGGGSGGGGSADKTHTCPPCPAPEAAGGPSVFLFPPKPKDTLMISRTPEVTCVVVDVSHEDPEVKFNWYVDGVEVHNAKTKPREEQYNSTYRVVSVLTVLHQDWLNGKEYKCKVSNKALPAPIEKTISKAKGQPREPQVYTLPPSRDELTKNQVSLTCLVKGFYPSDIAVEWESNGQPENNYKTTPPVLDSDGSFFLYSKLTVDKSRWQQGNVFSCSVMHEALHNHYTQKSLSLSPGGGGSGSAHPIPDSSPLLQFGGQVRQRYLYTDDACQTEAHLEIREDGTVGGAADQSPESLLQLKALKPGVIQILGVKTSRFLCQRPDGALYGSLHFDPEACSFRELLLEDGYNVYQSEAHGLPLHLCGNKSPHRDPAPRGPARFLPLPGLPPAPPEPPGILAPQPPDVGSSDPLSMVGSQGRSPSYAS

SEQ ID NO: 1183 - protein, 473 aa, Artificial Sequence
  Fusion Protein
GHGEGTFTSDLSIQLEEEAVRLFIEWLLAGGPSSGKPPPKGGGGGGGSGGGGSGGGGSADKTHTCPPCPAPEAAGGPSVFLFPPKPKDTLMISRTPEVTCVVVDVSHEDPEVKFNWYVDGVEVHNAKTKPREEQYNSTYRVVSVLTVLHQDWLNGKEYKCKVSNKALPAPIEKTISKAKGQPREPQVYTLPPSRDELTKNQVSLTCLVKGFYPSDIAVEWESNGQPENNYKTTPPVLDSDGSFFLYSKLTVDKSRWQQGNVFSCSVMHEALHNHYTQKSLSLSPGGGGSGSAHPIPDSSPLLQFGGQVRQRYLYTDDACQTEAHLEIREDGTVGGAADQSPESLLQLKALKPGVIQILGVKTSRFLCQRPDGALYGSLHFDPEACSFRELLLEDGYNVYQSEAHGLPLHLCGNKSPHRDPAPRGPARFLPLPGLPPAPPEPPGILAPQPPDVGSSDPLSMVYPSQGRSPSYAS

SEQ ID NO: 1184 - protein, 472 aa, Artificial Sequence
  Fusion Protein
GHGEGTFTSDLSIQLEEEAVRLFIEWLLAGGPSSGKPPPKGGGGGGGSGGGGSGGGGSADKTHTCPPCPAPELLGGPSVFLFPPKPKDTLMISRTPEVTCVVVDVSHEDPEVKFNWYVDGVEVHNAKTKPREEQYNNASRVVSVLTVLHQDWLNGKEYKCKVSNKALPAPIEKTISKAKGQPREPQVYTLPPSRDELTKNQVSLTCLVKGFYPSDIAVEWESNGQPENNYKTTPPVLDSDGSFFLYSKLTVDKSRWQQGNVFSCSVMHEALHNHYTQKSLSLSPGGGGSGSAHPIPDSSPLLQFGGQVRQRYLYTDDACQTEAHLEIREDGTVGGAADQSPESLLQLKALKPGVIQILGVKTSRFLCQRPDGALYGSLHFDPEACSFRELLLEDGYNVYQSEAHGLPLHLPGCKSPHRDPAPRGPARFLPLPGLPPAPPEPPGILAPQPPDVGSSDPLSMVGSQGRSPSYAS

SEQ ID NO: 1185 - protein, 473 aa, Artificial Sequence
  Fusion Protein
GHGEGTFTSDLSIQLEEEAVRLFIEWLLAGGPSSGKPPPKGGGGGGGSGGGGSGGGGSADKTHTCPPCPAPELLGGPSVFLFPPKPKDTLMISRTPEVTCVVVDVSHEDPEVKFNWYVDGVEVHNAKTKPREEQYNNASRVVSVLTVLHQDWLNGKEYKCKVSNKALPAPIEKTISKAKGQPREPQVYTLPPSRDELTKNQVSLTCLVKGFYPSDIAVEWESNGQPENNYKTTPPVLDSDGSFFLYSKLTVDKSRWQQGNVFSCSVMHEALHNHYTQKSLSLSPGGGGSGSAHPIPDSSPLLQFGGQVRQRYLYTDDACQTEAHLEIREDGTVGGAADQSPESLLQLKALKPGVIQILGVKTSRFLCQRPDGALYGSLHFDPEACSFRELLLEDGYNVYQSEAHGLPLHLPGCKSPHRDPAPRGPARFLPLPGLPPAPPEPPGILAPQPPDVGSSDPLSMVYPSQGRSPSYAS

SEQ ID NO: 1186 - protein, 472 aa, Artificial Sequence
  Fusion Protein
GHGEGTFTSDLSIQLEEEAVRLFIEWLLAGGPSSGKPPPKGGGGGGGSGGGGSGGGGSADKTHTCPPCPAPELLGGPSVFLFPPKPKDTLMISRTPEVTCVVVDVSHEDPEVKFNWYVDGVEVHNAKTKPREEQYNNASRVVSVLTVLHQDWLNGKEYKCKVSNKALPAPIEKTISKAKGQPREPQVYTLPPSRDELTKNQVSLTCLVKGFYPSDIAVEWESNGQPENNYKTTPPVLDSDGSFFLYSKLTVDKSRWQQGNVFSCSVMHEALHNHYTQKSLSLSPGGGGSGSAHPIPDSSPLLQFGGQVRQRYLYTDDACQTEAHLEIREDGTVGGAADQSPESLLQLKALKPGVIQILGVKTSRFLCQRPDGALYGSLHFDPEACSFRELLLEDGYNVYQSEAHGLPLHLCGNKSPHRDPAPRGPARFLPLPGLPPAPPEPPGILAPQPPDVGSSDPLSMVGSQGRSPSYAS

SEQ ID NO: 1187 - protein, 473 aa, Artificial Sequence
  Fusion Protein
GHGEGTFTSDLSIQLEEEAVRLFIEWLLAGGPSSGKPPPKGGGGGGGSGGGGSGGGGSADKTHTCPPCPAPELLGGPSVFLFPPKPKDTLMISRTPEVTCVVVDVSHEDPEVKFNWYVDGVEVHNAKTKPREEQYNNASRVVSVLTVLHQDWLNGKEYKCKVSNKALPAPIEKTISKAKGQPREPQVYTLPPSRDELTKNQVSLTCLVKGFYPSDIAVEWESNGQPENNYKTTPPVLDSDGSFFLYSKLTVDKSRWQQGNVFSCSVMHEALHNHYTQKSLSLSPGGGGSGSAHPIPDSSPLLQFGGQVRQRYLYTDDACQTEAHLEIREDGTVGGAADQSPESLLQLKALKPGVIQILGVKTSRFLCQRPDGALYGSLHFDPEACSFRELLLEDGYNVYQSEAHGLPLHLCGNKSPHRDPAPRGPARFLPLPGLPPAPPEPPGILAPQPPDVGSSDPLSMVYPSQGRSPSYAS

SEQ ID NO: 1188 - protein, 475 aa, Artificial Sequence
  Fusion Protein
GHGEGTFTSDLSIQLEEEAVRLFIEWLLAGGPSSGKPPPKGGGGGGGSGGGGSGGGGSAESKYGPPCPPCPAPEFEGGPSVFLFPPKPKDTLMISRTPEVTCVVVDVSQEDPEVQFNWYVDGVEVHNAKTKPREEQFNSTYRVVSVLTVLHQDWLNGKEYKCKVSNKGLPSSIEKTISKAKGQPREPQVYTLPPSQEEMTKNQVSLTCLVKGFYPSDIAVEWESNGQPENNYKTTPPVLDSDGSFFLYSRLTVDKSRWQEGNVFSCSVMHEALHNHYTQKSLSLSLGGGGSGSAHPIPDSSPLLQFGGQVRQRYLYTDDACQTEAHLEIREDGTVGGAADQSPESLLQLKALKPGVIQILGVKTSRFLCQRPDGALYGSLHFDPEACSFRELLLEDGYNVYQSEAHGLPLHLPGCKSPHRDPAPRGPARFLPLPGLPPAPPEPPGILAPQPPDVGSSDPLSMVYPSQGRSPSYAS

SEQ ID NO: 1189 - protein, 474 aa, Artificial Sequence
  Fusion Protein
GHGEGTFTSDLSIQLEEEAVRLFIEWLLAGGPSSGKPPPKGGGGGGGSGGGGSGGGGSAESKYGPPCPPCPAPEFEGGPSVFLFPPKPKDTLMISRTPEVTCVVVDVSQEDPEVQFNWYVDGVEVHNAKTKPREEQFNSTYRVVSVLTVLHQDWLNGKEYKCKVSNKGLPSSIEKTISKAKGQPREPQVYTLPPSQEEMTKNQVSLTCLVKGFYPSDIAVEWESNGQPENNYKTTPPVLDSDGSFFLYSRLTVDKSRWQEGNVFSCSVMHEALHNHYTQKSLSLSLGGGGSGSAHPIPDSSPLLQFGGQVRQRYLYTDDACQTEAHLEIREDGTVGGAADQSPESLLQLKALKPGVIQILGVKTSRFLCQRPDGALYGSLHFDPEACSFRELLLEDGYNVYQSEAHGLPLHLCGNKSPHRDPAPRGPARFLPLPGLPPAPPEPPGILAPQPPDVGSSDPLSMVGSQGRSPSYAS

SEQ ID NO: 1190 - protein, 475 aa, Artificial Sequence
  Fusion Protein
GHGEGTFTSDLSIQLEEEAVRLFIEWLLAGGPSSGKPPPKGGGGGGGSGGGGSGGGGSAESKYGPPCPPCPAPEFEGGPSVFLFPPKPKDTLMISRTPEVTCVVVDVSQEDPEVQFNWYVDGVEVHNAKTKPREEQFNSTYRVVSVLTVLHQDWLNGKEYKCKVSNKGLPSSIEKTISKAKGQPREPQVYTLPPSQEEMTKNQVSLTCLVKGFYPSDIAVEWESNGQPENNYKTTPPVLDSDGSFFLYSRLTVDKSRWQEGNVFSCSVMHEALHNHYTQKSLSLSLGGGGSGSAHPIPDSSPLLQFGGQVRQRYLYTDDACQTEAHLEIREDGTVGGAADQSPESLLQLKALKPGVIQILGVKTSRFLCQRPDGALYGSLHFDPEACSFRELLLEDGYNVYQSEAHGLPLHLCGNKSPHRDPAPRGPARFLPLPGLPPAPPEPPGILAPQPPDVGSSDPLSMVYPSQGRSPSYAS

SEQ ID NO: 1191 - protein, 472 aa, Artificial Sequence
  Fusion Protein
GHGEGTFTSDLSIQLEEEAVRLFIEWLLAGGPSKGKPPPKGGGGGGGSGGGGSGGGGSADKTHTCPPCPAPEAAGGPSVFLFPPKPKDTLMISRTPEVTCVVVDVSHEDPEVKFNWYVDGVEVHNAKTKPREEQYNSTYRVVSVLTVLHQDWLNGKEYKCKVSNKALPAPIEKTISKAKGQPREPQVYTLPPSRDELTKNQVSLTCLVKGFYPSDIAVEWESNGQPENNYKTTPPVLDSDGSFFLYSKLTVDKSRWQQGNVFSCSVMHEALHNHYTQKSLSLSPGGGGSGSAHPIPDSSPLLQFGGQVRQRYLYTDDACQTEAHLEIREDGTVGGAADQSPESLLQLKALKPGVIQILGVKTSRFLCQRPDGALYGSLHFDPEACSFRELLLEDGYNVYQSEAHGLPLHLPGCKSPHRDPAPRGPARFLPLPGLPPAPPEPPGILAPQPPDVGSSDPLSMVGSQGRSPSYAS

SEQ ID NO: 1192 - protein, 473 aa, Artificial Sequence
  Fusion Protein
GHGEGTFTSDLSIQLEEEAVRLFIEWLLAGGPSKGKPPPKGGGGGGGSGGGGSGGGGSADKTHTCPPCPAPEAAGGPSVFLFPPKPKDTLMISRTPEVTCVVVDVSHEDPEVKFNWYVDGVEVHNAKTKPREEQYNSTYRVVSVLTVLHQDWLNGKEYKCKVSNKALPAPIEKTISKAKGQPREPQVYTLPPSRDELTKNQVSLTCLVKGFYPSDIAVEWESNGQPENNYKTTPPVLDSDGSFFLYSKLTVDKSRWQQGNVFSCSVMHEALHNHYTQKSLSLSPGGGGSGSAHPIPDSSPLLQFGGQVRQRYLYTDDACQTEAHLEIREDGTVGGAADQSPESLLQLKALKPGVIQILGVKTSRFLCQRPDGALYGSLHFDPEACSFRELLLEDGYNVYQSEAHGLPLHLPGCKSPHRDPAPRGPARFLPLPGLPPAPPEPPGILAPQPPDVGSSDPLSMVYPSQGRSPSYAS

SEQ ID NO: 1193 - protein, 472 aa, Artificial Sequence
  Fusion Protein
GHGEGTFTSDLSIQLEEEAVRLFIEWLLAGGPSKGKPPPKGGGGGGGSGGGGSGGGGSADKTHTCPPCPAPEAAGGPSVFLFPPKPKDTLMISRTPEVTCVVVDVSHEDPEVKFNWYVDGVEVHNAKTKPREEQYNSTYRVVSVLTVLHQDWLNGKEYKCKVSNKALPAPIEKTISKAKGQPREPQVYTLPPSRDELTKNQVSLTCLVKGFYPSDIAVEWESNGQPENNYKTTPPVLDSDGSFFLYSKLTVDKSRWQQGNVFSCSVMHEALHNHYTQKSLSLSPGGGGSGSAHPIPDSSPLLQFGGQVRQRYLYTDDACQTEAHLEIREDGTVGGAADQSPESLLQLKALKPGVIQILGVKTSRFLCQRPDGALYGSLHFDPEACSFRELLLEDGYNVYQSEAHGLPLHLCGNKSPHRDPAPRGPARFLPLPGLPPAPPEPPGILAPQPPDVGSSDPLSMVGSQGRSPSYAS

SEQ ID NO: 1194 - protein, 473 aa, Artificial Sequence
  Fusion Protein
GHGEGTFTSDLSIQLEEEAVRLFIEWLLAGGPSKGKPPPKGGGGGGGSGGGGSGGGGSADKTHTCPPCPAPEAAGGPSVFLFPPKPKDTLMISRTPEVTCVVVDVSHEDPEVKFNWYVDGVEVHNAKTKPREEQYNSTYRVVSVLTVLHQDWLNGKEYKCKVSNKALPAPIEKTISKAKGQPREPQVYTLPPSRDELTKNQVSLTCLVKGFYPSDIAVEWESNGQPENNYKTTPPVLDSDGSFFLYSKLTVDKSRWQQGNVFSCSVMHEALHNHYTQKSLSLSPGGGGSGSAHPIPDSSPLLQFGGQVRQRYLYTDDACQTEAHLEIREDGTVGGAADQSPESLLQLKALKPGVIQILGVKTSRFLCQRPDGALYGSLHFDPEACSFRELLLEDGYNVYQSEAHGLPLHLCGNKSPHRDPAPRGPARFLPLPGLPPAPPEPPGILAPQPPDVGSSDPLSMVYPSQGRSPSYAS

SEQ ID NO: 1195 - protein, 472 aa, Artificial Sequence
  Fusion Protein
GHGEGTFTSDLSIQLEEEAVRLFIEWLLAGGPSKGKPPPKGGGGGGGSGGGGSGGGGSADKTHTCPPCPAPELLGGPSVFLFPPKPKDTLMISRTPEVTCVVVDVSHEDPEVKFNWYVDGVEVHNAKTKPREEQYNNASRVVSVLTVLHQDWLNGKEYKCKVSNKALPAPIEKTISKAKGQPREPQVYTLPPSRDELTKNQVSLTCLVKGFYPSDIAVEWESNGQPENNYKTTPPVLDSDGSFFLYSKLTVDKSRWQQGNVFSCSVMHEALHNHYTQKSLSLSPGGGGSGSAHPIPDSSPLLQFGGQVRQRYLYTDDACQTEAHLEIREDGTVGGAADQSPESLLQLKALKPGVIQILGVKTSRFLCQRPDGALYGSLHFDPEACSFRELLLEDGYNVYQSEAHGLPLHLPGCKSPHRDPAPRGPARFLPLPGLPPAPPEPPGILAPQPPDVGSSDPLSMVGSQGRSPSYAS

SEQ ID NO: 1196 - protein, 473 aa, Artificial Sequence
  Fusion Protein
GHGEGTFTSDLSIQLEEEAVRLFIEWLLAGGPSKGKPPPKGGGGGGGSGGGGSGGGGSADKTHTCPPCPAPELLGGPSVFLFPPKPKDTLMISRTPEVTCVVVDVSHEDPEVKFNWYVDGVEVHNAKTKPREEQYNNASRVVSVLTVLHQDWLNGKEYKCKVSNKALPAPIEKTISKAKGQPREPQVYTLPPSRDELTKNQVSLTCLVKGFYPSDIAVEWESNGQPENNYKTTPPVLDSDGSFFLYSKLTVDKSRWQQGNVFSCSVMHEALHNHYTQKSLSLSPGGGGSGSAHPIPDSSPLLQFGGQVRQRYLYTDDACQTEAHLEIREDGTVGGAADQSPESLLQLKALKPGVIQILGVKTSRFLCQRPDGALYGSLHFDPEACSFRELLLEDGYNVYQSEAHGLPLHLPGCKSPHRDPAPRGPARFLPLPGLPPAPPEPPGILAPQPPDVGSSDPLSMVYPSQGRSPSYAS

SEQ ID NO: 1197 - protein, 472 aa, Artificial Sequence
  Fusion Protein
GHGEGTFTSDLSIQLEEEAVRLFIEWLLAGGPSKGKPPPKGGGGGGGSGGGGSGGGGSADKTHTCPPCPAPELLGGPSVFLFPPKPKDTLMISRTPEVTCVVVDVSHEDPEVKFNWYVDGVEVHNAKTKPREEQYNNASRVVSVLTVLHQDWLNGKEYKCKVSNKALPAPIEKTISKAKGQPREPQVYTLPPSRDELTKNQVSLTCLVKGFYPSDIAVEWESNGQPENNYKTTPPVLDSDGSFFLYSKLTVDKSRWQQGNVFSCSVMHEALHNHYTQKSLSLSPGGGGSGSAHPIPDSSPLLQFGGQVRQRYLYTDDACQTEAHLEIREDGTVGGAADQSPESLLQLKALKPGVIQILGVKTSRFLCQRPDGALYGSLHFDPEACSFRELLLEDGYNVYQSEAHGLPLHLCGNKSPHRDPAPRGPARFLPLPGLPPAPPEPPGILAPQPPDVGSSDPLSMVGSQGRSPSYAS

SEQ ID NO: 1198 - protein, 473 aa, Artificial Sequence
  Fusion Protein
GHGEGTFTSDLSIQLEEEAVRLFIEWLLAGGPSKGKPPPKGGGGGGGSGGGGSGGGGSADKTHTCPPCPAPELLGGPSVFLFPPKPKDTLMISRTPEVTCVVVDVSHEDPEVKFNWYVDGVEVHNAKTKPREEQYNNASRVVSVLTVLHQDWLNGKEYKCKVSNKALPAPIEKTISKAKGQPREPQVYTLPPSRDELTKNQVSLTCLVKGFYPSDIAVEWESNGQPENNYKTTPPVLDSDGSFFLYSKLTVDKSRWQQGNVFSCSVMHEALHNHYTQKSLSLSPGGGGSGSAHPIPDSSPLLQFGGQVRQRYLYTDDACQTEAHLEIREDGTVGGAADQSPESLLQLKALKPGVIQILGVKTSRFLCQRPDGALYGSLHFDPEACSFRELLLEDGYNVYQSEAHGLPLHLCGNKSPHRDPAPRGPARFLPLPGLPPAPPEPPGILAPQPPDVGSSDPLSMVYPSQGRSPSYAS

SEQ ID NO: 1199 - protein, 475 aa, Artificial Sequence
  Fusion Protein
GHGEGTFTSDLSIQLEEEAVRLFIEWLLAGGPSKGKPPPKGGGGGGGSGGGGSGGGGSAESKYGPPCPPCPAPEFEGGPSVFLFPPKPKDTLMISRTPEVTCVVVDVSQEDPEVQFNWYVDGVEVHNAKTKPREEQFNSTYRVVSVLTVLHQDWLNGKEYKCKVSNKGLPSSIEKTISKAKGQPREPQVYTLPPSQEEMTKNQVSLTCLVKGFYPSDIAVEWESNGQPENNYKTTPPVLDSDGSFFLYSRLTVDKSRWQEGNVFSCSVMHEALHNHYTQKSLSLSLGGGGSGSAHPIPDSSPLLQFGGQVRQRYLYTDDACQTEAHLEIREDGTVGGAADQSPESLLQLKALKPGVIQILGVKTSRFLCQRPDGALYGSLHFDPEACSFRELLLEDGYNVYQSEAHGLPLHLPGCKSPHRDPAPRGPARFLPLPGLPPAPPEPPGILAPQPPDVGSSDPLSMVYPSQGRSPSYAS

SEQ ID NO: 1200 - protein, 474 aa, Artificial Sequence
  Fusion Protein
GHGEGTFTSDLSIQLEEEAVRLFIEWLLAGGPSKGKPPPKGGGGGGGSGGGGSGGGGSAESKYGPPCPPCPAPEFEGGPSVFLFPPKPKDTLMISRTPEVTCVVVDVSQEDPEVQFNWYVDGVEVHNAKTKPREEQFNSTYRVVSVLTVLHQDWLNGKEYKCKVSNKGLPSSIEKTISKAKGQPREPQVYTLPPSQEEMTKNQVSLTCLVKGFYPSDIAVEWESNGQPENNYKTTPPVLDSDGSFFLYSRLTVDKSRWQEGNVFSCSVMHEALHNHYTQKSLSLSLGGGGSGSAHPIPDSSPLLQFGGQVRQRYLYTDDACQTEAHLEIREDGTVGGAADQSPESLLQLKALKPGVIQILGVKTSRFLCQRPDGALYGSLHFDPEACSFRELLLEDGYNVYQSEAHGLPLHLCGNKSPHRDPAPRGPARFLPLPGLPPAPPEPPGILAPQPPDVGSSDPLSMVGSQGRSPSYAS

SEQ ID NO: 1201 - protein, 475 aa, Artificial Sequence
  Fusion Protein
GHGEGTFTSDLSIQLEEEAVRLFIEWLLAGGPSKGKPPPKGGGGGGGSGGGGSGGGGSAESKYGPPCPPCPAPEFEGGPSVFLFPPKPKDTLMISRTPEVTCVVVDVSQEDPEVQFNWYVDGVEVHNAKTKPREEQFNSTYRVVSVLTVLHQDWLNGKEYKCKVSNKGLPSSIEKTISKAKGQPREPQVYTLPPSQEEMTKNQVSLTCLVKGFYPSDIAVEWESNGQPENNYKTTPPVLDSDGSFFLYSRLTVDKSRWQEGNVFSCSVMHEALHNHYTQKSLSLSLGGGGSGSAHPIPDSSPLLQFGGQVRQRYLYTDDACQTEAHLEIREDGTVGGAADQSPESLLQLKALKPGVIQILGVKTSRFLCQRPDGALYGSLHFDPEACSFRELLLEDGYNVYQSEAHGLPLHLCGNKSPHRDPAPRGPARFLPLPGLPPAPPEPPGILAPQPPDVGSSDPLSMVYPSQGRSPSYAS

SEQ ID NO: 1202 - protein, 472 aa, Artificial Sequence
  Fusion Protein
GHGEGTFTSDLSIQLEEEAVRLFIEWLLAGGPSSGKPKPKGGGGGGGSGGGGSGGGGSADKTHTCPPCPAPEAAGGPSVFLFPPKPKDTLMISRTPEVTCVVVDVSHEDPEVKFNWYVDGVEVHNAKTKPREEQYNSTYRVVSVLTVLHQDWLNGKEYKCKVSNKALPAPIEKTISKAKGQPREPQVYTLPPSRDELTKNQVSLTCLVKGFYPSDIAVEWESNGQPENNYKTTPPVLDSDGSFFLYSKLTVDKSRWQQGNVFSCSVMHEALHNHYTQKSLSLSPGGGGSGSAHPIPDSSPLLQFGGQVRQRYLYTDDACQTEAHLEIREDGTVGGAADQSPESLLQLKALKPGVIQILGVKTSRFLCQRPDGALYGSLHFDPEACSFRELLLEDGYNVYQSEAHGLPLHLPGCKSPHRDPAPRGPARFLPLPGLPPAPPEPPGILAPQPPDVGSSDPLSMVGSQGRSPSYAS

SEQ ID NO: 1203 - protein, 473 aa, Artificial Sequence
  Fusion Protein
GHGEGTFTSDLSIQLEEEAVRLFIEWLLAGGPSSGKPKPKGGGGGGGSGGGGSGGGGSADKTHTCPPCPAPEAAGGPSVFLFPPKPKDTLMISRTPEVTCVVVDVSHEDPEVKFNWYVDGVEVHNAKTKPREEQYNSTYRVVSVLTVLHQDWLNGKEYKCKVSNKALPAPIEKTISKAKGQPREPQVYTLPPSRDELTKNQVSLTCLVKGFYPSDIAVEWESNGQPENNYKTTPPVLDSDGSFFLYSKLTVDKSRWQQGNVFSCSVMHEALHNHYTQKSLSLSPGGGGSGSAHPIPDSSPLLQFGGQVRQRYLYTDDACQTEAHLEIREDGTVGGAADQSPESLLQLKALKPGVIQILGVKTSRFLCQRPDGALYGSLHFDPEACSFRELLLEDGYNVYQSEAHGLPLHLPGCKSPHRDPAPRGPARFLPLPGLPPAPPEPPGILAPQPPDVGSSDPLSMVYPSQGRSPSYAS

SEQ ID NO: 1204 - protein, 472 aa, Artificial Sequence
  Fusion Protein
GHGEGTFTSDLSIQLEEEAVRLFIEWLLAGGPSSGKPKPKGGGGGGGSGGGGSGGGGSADKTHTCPPCPAPEAAGGPSVFLFPPKPKDTLMISRTPEVTCVVVDVSHEDPEVKFNWYVDGVEVHNAKTKPREEQYNSTYRVVSVLTVLHQDWLNGKEYKCKVSNKALPAPIEKTISKAKGQPREPQVYTLPPSRDELTKNQVSLTCLVKGFYPSDIAVEWESNGQPENNYKTTPPVLDSDGSFFLYSKLTVDKSRWQQGNVFSCSVMHEALHNHYTQKSLSLSPGGGGSGSAHPIPDSSPLLQFGGQVRQRYLYTDDACQTEAHLEIREDGTVGGAADQSPESLLQLKALKPGVIQILGVKTSRFLCQRPDGALYGSLHFDPEACSFRELLLEDGYNVYQSEAHGLPLHLCGNKSPHRDPAPRGPARFLPLPGLPPAPPEPPGILAPQPPDVGSSDPLSMVGSQGRSPSYAS

SEQ ID NO: 1205 - protein, 473 aa, Artificial Sequence
  Fusion Protein
GHGEGTFTSDLSIQLEEEAVRLFIEWLLAGGPSSGKPKPKGGGGGGGSGGGGSGGGGSADKTHTCPPCPAPEAAGGPSVFLFPPKPKDTLMISRTPEVTCVVVDVSHEDPEVKFNWYVDGVEVHNAKTKPREEQYNSTYRVVSVLTVLHQDWLNGKEYKCKVSNKALPAPIEKTISKAKGQPREPQVYTLPPSRDELTKNQVSLTCLVKGFYPSDIAVEWESNGQPENNYKTTPPVLDSDGSFFLYSKLTVDKSRWQQGNVFSCSVMHEALHNHYTQKSLSLSPGGGGSGSAHPIPDSSPLLQFGGQVRQRYLYTDDACQTEAHLEIREDGTVGGAADQSPESLLQLKALKPGVIQILGVKTSRFLCQRPDGALYGSLHFDPEACSFRELLLEDGYNVYQSEAHGLPLHLCGNKSPHRDPAPRGPARFLPLPGLPPAPPEPPGILAPQPPDVGSSDPLSMVYPSQGRSPSYAS

SEQ ID NO: 1206 - protein, 472 aa, Artificial Sequence
  Fusion Protein
GHGEGTFTSDLSIQLEEEAVRLFIEWLLAGGPSSGKPKPKGGGGGGGSGGGGSGGGGSADKTHTCPPCPAPELLGGPSVFLFPPKPKDTLMISRTPEVTCVVVDVSHEDPEVKFNWYVDGVEVHNAKTKPREEQYNNASRVVSVLTVLHQDWLNGKEYKCKVSNKALPAPIEKTISKAKGQPREPQVYTLPPSRDELTKNQVSLTCLVKGFYPSDIAVEWESNGQPENNYKTTPPVLDSDGSFFLYSKLTVDKSRWQQGNVFSCSVMHEALHNHYTQKSLSLSPGGGGSGSAHPIPDSSPLLQFGGQVRQRYLYTDDACQTEAHLEIREDGTVGGAADQSPESLLQLKALKPGVIQILGVKTSRFLCQRPDGALYGSLHFDPEACSFRELLLEDGYNVYQSEAHGLPLHLPGCKSPHRDPAPRGPARFLPLPGLPPAPPEPPGILAPQPPDVGSSDPLSMVGSQGRSPSYAS

SEQ ID NO: 1207 - protein, 473 aa, Artificial Sequence
  Fusion Protein
GHGEGTFTSDLSIQLEEEAVRLFIEWLLAGGPSSGKPKPKGGGGGGGSGGGGSGGGGSADKTHTCPPCPAPELLGGPSVFLFPPKPKDTLMISRTPEVTCVVVDVSHEDPEVKFNWYVDGVEVHNAKTKPREEQYNNASRVVSVLTVLHQDWLNGKEYKCKVSNKALPAPIEKTISKAKGQPREPQVYTLPPSRDELTKNQVSLTCLVKGFYPSDIAVEWESNGQPENNYKTTPPVLDSDGSFFLYSKLTVDKSRWQQGNVFSCSVMHEALHNHYTQKSLSLSPGGGGSGSAHPIPDSSPLLQFGGQVRQRYLYTDDACQTEAHLEIREDGTVGGAADQSPESLLQLKALKPGVIQILGVKTSRFLCQRPDGALYGSLHFDPEACSFRELLLEDGYNVYQSEAHGLPLHLPGCKSPHRDPAPRGPARFLPLPGLPPAPPEPPGILAPQPPDVGSSDPLSMVYPSQGRSPSYAS

SEQ ID NO: 1208 - protein, 472 aa, Artificial Sequence
  Fusion Protein
GHGEGTFTSDLSIQLEEEAVRLFIEWLLAGGPSSGKPKPKGGGGGGGSGGGGSGGGGSADKTHTCPPCPAPELLGGPSVFLFPPKPKDTLMISRTPEVTCVVVDVSHEDPEVKFNWYVDGVEVHNAKTKPREEQYNNASRVVSVLTVLHQDWLNGKEYKCKVSNKALPAPIEKTISKAKGQPREPQVYTLPPSRDELTKNQVSLTCLVKGFYPSDIAVEWESNGQPENNYKTTPPVLDSDGSFFLYSKLTVDKSRWQQGNVFSCSVMHEALHNHYTQKSLSLSPGGGGSGSAHPIPDSSPLLQFGGQVRQRYLYTDDACQTEAHLEIREDGTVGGAADQSPESLLQLKALKPGVIQILGVKTSRFLCQRPDGALYGSLHFDPEACSFRELLLEDGYNVYQSEAHGLPLHLCGNKSPHRDPAPRGPARFLPLPGLPPAPPEPPGILAPQPPDVGSSDPLSMVGSQGRSPSYAS

SEQ ID NO: 1209 - protein, 473 aa, Artificial Sequence
  Fusion Protein
GHGEGTFTSDLSIQLEEEAVRLFIEWLLAGGPSSGKPKPKGGGGGGGSGGGGSGGGGSADKTHTCPPCPAPELLGGPSVFLFPPKPKDTLMISRTPEVTCVVVDVSHEDPEVKFNWYVDGVEVHNAKTKPREEQYNNASRVVSVLTVLHQDWLNGKEYKCKVSNKALPAPIEKTISKAKGQPREPQVYTLPPSRDELTKNQVSLTCLVKGFYPSDIAVEWESNGQPENNYKTTPPVLDSDGSFFLYSKLTVDKSRWQQGNVFSCSVMHEALHNHYTQKSLSLSPGGGGSGSAHPIPDSSPLLQFGGQVRQRYLYTDDACQTEAHLEIREDGTVGGAADQSPESLLQLKALKPGVIQILGVKTSRFLCQRPDGALYGSLHFDPEACSFRELLLEDGYNVYQSEAHGLPLHLCGNKSPHRDPAPRGPARFLPLPGLPPAPPEPPGILAPQPPDVGSSDPLSMVYPSQGRSPSYAS

SEQ ID NO: 1210 - protein, 475 aa, Artificial Sequence
  Fusion Protein
GHGEGTFTSDLSIQLEEEAVRLFIEWLLAGGPSSGKPKPKGGGGGGGSGGGGSGGGGSAESKYGPPCPPCPAPEFEGGPSVFLFPPKPKDTLMISRTPEVTCVVVDVSQEDPEVQFNWYVDGVEVHNAKTKPREEQFNSTYRVVSVLTVLHQDWLNGKEYKCKVSNKGLPSSIEKTISKAKGQPREPQVYTLPPSQEEMTKNQVSLTCLVKGFYPSDIAVEWESNGQPENNYKTTPPVLDSDGSFFLYSRLTVDKSRWQEGNVFSCSVMHEALHNHYTQKSLSLSLGGGGSGSAHPIPDSSPLLQFGGQVRQRYLYTDDACQTEAHLEIREDGTVGGAADQSPESLLQLKALKPGVIQILGVKTSRFLCQRPDGALYGSLHFDPEACSFRELLLEDGYNVYQSEAHGLPLHLPGCKSPHRDPAPRGPARFLPLPGLPPAPPEPPGILAPQPPDVGSSDPLSMVYPSQGRSPSYAS

SEQ ID NO: 1211 - protein, 474 aa, Artificial Sequence
  Fusion Protein
GHGEGTFTSDLSIQLEEEAVRLFIEWLLAGGPSSGKPKPKGGGGGGGSGGGGSGGGGSAESKYGPPCPPCPAPEFEGGPSVFLFPPKPKDTLMISRTPEVTCVVVDVSQEDPEVQFNWYVDGVEVHNAKTKPREEQFNSTYRVVSVLTVLHQDWLNGKEYKCKVSNKGLPSSIEKTISKAKGQPREPQVYTLPPSQEEMTKNQVSLTCLVKGFYPSDIAVEWESNGQPENNYKTTPPVLDSDGSFFLYSRLTVDKSRWQEGNVFSCSVMHEALHNHYTQKSLSLSLGGGGSGSAHPIPDSSPLLQFGGQVRQRYLYTDDACQTEAHLEIREDGTVGGAADQSPESLLQLKALKPGVIQILGVKTSRFLCQRPDGALYGSLHFDPEACSFRELLLEDGYNVYQSEAHGLPLHLCGNKSPHRDPAPRGPARFLPLPGLPPAPPEPPGILAPQPPDVGSSDPLSMVGSQGRSPSYAS

SEQ ID NO: 1212 - protein, 475 aa, Artificial Sequence
  Fusion Protein
GHGEGTFTSDLSIQLEEEAVRLFIEWLLAGGPSSGKPKPKGGGGGGGSGGGGSGGGGSAESKYGPPCPPCPAPEFEGGPSVFLFPPKPKDTLMISRTPEVTCVVVDVSQEDPEVQFNWYVDGVEVHNAKTKPREEQFNSTYRVVSVLTVLHQDWLNGKEYKCKVSNKGLPSSIEKTISKAKGQPREPQVYTLPPSQEEMTKNQVSLTCLVKGFYPSDIAVEWESNGQPENNYKTTPPVLDSDGSFFLYSRLTVDKSRWQEGNVFSCSVMHEALHNHYTQKSLSLSLGGGGSGSAHPIPDSSPLLQFGGQVRQRYLYTDDACQTEAHLEIREDGTVGGAADQSPESLLQLKALKPGVIQILGVKTSRFLCQRPDGALYGSLHFDPEACSFRELLLEDGYNVYQSEAHGLPLHLCGNKSPHRDPAPRGPARFLPLPGLPPAPPEPPGILAPQPPDVGSSDPLSMVYPSQGRSPSYAS

SEQ ID NO: 1213 - protein, 472 aa, Artificial Sequence
  Fusion Protein
GHGEGTFTSDLSIQLEEEAVRLFIEWLLAKGKSKGKPKPKGGGGGGGSGGGGSGGGGSADKTHTCPPCPAPEAAGGPSVFLFPPKPKDTLMISRTPEVTCVVVDVSHEDPEVKFNWYVDGVEVHNAKTKPREEQYNSTYRVVSVLTVLHQDWLNGKEYKCKVSNKALPAPIEKTISKAKGQPREPQVYTLPPSRDELTKNQVSLTCLVKGFYPSDIAVEWESNGQPENNYKTTPPVLDSDGSFFLYSKLTVDKSRWQQGNVFSCSVMHEALHNHYTQKSLSLSPGGGGSGSAHPIPDSSPLLQFGGQVRQRYLYTDDACQTEAHLEIREDGTVGGAADQSPESLLQLKALKPGVIQILGVKTSRFLCQRPDGALYGSLHFDPEACSFRELLLEDGYNVYQSEAHGLPLHLPGCKSPHRDPAPRGPARFLPLPGLPPAPPEPPGILAPQPPDVGSSDPLSMVGSQGRSPSYAS

SEQ ID NO: 1214 - protein, 473 aa, Artificial Sequence
  Fusion Protein
GHGEGTFTSDLSIQLEEEAVRLFIEWLLAKGKSKGKPKPKGGGGGGGSGGGGSGGGGSADKTHTCPPCPAPEAAGGPSVFLFPPKPKDTLMISRTPEVTCVVVDVSHEDPEVKFNWYVDGVEVHNAKTKPREEQYNSTYRVVSVLTVLHQDWLNGKEYKCKVSNKALPAPIEKTISKAKGQPREPQVYTLPPSRDELTKNQVSLTCLVKGFYPSDIAVEWESNGQPENNYKTTPPVLDSDGSFFLYSKLTVDKSRWQQGNVFSCSVMHEALHNHYTQKSLSLSPGGGGSGSAHPIPDSSPLLQFGGQVRQRYLYTDDACQTEAHLEIREDGTVGGAADQSPESLLQLKALKPGVIQILGVKTSRFLCQRPDGALYGSLHFDPEACSFRELLLEDGYNVYQSEAHGLPLHLPGCKSPHRDPAPRGPARFLPLPGLPPAPPEPPGILAPQPPDVGSSDPLSMVYPSQGRSPSYAS

SEQ ID NO: 1215 - protein, 472 aa, Artificial Sequence
  Fusion Protein
GHGEGTFTSDLSIQLEEEAVRLFIEWLLAKGKSKGKPKPKGGGGGGGSGGGGSGGGGSADKTHTCPPCPAPEAAGGPSVFLFPPKPKDTLMISRTPEVTCVVVDVSHEDPEVKFNWYVDGVEVHNAKTKPREEQYNSTYRVVSVLTVLHQDWLNGKEYKCKVSNKALPAPIEKTISKAKGQPREPQVYTLPPSRDELTKNQVSLTCLVKGFYPSDIAVEWESNGQPENNYKTTPPVLDSDGSFFLYSKLTVDKSRWQQGNVFSCSVMHEALHNHYTQKSLSLSPGGGGSGSAHPIPDSSPLLQFGGQVRQRYLYTDDACQTEAHLEIREDGTVGGAADQSPESLLQLKALKPGVIQILGVKTSRFLCQRPDGALYGSLHFDPEACSFRELLLEDGYNVYQSEAHGLPLHLCGNKSPHRDPAPRGPARFLPLPGLPPAPPEPPGILAPQPPDVGSSDPLSMVGSQGRSPSYAS

SEQ ID NO: 1216 - protein, 473 aa, Artificial Sequence
  Fusion Protein
GHGEGTFTSDLSIQLEEEAVRLFIEWLLAKGKSKGKPKPKGGGGGGGSGGGGSGGGGSADKTHTCPPCPAPEAAGGPSVFLFPPKPKDTLMISRTPEVTCVVVDVSHEDPEVKFNWYVDGVEVHNAKTKPREEQYNSTYRVVSVLTVLHQDWLNGKEYKCKVSNKALPAPIEKTISKAKGQPREPQVYTLPPSRDELTKNQVSLTCLVKGFYPSDIAVEWESNGQPENNYKTTPPVLDSDGSFFLYSKLTVDKSRWQQGNVFSCSVMHEALHNHYTQKSLSLSPGGGGSGSAHPIPDSSPLLQFGGQVRQRYLYTDDACQTEAHLEIREDGTVGGAADQSPESLLQLKALKPGVIQILGVKTSRFLCQRPDGALYGSLHFDPEACSFRELLLEDGYNVYQSEAHGLPLHLCGNKSPHRDPAPRGPARFLPLPGLPPAPPEPPGILAPQPPDVGSSDPLSMVYPSQGRSPSYAS

SEQ ID NO: 1217 - protein, 472 aa, Artificial Sequence
  Fusion Protein
GHGEGTFTSDLSIQLEEEAVRLFIEWLLAKGKSKGKPKPKGGGGGGGSGGGGSGGGGSADKTHTCPPCPAPELLGGPSVFLFPPKPKDTLMISRTPEVTCVVVDVSHEDPEVKFNWYVDGVEVHNAKTKPREEQYNNASRVVSVLTVLHQDWLNGKEYKCKVSNKALPAPIEKTISKAKGQPREPQVYTLPPSRDELTKNQVSLTCLVKGFYPSDIAVEWESNGQPENNYKTTPPVLDSDGSFFLYSKLTVDKSRWQQGNVFSCSVMHEALHNHYTQKSLSLSPGGGGSGSAHPIPDSSPLLQFGGQVRQRYLYTDDACQTEAHLEIREDGTVGGAADQSPESLLQLKALKPGVIQILGVKTSRFLCQRPDGALYGSLHFDPEACSFRELLLEDGYNVYQSEAHGLPLHLPGCKSPHRDPAPRGPARFLPLPGLPPAPPEPPGILAPQPPDVGSSDPLSMVGSQGRSPSYAS

SEQ ID NO: 1218 - protein, 473 aa, Artificial Sequence
  Fusion Protein
GHGEGTFTSDLSIQLEEEAVRLFIEWLLAKGKSKGKPKPKGGGGGGGSGGGGSGGGGSADKTHTCPPCPAPELLGGPSVFLFPPKPKDTLMISRTPEVTCVVVDVSHEDPEVKFNWYVDGVEVHNAKTKPREEQYNNASRVVSVLTVLHQDWLNGKEYKCKVSNKALPAPIEKTISKAKGQPREPQVYTLPPSRDELTKNQVSLTCLVKGFYPSDIAVEWESNGQPENNYKTTPPVLDSDGSFFLYSKLTVDKSRWQQGNVFSCSVMHEALHNHYTQKSLSLSPGGGGSGSAHPIPDSSPLLQFGGQVRQRYLYTDDACQTEAHLEIREDGTVGGAADQSPESLLQLKALKPGVIQILGVKTSRFLCQRPDGALYGSLHFDPEACSFRELLLEDGYNVYQSEAHGLPLHLPGCKSPHRDPAPRGPARFLPLPGLPPAPPEPPGILAPQPPDVGSSDPLSMVYPSQGRSPSYAS

SEQ ID NO: 1219 - protein, 472 aa, Artificial Sequence
  Fusion Protein
GHGEGTFTSDLSIQLEEEAVRLFIEWLLAKGKSKGKPKPKGGGGGGGSGGGGSGGGGSADKTHTCPPCPAPELLGGPSVFLFPPKPKDTLMISRTPEVTCVVVDVSHEDPEVKFNWYVDGVEVHNAKTKPREEQYNNASRVVSVLTVLHQDWLNGKEYKCKVSNKALPAPIEKTISKAKGQPREPQVYTLPPSRDELTKNQVSLTCLVKGFYPSDIAVEWESNGQPENNYKTTPPVLDSDGSFFLYSKLTVDKSRWQQGNVFSCSVMHEALHNHYTQKSLSLSPGGGGSGSAHPIPDSSPLLQFGGQVRQRYLYTDDACQTEAHLEIREDGTVGGAADQSPESLLQLKALKPGVIQILGVKTSRFLCQRPDGALYGSLHFDPEACSFRELLLEDGYNVYQSEAHGLPLHLCGNKSPHRDPAPRGPARFLPLPGLPPAPPEPPGILAPQPPDVGSSDPLSMVGSQGRSPSYAS

SEQ ID NO: 1220 - protein, 473 aa, Artificial Sequence
  Fusion Protein
GHGEGTFTSDLSIQLEEEAVRLFIEWLLAKGKSKGKPKPKGGGGGGGSGGGGSGGGGSADKTHTCPPCPAPELLGGPSVFLFPPKPKDTLMISRTPEVTCVVVDVSHEDPEVKFNWYVDGVEVHNAKTKPREEQYNNASRVVSVLTVLHQDWLNGKEYKCKVSNKALPAPIEKTISKAKGQPREPQVYTLPPSRDELTKNQVSLTCLVKGFYPSDIAVEWESNGQPENNYKTTPPVLDSDGSFFLYSKLTVDKSRWQQGNVFSCSVMHEALHNHYTQKSLSLSPGGGGSGSAHPIPDSSPLLQFGGQVRQRYLYTDDACQTEAHLEIREDGTVGGAADQSPESLLQLKALKPGVIQILGVKTSRFLCQRPDGALYGSLHFDPEACSFRELLLEDGYNVYQSEAHGLPLHLCGNKSPHRDPAPRGPARFLPLPGLPPAPPEPPGILAPQPPDVGSSDPLSMVYPSQGRSPSYAS

SEQ ID NO: 1221 - protein, 475 aa, Artificial Sequence
  Fusion Protein
GHGEGTFTSDLSIQLEEEAVRLFIEWLLAKGKSKGKPKPKGGGGGGGSGGGGSGGGGSAESKYGPPCPPCPAPEFEGGPSVFLFPPKPKDTLMISRTPEVTCVVVDVSQEDPEVQFNWYVDGVEVHNAKTKPREEQFNSTYRVVSVLTVLHQDWLNGKEYKCKVSNKGLPSSIEKTISKAKGQPREPQVYTLPPSQEEMTKNQVSLTCLVKGFYPSDIAVEWESNGQPENNYKTTPPVLDSDGSFFLYSRLTVDKSRWQEGNVFSCSVMHEALHNHYTQKSLSLSLGGGGSGSAHPIPDSSPLLQFGGQVRQRYLYTDDACQTEAHLEIREDGTVGGAADQSPESLLQLKALKPGVIQILGVKTSRFLCQRPDGALYGSLHFDPEACSFRELLLEDGYNVYQSEAHGLPLHLPGCKSPHRDPAPRGPARFLPLPGLPPAPPEPPGILAPQPPDVGSSDPLSMVYPSQGRSPSYAS

SEQ ID NO: 1222 - protein, 474 aa, Artificial Sequence
  Fusion Protein
GHGEGTFTSDLSIQLEEEAVRLFIEWLLAKGKSKGKPKPKGGGGGGGSGGGGSGGGGSAESKYGPPCPPCPAPEFEGGPSVFLFPPKPKDTLMISRTPEVTCVVVDVSQEDPEVQFNWYVDGVEVHNAKTKPREEQFNSTYRVVSVLTVLHQDWLNGKEYKCKVSNKGLPSSIEKTISKAKGQPREPQVYTLPPSQEEMTKNQVSLTCLVKGFYPSDIAVEWESNGQPENNYKTTPPVLDSDGSFFLYSRLTVDKSRWQEGNVFSCSVMHEALHNHYTQKSLSLSLGGGGSGSAHPIPDSSPLLQFGGQVRQRYLYTDDACQTEAHLEIREDGTVGGAADQSPESLLQLKALKPGVIQILGVKTSRFLCQRPDGALYGSLHFDPEACSFRELLLEDGYNVYQSEAHGLPLHLCGNKSPHRDPAPRGPARFLPLPGLPPAPPEPPGILAPQPPDVGSSDPLSMVGSQGRSPSYAS

SEQ ID NO: 1223 - protein, 475 aa, Artificial Sequence
  Fusion Protein
GHGEGTFTSDLSIQLEEEAVRLFIEWLLAKGKSKGKPKPKGGGGGGGSGGGGSGGGGSAESKYGPPCPPCPAPEFEGGPSVFLFPPKPKDTLMISRTPEVTCVVVDVSQEDPEVQFNWYVDGVEVHNAKTKPREEQFNSTYRVVSVLTVLHQDWLNGKEYKCKVSNKGLPSSIEKTISKAKGQPREPQVYTLPPSQEEMTKNQVSLTCLVKGFYPSDIAVEWESNGQPENNYKTTPPVLDSDGSFFLYSRLTVDKSRWQEGNVFSCSVMHEALHNHYTQKSLSLSLGGGGSGSAHPIPDSSPLLQFGGQVRQRYLYTDDACQTEAHLEIREDGTVGGAADQSPESLLQLKALKPGVIQILGVKTSRFLCQRPDGALYGSLHFDPEACSFRELLLEDGYNVYQSEAHGLPLHLCGNKSPHRDPAPRGPARFLPLPGLPPAPPEPPGILAPQPPDVGSSDPLSMVYPSQGRSPSYAS

SEQ ID NO: 1224 - protein, 471 aa, Artificial Sequence
  Fusion Protein
FGEGTFTSDKSKQLEKRLVRLFIEWLIAGGHSSGKPPPKGGGGGGGSGGGGSGGGGSADKTHTCPPCPAPEAAGGPSVFLFPPKPKDTLMISRTPEVTCVVVDVSHEDPEVKFNWYVDGVEVHNAKTKPREEQYNSTYRVVSVLTVLHQDWLNGKEYKCKVSNKALPAPIEKTISKAKGQPREPQVYTLPPSRDELTKNQVSLTCLVKGFYPSDIAVEWESNGQPENNYKTTPPVLDSDGSFFLYSKLTVDKSRWQQGNVFSCSVMHEALHNHYTQKSLSLSPGGGGSGSAHPIPDSSPLLQFGGQVRQRYLYTDDACQTEAHLEIREDGTVGGAADQSPESLLQLKALKPGVIQILGVKTSRFLCQRPDGALYGSLHFDPEACSFRELLLEDGYNVYQSEAHGLPLHLPGCKSPHRDPAPRGPARFLPLPGLPPAPPEPPGILAPQPPDVGSSDPLSMVGSQGRSPSYAS

SEQ ID NO: 1225 - protein, 472 aa, Artificial Sequence
  Fusion Protein
FGEGTFTSDKSKQLEKRLVRLFIEWLIAGGHSSGKPPPKGGGGGGGSGGGGSGGGGSADKTHTCPPCPAPEAAGGPSVFLFPPKPKDTLMISRTPEVTCVVVDVSHEDPEVKFNWYVDGVEVHNAKTKPREEQYNSTYRVVSVLTVLHQDWLNGKEYKCKVSNKALPAPIEKTISKAKGQPREPQVYTLPPSRDELTKNQVSLTCLVKGFYPSDIAVEWESNGQPENNYKTTPPVLDSDGSFFLYSKLTVDKSRWQQGNVFSCSVMHEALHNHYTQKSLSLSPGGGGSGSAHPIPDSSPLLQFGGQVRQRYLYTDDACQTEAHLEIREDGTVGGAADQSPESLLQLKALKPGVIQILGVKTSRFLCQRPDGALYGSLHFDPEACSFRELLLEDGYNVYQSEAHGLPLHLPGCKSPHRDPAPRGPARFLPLPGLPPAPPEPPGILAPQPPDVGSSDPLSMVYPSQGRSPSYAS

SEQ ID NO: 1226 - protein, 471 aa, Artificial Sequence
  Fusion Protein
FGEGTFTSDKSKQLEKRLVRLFIEWLIAGGHSSGKPPPKGGGGGGGSGGGGSGGGGSADKTHTCPPCPAPEAAGGPSVFLFPPKPKDTLMISRTPEVTCVVVDVSHEDPEVKFNWYVDGVEVHNAKTKPREEQYNSTYRVVSVLTVLHQDWLNGKEYKCKVSNKALPAPIEKTISKAKGQPREPQVYTLPPSRDELTKNQVSLTCLVKGFYPSDIAVEWESNGQPENNYKTTPPVLDSDGSFFLYSKLTVDKSRWQQGNVFSCSVMHEALHNHYTQKSLSLSPGGGGSGSAHPIPDSSPLLQFGGQVRQRYLYTDDACQTEAHLEIREDGTVGGAADQSPESLLQLKALKPGVIQILGVKTSRFLCQRPDGALYGSLHFDPEACSFRELLLEDGYNVYQSEAHGLPLHLCGNKSPHRDPAPRGPARFLPLPGLPPAPPEPPGILAPQPPDVGSSDPLSMVGSQGRSPSYAS

SEQ ID NO: 1227 - protein, 472 aa, Artificial Sequence
  Fusion Protein
FGEGTFTSDKSKQLEKRLVRLFIEWLIAGGHSSGKPPPKGGGGGGGSGGGGSGGGGSADKTHTCPPCPAPEAAGGPSVFLFPPKPKDTLMISRTPEVTCVVVDVSHEDPEVKFNWYVDGVEVHNAKTKPREEQYNSTYRVVSVLTVLHQDWLNGKEYKCKVSNKALPAPIEKTISKAKGQPREPQVYTLPPSRDELTKNQVSLTCLVKGFYPSDIAVEWESNGQPENNYKTTPPVLDSDGSFFLYSKLTVDKSRWQQGNVFSCSVMHEALHNHYTQKSLSLSPGGGGSGSAHPIPDSSPLLQFGGQVRQRYLYTDDACQTEAHLEIREDGTVGGAADQSPESLLQLKALKPGVIQILGVKTSRFLCQRPDGALYGSLHFDPEACSFRELLLEDGYNVYQSEAHGLPLHLCGNKSPHRDPAPRGPARFLPLPGLPPAPPEPPGILAPQPPDVGSSDPLSMVYPSQGRSPSYAS

SEQ ID NO: 1228 - protein, 471 aa, Artificial Sequence
  Fusion Protein
FGEGTFTSDKSKQLEKRLVRLFIEWLIAGGHSSGKPPPKGGGGGGGSGGGGSGGGGSADKTHTCPPCPAPELLGGPSVFLFPPKPKDTLMISRTPEVTCVVVDVSHEDPEVKFNWYVDGVEVHNAKTKPREEQYNNASRVVSVLTVLHQDWLNGKEYKCKVSNKALPAPIEKTISKAKGQPREPQVYTLPPSRDELTKNQVSLTCLVKGFYPSDIAVEWESNGQPENNYKTTPPVLDSDGSFFLYSKLTVDKSRWQQGNVFSCSVMHEALHNHYTQKSLSLSPGGGGSGSAHPIPDSSPLLQFGGQVRQRYLYTDDACQTEAHLEIREDGTVGGAADQSPESLLQLKALKPGVIQILGVKTSRFLCQRPDGALYGSLHFDPEACSFRELLLEDGYNVYQSEAHGLPLHLPGCKSPHRDPAPRGPARFLPLPGLPPAPPEPPGILAPQPPDVGSSDPLSMVGSQGRSPSYAS

SEQ ID NO: 1229 - protein, 472 aa, Artificial Sequence
  Fusion Protein
FGEGTFTSDKSKQLEKRLVRLFIEWLIAGGHSSGKPPPKGGGGGGGSGGGGSGGGGSADKTHTCPPCPAPELLGGPSVFLFPPKPKDTLMISRTPEVTCVVVDVSHEDPEVKFNWYVDGVEVHNAKTKPREEQYNNASRVVSVLTVLHQDWLNGKEYKCKVSNKALPAPIEKTISKAKGQPREPQVYTLPPSRDELTKNQVSLTCLVKGFYPSDIAVEWESNGQPENNYKTTPPVLDSDGSFFLYSKLTVDKSRWQQGNVFSCSVMHEALHNHYTQKSLSLSPGGGGSGSAHPIPDSSPLLQFGGQVRQRYLYTDDACQTEAHLEIREDGTVGGAADQSPESLLQLKALKPGVIQILGVKTSRFLCQRPDGALYGSLHFDPEACSFRELLLEDGYNVYQSEAHGLPLHLPGCKSPHRDPAPRGPARFLPLPGLPPAPPEPPGILAPQPPDVGSSDPLSMVYPSQGRSPSYAS

SEQ ID NO: 1230 - protein, 471 aa, Artificial Sequence
  Fusion Protein
FGEGTFTSDKSKQLEKRLVRLFIEWLIAGGHSSGKPPPKGGGGGGGSGGGGSGGGGSADKTHTCPPCPAPELLGGPSVFLFPPKPKDTLMISRTPEVTCVVVDVSHEDPEVKFNWYVDGVEVHNAKTKPREEQYNNASRVVSVLTVLHQDWLNGKEYKCKVSNKALPAPIEKTISKAKGQPREPQVYTLPPSRDELTKNQVSLTCLVKGFYPSDIAVEWESNGQPENNYKTTPPVLDSDGSFFLYSKLTVDKSRWQQGNVFSCSVMHEALHNHYTQKSLSLSPGGGGSGSAHPIPDSSPLLQFGGQVRQRYLYTDDACQTEAHLEIREDGTVGGAADQSPESLLQLKALKPGVIQILGVKTSRFLCQRPDGALYGSLHFDPEACSFRELLLEDGYNVYQSEAHGLPLHLCGNKSPHRDPAPRGPARFLPLPGLPPAPPEPPGILAPQPPDVGSSDPLSMVGSQGRSPSYAS

SEQ ID NO: 1231 - protein, 472 aa, Artificial Sequence
  Fusion Protein
FGEGTFTSDKSKQLEKRLVRLFIEWLIAGGHSSGKPPPKGGGGGGGSGGGGSGGGGSADKTHTCPPCPAPELLGGPSVFLFPPKPKDTLMISRTPEVTCVVVDVSHEDPEVKFNWYVDGVEVHNAKTKPREEQYNNASRVVSVLTVLHQDWLNGKEYKCKVSNKALPAPIEKTISKAKGQPREPQVYTLPPSRDELTKNQVSLTCLVKGFYPSDIAVEWESNGQPENNYKTTPPVLDSDGSFFLYSKLTVDKSRWQQGNVFSCSVMHEALHNHYTQKSLSLSPGGGGSGSAHPIPDSSPLLQFGGQVRQRYLYTDDACQTEAHLEIREDGTVGGAADQSPESLLQLKALKPGVIQILGVKTSRFLCQRPDGALYGSLHFDPEACSFRELLLEDGYNVYQSEAHGLPLHLCGNKSPHRDPAPRGPARFLPLPGLPPAPPEPPGILAPQPPDVGSSDPLSMVYPSQGRSPSYAS

SEQ ID NO: 1232 - protein, 474 aa, Artificial Sequence
  Fusion Protein
FGEGTFTSDKSKQLEKRLVRLFIEWLIAGGHSSGKPPPKGGGGGGGSGGGGSGGGGSAESKYGPPCPPCPAPEFEGGPSVFLFPPKPKDTLMISRTPEVTCVVVDVSQEDPEVQFNWYVDGVEVHNAKTKPREEQFNSTYRVVSVLTVLHQDWLNGKEYKCKVSNKGLPSSIEKTISKAKGQPREPQVYTLPPSQEEMTKNQVSLTCLVKGFYPSDIAVEWESNGQPENNYKTTPPVLDSDGSFFLYSRLTVDKSRWQEGNVFSCSVMHEALHNHYTQKSLSLSLGGGGSGSAHPIPDSSPLLQFGGQVRQRYLYTDDACQTEAHLEIREDGTVGGAADQSPESLLQLKALKPGVIQILGVKTSRFLCQRPDGALYGSLHFDPEACSFRELLLEDGYNVYQSEAHGLPLHLPGCKSPHRDPAPRGPARFLPLPGLPPAPPEPPGILAPQPPDVGSSDPLSMVYPSQGRSPSYAS

SEQ ID NO: 1233 - protein, 473 aa, Artificial Sequence
  Fusion Protein
FGEGTFTSDKSKQLEKRLVRLFIEWLIAGGHSSGKPPPKGGGGGGGSGGGGSGGGGSAESKYGPPCPPCPAPEFEGGPSVFLFPPKPKDTLMISRTPEVTCVVVDVSQEDPEVQFNWYVDGVEVHNAKTKPREEQFNSTYRVVSVLTVLHQDWLNGKEYKCKVSNKGLPSSIEKTISKAKGQPREPQVYTLPPSQEEMTKNQVSLTCLVKGFYPSDIAVEWESNGQPENNYKTTPPVLDSDGSFFLYSRLTVDKSRWQEGNVFSCSVMHEALHNHYTQKSLSLSLGGGGSGSAHPIPDSSPLLQFGGQVRQRYLYTDDACQTEAHLEIREDGTVGGAADQSPESLLQLKALKPGVIQILGVKTSRFLCQRPDGALYGSLHFDPEACSFRELLLEDGYNVYQSEAHGLPLHLCGNKSPHRDPAPRGPARFLPLPGLPPAPPEPPGILAPQPPDVGSSDPLSMVGSQGRSPSYAS

SEQ ID NO: 1234 - protein, 474 aa, Artificial Sequence
  Fusion Protein
FGEGTFTSDKSKQLEKRLVRLFIEWLIAGGHSSGKPPPKGGGGGGGSGGGGSGGGGSAESKYGPPCPPCPAPEFEGGPSVFLFPPKPKDTLMISRTPEVTCVVVDVSQEDPEVQFNWYVDGVEVHNAKTKPREEQFNSTYRVVSVLTVLHQDWLNGKEYKCKVSNKGLPSSIEKTISKAKGQPREPQVYTLPPSQEEMTKNQVSLTCLVKGFYPSDIAVEWESNGQPENNYKTTPPVLDSDGSFFLYSRLTVDKSRWQEGNVFSCSVMHEALHNHYTQKSLSLSLGGGGSGSAHPIPDSSPLLQFGGQVRQRYLYTDDACQTEAHLEIREDGTVGGAADQSPESLLQLKALKPGVIQILGVKTSRFLCQRPDGALYGSLHFDPEACSFRELLLEDGYNVYQSEAHGLPLHLCGNKSPHRDPAPRGPARFLPLPGLPPAPPEPPGILAPQPPDVGSSDPLSMVYPSQGRSPSYAS

SEQ ID NO: 1235 - protein, 471 aa, Artificial Sequence
  Fusion Protein
HGEGTFTSDKSKQLEKRLFRLFIEWLIAGGHSSGKPPPKGGGGGGGSGGGGSGGGGSADKTHTCPPCPAPEAAGGPSVFLFPPKPKDTLMISRTPEVTCVVVDVSHEDPEVKFNWYVDGVEVHNAKTKPREEQYNSTYRVVSVLTVLHQDWLNGKEYKCKVSNKALPAPIEKTISKAKGQPREPQVYTLPPSRDELTKNQVSLTCLVKGFYPSDIAVEWESNGQPENNYKTTPPVLDSDGSFFLYSKLTVDKSRWQQGNVFSCSVMHEALHNHYTQKSLSLSPGGGGSGSAHPIPDSSPLLQFGGQVRQRYLYTDDACQTEAHLEIREDGTVGGAADQSPESLLQLKALKPGVIQILGVKTSRFLCQRPDGALYGSLHFDPEACSFRELLLEDGYNVYQSEAHGLPLHLPGCKSPHRDPAPRGPARFLPLPGLPPAPPEPPGILAPQPPDVGSSDPLSMVGSQGRSPSYAS

SEQ ID NO: 1236 - protein, 472 aa, Artificial Sequence
  Fusion Protein
HGEGTFTSDKSKQLEKRLFRLFIEWLIAGGHSSGKPPPKGGGGGGGSGGGGSGGGGSADKTHTCPPCPAPEAAGGPSVFLFPPKPKDTLMISRTPEVTCVVVDVSHEDPEVKFNWYVDGVEVHNAKTKPREEQYNSTYRVVSVLTVLHQDWLNGKEYKCKVSNKALPAPIEKTISKAKGQPREPQVYTLPPSRDELTKNQVSLTCLVKGFYPSDIAVEWESNGQPENNYKTTPPVLDSDGSFFLYSKLTVDKSRWQQGNVFSCSVMHEALHNHYTQKSLSLSPGGGGSGSAHPIPDSSPLLQFGGQVRQRYLYTDDACQTEAHLEIREDGTVGGAADQSPESLLQLKALKPGVIQILGVKTSRFLCQRPDGALYGSLHFDPEACSFRELLLEDGYNVYQSEAHGLPLHLPGCKSPHRDPAPRGPARFLPLPGLPPAPPEPPGILAPQPPDVGSSDPLSMVYPSQGRSPSYAS

SEQ ID NO: 1237 - protein, 471 aa, Artificial Sequence
  Fusion Protein
HGEGTFTSDKSKQLEKRLFRLFIEWLIAGGHSSGKPPPKGGGGGGGSGGGGSGGGGSADKTHTCPPCPAPEAAGGPSVFLFPPKPKDTLMISRTPEVTCVVVDVSHEDPEVKFNWYVDGVEVHNAKTKPREEQYNSTYRVVSVLTVLHQDWLNGKEYKCKVSNKALPAPIEKTISKAKGQPREPQVYTLPPSRDELTKNQVSLTCLVKGFYPSDIAVEWESNGQPENNYKTTPPVLDSDGSFFLYSKLTVDKSRWQQGNVFSCSVMHEALHNHYTQKSLSLSPGGGGSGSAHPIPDSSPLLQFGGQVRQRYLYTDDACQTEAHLEIREDGTVGGAADQSPESLLQLKALKPGVIQILGVKTSRFLCQRPDGALYGSLHFDPEACSFRELLLEDGYNVYQSEAHGLPLHLCGNKSPHRDPAPRGPARFLPLPGLPPAPPEPPGILAPQPPDVGSSDPLSMVGSQGRSPSYAS

SEQ ID NO: 1238 - protein, 472 aa, Artificial Sequence
  Fusion Protein
HGEGTFTSDKSKQLEKRLFRLFIEWLIAGGHSSGKPPPKGGGGGGGSGGGGSGGGGSADKTHTCPPCPAPEAAGGPSVFLFPPKPKDTLMISRTPEVTCVVVDVSHEDPEVKFNWYVDGVEVHNAKTKPREEQYNSTYRVVSVLTVLHQDWLNGKEYKCKVSNKALPAPIEKTISKAKGQPREPQVYTLPPSRDELTKNQVSLTCLVKGFYPSDIAVEWESNGQPENNYKTTPPVLDSDGSFFLYSKLTVDKSRWQQGNVFSCSVMHEALHNHYTQKSLSLSPGGGGSGSAHPIPDSSPLLQFGGQVRQRYLYTDDACQTEAHLEIREDGTVGGAADQSPESLLQLKALKPGVIQILGVKTSRFLCQRPDGALYGSLHFDPEACSFRELLLEDGYNVYQSEAHGLPLHLCGNKSPHRDPAPRGPARFLPLPGLPPAPPEPPGILAPQPPDVGSSDPLSMVYPSQGRSPSYAS

SEQ ID NO: 1239 - protein, 471 aa, Artificial Sequence
  Fusion Protein
HGEGTFTSDKSKQLEKRLFRLFIEWLIAGGHSSGKPPPKGGGGGGGSGGGGSGGGGSADKTHTCPPCPAPELLGGPSVFLFPPKPKDTLMISRTPEVTCVVVDVSHEDPEVKFNWYVDGVEVHNAKTKPREEQYNNASRVVSVLTVLHQDWLNGKEYKCKVSNKALPAPIEKTISKAKGQPREPQVYTLPPSRDELTKNQVSLTCLVKGFYPSDIAVEWESNGQPENNYKTTPPVLDSDGSFFLYSKLTVDKSRWQQGNVFSCSVMHEALHNHYTQKSLSLSPGGGGSGSAHPIPDSSPLLQFGGQVRQRYLYTDDACQTEAHLEIREDGTVGGAADQSPESLLQLKALKPGVIQILGVKTSRFLCQRPDGALYGSLHFDPEACSFRELLLEDGYNVYQSEAHGLPLHLPGCKSPHRDPAPRGPARFLPLPGLPPAPPEPPGILAPQPPDVGSSDPLSMVGSQGRSPSYAS

SEQ ID NO: 1240 - protein, 472 aa, Artificial Sequence
  Fusion Protein
HGEGTFTSDKSKQLEKRLFRLFIEWLIAGGHSSGKPPPKGGGGGGGSGGGGSGGGGSADKTHTCPPCPAPELLGGPSVFLFPPKPKDTLMISRTPEVTCVVVDVSHEDPEVKFNWYVDGVEVHNAKTKPREEQYNNASRVVSVLTVLHQDWLNGKEYKCKVSNKALPAPIEKTISKAKGQPREPQVYTLPPSRDELTKNQVSLTCLVKGFYPSDIAVEWESNGQPENNYKTTPPVLDSDGSFFLYSKLTVDKSRWQQGNVFSCSVMHEALHNHYTQKSLSLSPGGGGSGSAHPIPDSSPLLQFGGQVRQRYLYTDDACQTEAHLEIREDGTVGGAADQSPESLLQLKALKPGVIQILGVKTSRFLCQRPDGALYGSLHFDPEACSFRELLLEDGYNVYQSEAHGLPLHLPGCKSPHRDPAPRGPARFLPLPGLPPAPPEPPGILAPQPPDVGSSDPLSMVYPSQGRSPSYAS

SEQ ID NO: 1241 - protein, 471 aa, Artificial Sequence
  Fusion Protein
HGEGTFTSDKSKQLEKRLFRLFIEWLIAGGHSSGKPPPKGGGGGGGSGGGGSGGGGSADKTHTCPPCPAPELLGGPSVFLFPPKPKDTLMISRTPEVTCVVVDVSHEDPEVKFNWYVDGVEVHNAKTKPREEQYNNASRVVSVLTVLHQDWLNGKEYKCKVSNKALPAPIEKTISKAKGQPREPQVYTLPPSRDELTKNQVSLTCLVKGFYPSDIAVEWESNGQPENNYKTTPPVLDSDGSFFLYSKLTVDKSRWQQGNVFSCSVMHEALHNHYTQKSLSLSPGGGGSGSAHPIPDSSPLLQFGGQVRQRYLYTDDACQTEAHLEIREDGTVGGAADQSPESLLQLKALKPGVIQILGVKTSRFLCQRPDGALYGSLHFDPEACSFRELLLEDGYNVYQSEAHGLPLHLCGNKSPHRDPAPRGPARFLPLPGLPPAPPEPPGILAPQPPDVGSSDPLSMVGSQGRSPSYAS

SEQ ID NO: 1242 - protein, 472 aa, Artificial Sequence
  Fusion Protein
HGEGTFTSDKSKQLEKRLFRLFIEWLIAGGHSSGKPPPKGGGGGGGSGGGGSGGGGSADKTHTCPPCPAPELLGGPSVFLFPPKPKDTLMISRTPEVTCVVVDVSHEDPEVKFNWYVDGVEVHNAKTKPREEQYNNASRVVSVLTVLHQDWLNGKEYKCKVSNKALPAPIEKTISKAKGQPREPQVYTLPPSRDELTKNQVSLTCLVKGFYPSDIAVEWESNGQPENNYKTTPPVLDSDGSFFLYSKLTVDKSRWQQGNVFSCSVMHEALHNHYTQKSLSLSPGGGGSGSAHPIPDSSPLLQFGGQVRQRYLYTDDACQTEAHLEIREDGTVGGAADQSPESLLQLKALKPGVIQILGVKTSRFLCQRPDGALYGSLHFDPEACSFRELLLEDGYNVYQSEAHGLPLHLCGNKSPHRDPAPRGPARFLPLPGLPPAPPEPPGILAPQPPDVGSSDPLSMVYPSQGRSPSYAS

SEQ ID NO: 1243 - protein, 474 aa, Artificial Sequence
  Fusion Protein
HGEGTFTSDKSKQLEKRLFRLFIEWLIAGGHSSGKPPPKGGGGGGGSGGGGSGGGGSAESKYGPPCPPCPAPEFEGGPSVFLFPPKPKDTLMISRTPEVTCVVVDVSQEDPEVQFNWYVDGVEVHNAKTKPREEQFNSTYRVVSVLTVLHQDWLNGKEYKCKVSNKGLPSSIEKTISKAKGQPREPQVYTLPPSQEEMTKNQVSLTCLVKGFYPSDIAVEWESNGQPENNYKTTPPVLDSDGSFFLYSRLTVDKSRWQEGNVFSCSVMHEALHNHYTQKSLSLSLGGGGSGSAHPIPDSSPLLQFGGQVRQRYLYTDDACQTEAHLEIREDGTVGGAADQSPESLLQLKALKPGVIQILGVKTSRFLCQRPDGALYGSLHFDPEACSFRELLLEDGYNVYQSEAHGLPLHLPGCKSPHRDPAPRGPARFLPLPGLPPAPPEPPGILAPQPPDVGSSDPLSMVYPSQGRSPSYAS

SEQ ID NO: 1244 - protein, 473 aa, Artificial Sequence
  Fusion Protein
HGEGTFTSDKSKQLEKRLFRLFIEWLIAGGHSSGKPPPKGGGGGGGSGGGGSGGGGSAESKYGPPCPPCPAPEFEGGPSVFLFPPKPKDTLMISRTPEVTCVVVDVSQEDPEVQFNWYVDGVEVHNAKTKPREEQFNSTYRVVSVLTVLHQDWLNGKEYKCKVSNKGLPSSIEKTISKAKGQPREPQVYTLPPSQEEMTKNQVSLTCLVKGFYPSDIAVEWESNGQPENNYKTTPPVLDSDGSFFLYSRLTVDKSRWQEGNVFSCSVMHEALHNHYTQKSLSLSLGGGGSGSAHPIPDSSPLLQFGGQVRQRYLYTDDACQTEAHLEIREDGTVGGAADQSPESLLQLKALKPGVIQILGVKTSRFLCQRPDGALYGSLHFDPEACSFRELLLEDGYNVYQSEAHGLPLHLCGNKSPHRDPAPRGPARFLPLPGLPPAPPEPPGILAPQPPDVGSSDPLSMVGSQGRSPSYAS

SEQ ID NO: 1245 - protein, 474 aa, Artificial Sequence
  Fusion Protein
HGEGTFTSDKSKQLEKRLFRLFIEWLIAGGHSSGKPPPKGGGGGGGSGGGGSGGGGSAESKYGPPCPPCPAPEFEGGPSVFLFPPKPKDTLMISRTPEVTCVVVDVSQEDPEVQFNWYVDGVEVHNAKTKPREEQFNSTYRVVSVLTVLHQDWLNGKEYKCKVSNKGLPSSIEKTISKAKGQPREPQVYTLPPSQEEMTKNQVSLTCLVKGFYPSDIAVEWESNGQPENNYKTTPPVLDSDGSFFLYSRLTVDKSRWQEGNVFSCSVMHEALHNHYTQKSLSLSLGGGGSGSAHPIPDSSPLLQFGGQVRQRYLYTDDACQTEAHLEIREDGTVGGAADQSPESLLQLKALKPGVIQILGVKTSRFLCQRPDGALYGSLHFDPEACSFRELLLEDGYNVYQSEAHGLPLHLCGNKSPHRDPAPRGPARFLPLPGLPPAPPEPPGILAPQPPDVGSSDPLSMVYPSQGRSPSYAS

SEQ ID NO: 1246 - protein, 471 aa, Artificial Sequence
  Fusion Protein
HGEGTFTSDKSKQLEKRLVFLFIEWLIAGGHSSGKPPPKGGGGGGGSGGGGSGGGGSADKTHTCPPCPAPEAAGGPSVFLFPPKPKDTLMISRTPEVTCVVVDVSHEDPEVKFNWYVDGVEVHNAKTKPREEQYNSTYRVVSVLTVLHQDWLNGKEYKCKVSNKALPAPIEKTISKAKGQPREPQVYTLPPSRDELTKNQVSLTCLVKGFYPSDIAVEWESNGQPENNYKTTPPVLDSDGSFFLYSKLTVDKSRWQQGNVFSCSVMHEALHNHYTQKSLSLSPGGGGSGSAHPIPDSSPLLQFGGQVRQRYLYTDDACQTEAHLEIREDGTVGGAADQSPESLLQLKALKPGVIQILGVKTSRFLCQRPDGALYGSLHFDPEACSFRELLLEDGYNVYQSEAHGLPLHLPGCKSPHRDPAPRGPARFLPLPGLPPAPPEPPGILAPQPPDVGSSDPLSMVGSQGRSPSYAS

SEQ ID NO: 1247 - protein, 472 aa, Artificial Sequence
  Fusion Protein
HGEGTFTSDKSKQLEKRLVFLFIEWLIAGGHSSGKPPPKGGGGGGGSGGGGSGGGGSADKTHTCPPCPAPEAAGGPSVFLFPPKPKDTLMISRTPEVTCVVVDVSHEDPEVKFNWYVDGVEVHNAKTKPREEQYNSTYRVVSVLTVLHQDWLNGKEYKCKVSNKALPAPIEKTISKAKGQPREPQVYTLPPSRDELTKNQVSLTCLVKGFYPSDIAVEWESNGQPENNYKTTPPVLDSDGSFFLYSKLTVDKSRWQQGNVFSCSVMHEALHNHYTQKSLSLSPGGGGSGSAHPIPDSSPLLQFGGQVRQRYLYTDDACQTEAHLEIREDGTVGGAADQSPESLLQLKALKPGVIQILGVKTSRFLCQRPDGALYGSLHFDPEACSFRELLLEDGYNVYQSEAHGLPLHLPGCKSPHRDPAPRGPARFLPLPGLPPAPPEPPGILAPQPPDVGSSDPLSMVYPSQGRSPSYAS

SEQ ID NO: 1248 - protein, 471 aa, Artificial Sequence
  Fusion Protein
HGEGTFTSDKSKQLEKRLVFLFIEWLIAGGHSSGKPPPKGGGGGGGSGGGGSGGGGSADKTHTCPPCPAPEAAGGPSVFLFPPKPKDTLMISRTPEVTCVVVDVSHEDPEVKFNWYVDGVEVHNAKTKPREEQYNSTYRVVSVLTVLHQDWLNGKEYKCKVSNKALPAPIEKTISKAKGQPREPQVYTLPPSRDELTKNQVSLTCLVKGFYPSDIAVEWESNGQPENNYKTTPPVLDSDGSFFLYSKLTVDKSRWQQGNVFSCSVMHEALHNHYTQKSLSLSPGGGGSGSAHPIPDSSPLLQFGGQVRQRYLYTDDACQTEAHLEIREDGTVGGAADQSPESLLQLKALKPGVIQILGVKTSRFLCQRPDGALYGSLHFDPEACSFRELLLEDGYNVYQSEAHGLPLHLCGNKSPHRDPAPRGPARFLPLPGLPPAPPEPPGILAPQPPDVGSSDPLSMVGSQGRSPSYAS

SEQ ID NO: 1249 - protein, 472 aa, Artificial Sequence
  Fusion Protein
HGEGTFTSDKSKQLEKRLVFLFIEWLIAGGHSSGKPPPKGGGGGGGSGGGGSGGGGSADKTHTCPPCPAPEAAGGPSVFLFPPKPKDTLMISRTPEVTCVVVDVSHEDPEVKFNWYVDGVEVHNAKTKPREEQYNSTYRVVSVLTVLHQDWLNGKEYKCKVSNKALPAPIEKTISKAKGQPREPQVYTLPPSRDELTKNQVSLTCLVKGFYPSDIAVEWESNGQPENNYKTTPPVLDSDGSFFLYSKLTVDKSRWQQGNVFSCSVMHEALHNHYTQKSLSLSPGGGGSGSAHPIPDSSPLLQFGGQVRQRYLYTDDACQTEAHLEIREDGTVGGAADQSPESLLQLKALKPGVIQILGVKTSRFLCQRPDGALYGSLHFDPEACSFRELLLEDGYNVYQSEAHGLPLHLCGNKSPHRDPAPRGPARFLPLPGLPPAPPEPPGILAPQPPDVGSSDPLSMVYPSQGRSPSYAS

SEQ ID NO: 1250 - protein, 471 aa, Artificial Sequence
  Fusion Protein
HGEGTFTSDKSKQLEKRLVFLFIEWLIAGGHSSGKPPPKGGGGGGGSGGGGSGGGGSADKTHTCPPCPAPELLGGPSVFLFPPKPKDTLMISRTPEVTCVVVDVSHEDPEVKFNWYVDGVEVHNAKTKPREEQYNNASRVVSVLTVLHQDWLNGKEYKCKVSNKALPAPIEKTISKAKGQPREPQVYTLPPSRDELTKNQVSLTCLVKGFYPSDIAVEWESNGQPENNYKTTPPVLDSDGSFFLYSKLTVDKSRWQQGNVFSCSVMHEALHNHYTQKSLSLSPGGGGSGSAHPIPDSSPLLQFGGQVRQRYLYTDDACQTEAHLEIREDGTVGGAADQSPESLLQLKALKPGVIQILGVKTSRFLCQRPDGALYGSLHFDPEACSFRELLLEDGYNVYQSEAHGLPLHLPGCKSPHRDPAPRGPARFLPLPGLPPAPPEPPGILAPQPPDVGSSDPLSMVGSQGRSPSYAS

SEQ ID NO: 1251 - protein, 472 aa, Artificial Sequence
  Fusion Protein
HGEGTFTSDKSKQLEKRLVFLFIEWLIAGGHSSGKPPPKGGGGGGGSGGGGSGGGGSADKTHTCPPCPAPELLGGPSVFLFPPKPKDTLMISRTPEVTCVVVDVSHEDPEVKFNWYVDGVEVHNAKTKPREEQYNNASRVVSVLTVLHQDWLNGKEYKCKVSNKALPAPIEKTISKAKGQPREPQVYTLPPSRDELTKNQVSLTCLVKGFYPSDIAVEWESNGQPENNYKTTPPVLDSDGSFFLYSKLTVDKSRWQQGNVFSCSVMHEALHNHYTQKSLSLSPGGGGSGSAHPIPDSSPLLQFGGQVRQRYLYTDDACQTEAHLEIREDGTVGGAADQSPESLLQLKALKPGVIQILGVKTSRFLCQRPDGALYGSLHFDPEACSFRELLLEDGYNVYQSEAHGLPLHLPGCKSPHRDPAPRGPARFLPLPGLPPAPPEPPGILAPQPPDVGSSDPLSMVYPSQGRSPSYAS

SEQ ID NO: 1252 - protein, 471 aa, Artificial Sequence
  Fusion Protein
HGEGTFTSDKSKQLEKRLVFLFIEWLIAGGHSSGKPPPKGGGGGGGSGGGGSGGGGSADKTHTCPPCPAPELLGGPSVFLFPPKPKDTLMISRTPEVTCVVVDVSHEDPEVKFNWYVDGVEVHNAKTKPREEQYNNASRVVSVLTVLHQDWLNGKEYKCKVSNKALPAPIEKTISKAKGQPREPQVYTLPPSRDELTKNQVSLTCLVKGFYPSDIAVEWESNGQPENNYKTTPPVLDSDGSFFLYSKLTVDKSRWQQGNVFSCSVMHEALHNHYTQKSLSLSPGGGGSGSAHPIPDSSPLLQFGGQVRQRYLYTDDACQTEAHLEIREDGTVGGAADQSPESLLQLKALKPGVIQILGVKTSRFLCQRPDGALYGSLHFDPEACSFRELLLEDGYNVYQSEAHGLPLHLCGNKSPHRDPAPRGPARFLPLPGLPPAPPEPPGILAPQPPDVGSSDPLSMVGSQGRSPSYAS

SEQ ID NO: 1253 - protein, 472 aa, Artificial Sequence
  Fusion Protein
HGEGTFTSDKSKQLEKRLVFLFIEWLIAGGHSSGKPPPKGGGGGGGSGGGGSGGGGSADKTHTCPPCPAPELLGGPSVFLFPPKPKDTLMISRTPEVTCVVVDVSHEDPEVKFNWYVDGVEVHNAKTKPREEQYNNASRVVSVLTVLHQDWLNGKEYKCKVSNKALPAPIEKTISKAKGQPREPQVYTLPPSRDELTKNQVSLTCLVKGFYPSDIAVEWESNGQPENNYKTTPPVLDSDGSFFLYSKLTVDKSRWQQGNVFSCSVMHEALHNHYTQKSLSLSPGGGGSGSAHPIPDSSPLLQFGGQVRQRYLYTDDACQTEAHLEIREDGTVGGAADQSPESLLQLKALKPGVIQILGVKTSRFLCQRPDGALYGSLHFDPEACSFRELLLEDGYNVYQSEAHGLPLHLCGNKSPHRDPAPRGPARFLPLPGLPPAPPEPPGILAPQPPDVGSSDPLSMVYPSQGRSPSYAS

SEQ ID NO: 1254 - protein, 474 aa, Artificial Sequence
  Fusion Protein
HGEGTFTSDKSKQLEKRLVFLFIEWLIAGGHSSGKPPPKGGGGGGGSGGGGSGGGGSAESKYGPPCPPCPAPEFEGGPSVFLFPPKPKDTLMISRTPEVTCVVVDVSQEDPEVQFNWYVDGVEVHNAKTKPREEQFNSTYRVVSVLTVLHQDWLNGKEYKCKVSNKGLPSSIEKTISKAKGQPREPQVYTLPPSQEEMTKNQVSLTCLVKGFYPSDIAVEWESNGQPENNYKTTPPVLDSDGSFFLYSRLTVDKSRWQEGNVFSCSVMHEALHNHYTQKSLSLSLGGGGSGSAHPIPDSSPLLQFGGQVRQRYLYTDDACQTEAHLEIREDGTVGGAADQSPESLLQLKALKPGVIQILGVKTSRFLCQRPDGALYGSLHFDPEACSFRELLLEDGYNVYQSEAHGLPLHLPGCKSPHRDPAPRGPARFLPLPGLPPAPPEPPGILAPQPPDVGSSDPLSMVYPSQGRSPSYAS

SEQ ID NO: 1255 - protein, 473 aa, Artificial Sequence
  Fusion Protein
HGEGTFTSDKSKQLEKRLVFLFIEWLIAGGHSSGKPPPKGGGGGGGSGGGGSGGGGSAESKYGPPCPPCPAPEFEGGPSVFLFPPKPKDTLMISRTPEVTCVVVDVSQEDPEVQFNWYVDGVEVHNAKTKPREEQFNSTYRVVSVLTVLHQDWLNGKEYKCKVSNKGLPSSIEKTISKAKGQPREPQVYTLPPSQEEMTKNQVSLTCLVKGFYPSDIAVEWESNGQPENNYKTTPPVLDSDGSFFLYSRLTVDKSRWQEGNVFSCSVMHEALHNHYTQKSLSLSLGGGGSGSAHPIPDSSPLLQFGGQVRQRYLYTDDACQTEAHLEIREDGTVGGAADQSPESLLQLKALKPGVIQILGVKTSRFLCQRPDGALYGSLHFDPEACSFRELLLEDGYNVYQSEAHGLPLHLCGNKSPHRDPAPRGPARFLPLPGLPPAPPEPPGILAPQPPDVGSSDPLSMVGSQGRSPSYAS

SEQ ID NO: 1256 - protein, 474 aa, Artificial Sequence
  Fusion Protein
HGEGTFTSDKSKQLEKRLVFLFIEWLIAGGHSSGKPPPKGGGGGGGSGGGGSGGGGSAESKYGPPCPPCPAPEFEGGPSVFLFPPKPKDTLMISRTPEVTCVVVDVSQEDPEVQFNWYVDGVEVHNAKTKPREEQFNSTYRVVSVLTVLHQDWLNGKEYKCKVSNKGLPSSIEKTISKAKGQPREPQVYTLPPSQEEMTKNQVSLTCLVKGFYPSDIAVEWESNGQPENNYKTTPPVLDSDGSFFLYSRLTVDKSRWQEGNVFSCSVMHEALHNHYTQKSLSLSLGGGGSGSAHPIPDSSPLLQFGGQVRQRYLYTDDACQTEAHLEIREDGTVGGAADQSPESLLQLKALKPGVIQILGVKTSRFLCQRPDGALYGSLHFDPEACSFRELLLEDGYNVYQSEAHGLPLHLCGNKSPHRDPAPRGPARFLPLPGLPPAPPEPPGILAPQPPDVGSSDPLSMVYPSQGRSPSYAS

SEQ ID NO: 1257 - protein, 471 aa, Artificial Sequence
  Fusion Protein
HGEGTFTSDKSKQLEKRLVILFIEWLIAGGHSSGKPPPKGGGGGGGSGGGGSGGGGSADKTHTCPPCPAPEAAGGPSVFLFPPKPKDTLMISRTPEVTCVVVDVSHEDPEVKFNWYVDGVEVHNAKTKPREEQYNSTYRVVSVLTVLHQDWLNGKEYKCKVSNKALPAPIEKTISKAKGQPREPQVYTLPPSRDELTKNQVSLTCLVKGFYPSDIAVEWESNGQPENNYKTTPPVLDSDGSFFLYSKLTVDKSRWQQGNVFSCSVMHEALHNHYTQKSLSLSPGGGGSGSAHPIPDSSPLLQFGGQVRQRYLYTDDACQTEAHLEIREDGTVGGAADQSPESLLQLKALKPGVIQILGVKTSRFLCQRPDGALYGSLHFDPEACSFRELLLEDGYNVYQSEAHGLPLHLPGCKSPHRDPAPRGPARFLPLPGLPPAPPEPPGILAPQPPDVGSSDPLSMVGSQGRSPSYAS

SEQ ID NO: 1258 - protein, 472 aa, Artificial Sequence
  Fusion Protein
HGEGTFTSDKSKQLEKRLVILFIEWLIAGGHSSGKPPPKGGGGGGGSGGGGSGGGGSADKTHTCPPCPAPEAAGGPSVFLFPPKPKDTLMISRTPEVTCVVVDVSHEDPEVKFNWYVDGVEVHNAKTKPREEQYNSTYRVVSVLTVLHQDWLNGKEYKCKVSNKALPAPIEKTISKAKGQPREPQVYTLPPSRDELTKNQVSLTCLVKGFYPSDIAVEWESNGQPENNYKTTPPVLDSDGSFFLYSKLTVDKSRWQQGNVFSCSVMHEALHNHYTQKSLSLSPGGGGSGSAHPIPDSSPLLQFGGQVRQRYLYTDDACQTEAHLEIREDGTVGGAADQSPESLLQLKALKPGVIQILGVKTSRFLCQRPDGALYGSLHFDPEACSFRELLLEDGYNVYQSEAHGLPLHLPGCKSPHRDPAPRGPARFLPLPGLPPAPPEPPGILAPQPPDVGSSDPLSMVYPSQGRSPSYAS

SEQ ID NO: 1259 - protein, 471 aa, Artificial Sequence
  Fusion Protein
HGEGTFTSDKSKQLEKRLVILFIEWLIAGGHSSGKPPPKGGGGGGGSGGGGSGGGGSADKTHTCPPCPAPEAAGGPSVFLFPPKPKDTLMISRTPEVTCVVVDVSHEDPEVKFNWYVDGVEVHNAKTKPREEQYNSTYRVVSVLTVLHQDWLNGKEYKCKVSNKALPAPIEKTISKAKGQPREPQVYTLPPSRDELTKNQVSLTCLVKGFYPSDIAVEWESNGQPENNYKTTPPVLDSDGSFFLYSKLTVDKSRWQQGNVFSCSVMHEALHNHYTQKSLSLSPGGGGSGSAHPIPDSSPLLQFGGQVRQRYLYTDDACQTEAHLEIREDGTVGGAADQSPESLLQLKALKPGVIQILGVKTSRFLCQRPDGALYGSLHFDPEACSFRELLLEDGYNVYQSEAHGLPLHLCGNKSPHRDPAPRGPARFLPLPGLPPAPPEPPGILAPQPPDVGSSDPLSMVGSQGRSPSYAS

SEQ ID NO: 1260 - protein, 472 aa, Artificial Sequence
  Fusion Protein
HGEGTFTSDKSKQLEKRLVILFIEWLIAGGHSSGKPPPKGGGGGGGSGGGGSGGGGSADKTHTCPPCPAPEAAGGPSVFLFPPKPKDTLMISRTPEVTCVVVDVSHEDPEVKFNWYVDGVEVHNAKTKPREEQYNSTYRVVSVLTVLHQDWLNGKEYKCKVSNKALPAPIEKTISKAKGQPREPQVYTLPPSRDELTKNQVSLTCLVKGFYPSDIAVEWESNGQPENNYKTTPPVLDSDGSFFLYSKLTVDKSRWQQGNVFSCSVMHEALHNHYTQKSLSLSPGGGGSGSAHPIPDSSPLLQFGGQVRQRYLYTDDACQTEAHLEIREDGTVGGAADQSPESLLQLKALKPGVIQILGVKTSRFLCQRPDGALYGSLHFDPEACSFRELLLEDGYNVYQSEAHGLPLHLCGNKSPHRDPAPRGPARFLPLPGLPPAPPEPPGILAPQPPDVGSSDPLSMVYPSQGRSPSYAS

SEQ ID NO: 1261 - protein, 471 aa, Artificial Sequence
  Fusion Protein
HGEGTFTSDKSKQLEKRLVILFIEWLIAGGHSSGKPPPKGGGGGGGSGGGGSGGGGSADKTHTCPPCPAPELLGGPSVFLFPPKPKDTLMISRTPEVTCVVVDVSHEDPEVKFNWYVDGVEVHNAKTKPREEQYNNASRVVSVLTVLHQDWLNGKEYKCKVSNKALPAPIEKTISKAKGQPREPQVYTLPPSRDELTKNQVSLTCLVKGFYPSDIAVEWESNGQPENNYKTTPPVLDSDGSFFLYSKLTVDKSRWQQGNVFSCSVMHEALHNHYTQKSLSLSPGGGGSGSAHPIPDSSPLLQFGGQVRQRYLYTDDACQTEAHLEIREDGTVGGAADQSPESLLQLKALKPGVIQILGVKTSRFLCQRPDGALYGSLHFDPEACSFRELLLEDGYNVYQSEAHGLPLHLPGCKSPHRDPAPRGPARFLPLPGLPPAPPEPPGILAPQPPDVGSSDPLSMVGSQGRSPSYAS

SEQ ID NO: 1262 - protein, 472 aa, Artificial Sequence
  Fusion Protein
HGEGTFTSDKSKQLEKRLVILFIEWLIAGGHSSGKPPPKGGGGGGGSGGGGSGGGGSADKTHTCPPCPAPELLGGPSVFLFPPKPKDTLMISRTPEVTCVVVDVSHEDPEVKFNWYVDGVEVHNAKTKPREEQYNNASRVVSVLTVLHQDWLNGKEYKCKVSNKALPAPIEKTISKAKGQPREPQVYTLPPSRDELTKNQVSLTCLVKGFYPSDIAVEWESNGQPENNYKTTPPVLDSDGSFFLYSKLTVDKSRWQQGNVFSCSVMHEALHNHYTQKSLSLSPGGGGSGSAHPIPDSSPLLQFGGQVRQRYLYTDDACQTEAHLEIREDGTVGGAADQSPESLLQLKALKPGVIQILGVKTSRFLCQRPDGALYGSLHFDPEACSFRELLLEDGYNVYQSEAHGLPLHLPGCKSPHRDPAPRGPARFLPLPGLPPAPPEPPGILAPQPPDVGSSDPLSMVYPSQGRSPSYAS

SEQ ID NO: 1263 - protein, 471 aa, Artificial Sequence
  Fusion Protein
HGEGTFTSDKSKQLEKRLVILFIEWLIAGGHSSGKPPPKGGGGGGGSGGGGSGGGGSADKTHTCPPCPAPELLGGPSVFLFPPKPKDTLMISRTPEVTCVVVDVSHEDPEVKFNWYVDGVEVHNAKTKPREEQYNNASRVVSVLTVLHQDWLNGKEYKCKVSNKALPAPIEKTISKAKGQPREPQVYTLPPSRDELTKNQVSLTCLVKGFYPSDIAVEWESNGQPENNYKTTPPVLDSDGSFFLYSKLTVDKSRWQQGNVFSCSVMHEALHNHYTQKSLSLSPGGGGSGSAHPIPDSSPLLQFGGQVRQRYLYTDDACQTEAHLEIREDGTVGGAADQSPESLLQLKALKPGVIQILGVKTSRFLCQRPDGALYGSLHFDPEACSFRELLLEDGYNVYQSEAHGLPLHLCGNKSPHRDPAPRGPARFLPLPGLPPAPPEPPGILAPQPPDVGSSDPLSMVGSQGRSPSYAS

SEQ ID NO: 1264 - protein, 472 aa, Artificial Sequence
  Fusion Protein
HGEGTFTSDKSKQLEKRLVILFIEWLIAGGHSSGKPPPKGGGGGGGSGGGGSGGGGSADKTHTCPPCPAPELLGGPSVFLFPPKPKDTLMISRTPEVTCVVVDVSHEDPEVKFNWYVDGVEVHNAKTKPREEQYNNASRVVSVLTVLHQDWLNGKEYKCKVSNKALPAPIEKTISKAKGQPREPQVYTLPPSRDELTKNQVSLTCLVKGFYPSDIAVEWESNGQPENNYKTTPPVLDSDGSFFLYSKLTVDKSRWQQGNVFSCSVMHEALHNHYTQKSLSLSPGGGGSGSAHPIPDSSPLLQFGGQVRQRYLYTDDACQTEAHLEIREDGTVGGAADQSPESLLQLKALKPGVIQILGVKTSRFLCQRPDGALYGSLHFDPEACSFRELLLEDGYNVYQSEAHGLPLHLCGNKSPHRDPAPRGPARFLPLPGLPPAPPEPPGILAPQPPDVGSSDPLSMVYPSQGRSPSYAS

SEQ ID NO: 1265 - protein, 474 aa, Artificial Sequence
  Fusion Protein
HGEGTFTSDKSKQLEKRLVILFIEWLIAGGHSSGKPPPKGGGGGGGSGGGGSGGGGSAESKYGPPCPPCPAPEFEGGPSVFLFPPKPKDTLMISRTPEVTCVVVDVSQEDPEVQFNWYVDGVEVHNAKTKPREEQFNSTYRVVSVLTVLHQDWLNGKEYKCKVSNKGLPSSIEKTISKAKGQPREPQVYTLPPSQEEMTKNQVSLTCLVKGFYPSDIAVEWESNGQPENNYKTTPPVLDSDGSFFLYSRLTVDKSRWQEGNVFSCSVMHEALHNHYTQKSLSLSLGGGGSGSAHPIPDSSPLLQFGGQVRQRYLYTDDACQTEAHLEIREDGTVGGAADQSPESLLQLKALKPGVIQILGVKTSRFLCQRPDGALYGSLHFDPEACSFRELLLEDGYNVYQSEAHGLPLHLPGCKSPHRDPAPRGPARFLPLPGLPPAPPEPPGILAPQPPDVGSSDPLSMVYPSQGRSPSYAS

SEQ ID NO: 1266 - protein, 473 aa, Artificial Sequence
  Fusion Protein
HGEGTFTSDKSKQLEKRLVILFIEWLIAGGHSSGKPPPKGGGGGGGSGGGGSGGGGSAESKYGPPCPPCPAPEFEGGPSVFLFPPKPKDTLMISRTPEVTCVVVDVSQEDPEVQFNWYVDGVEVHNAKTKPREEQFNSTYRVVSVLTVLHQDWLNGKEYKCKVSNKGLPSSIEKTISKAKGQPREPQVYTLPPSQEEMTKNQVSLTCLVKGFYPSDIAVEWESNGQPENNYKTTPPVLDSDGSFFLYSRLTVDKSRWQEGNVFSCSVMHEALHNHYTQKSLSLSLGGGGSGSAHPIPDSSPLLQFGGQVRQRYLYTDDACQTEAHLEIREDGTVGGAADQSPESLLQLKALKPGVIQILGVKTSRFLCQRPDGALYGSLHFDPEACSFRELLLEDGYNVYQSEAHGLPLHLCGNKSPHRDPAPRGPARFLPLPGLPPAPPEPPGILAPQPPDVGSSDPLSMVGSQGRSPSYAS

SEQ ID NO: 1267 - protein, 474 aa, Artificial Sequence
  Fusion Protein
HGEGTFTSDKSKQLEKRLVILFIEWLIAGGHSSGKPPPKGGGGGGGSGGGGSGGGGSAESKYGPPCPPCPAPEFEGGPSVFLFPPKPKDTLMISRTPEVTCVVVDVSQEDPEVQFNWYVDGVEVHNAKTKPREEQFNSTYRVVSVLTVLHQDWLNGKEYKCKVSNKGLPSSIEKTISKAKGQPREPQVYTLPPSQEEMTKNQVSLTCLVKGFYPSDIAVEWESNGQPENNYKTTPPVLDSDGSFFLYSRLTVDKSRWQEGNVFSCSVMHEALHNHYTQKSLSLSLGGGGSGSAHPIPDSSPLLQFGGQVRQRYLYTDDACQTEAHLEIREDGTVGGAADQSPESLLQLKALKPGVIQILGVKTSRFLCQRPDGALYGSLHFDPEACSFRELLLEDGYNVYQSEAHGLPLHLCGNKSPHRDPAPRGPARFLPLPGLPPAPPEPPGILAPQPPDVGSSDPLSMVYPSQGRSPSYAS

SEQ ID NO: 1268 - protein, 471 aa, Artificial Sequence
  Fusion Protein
HGEGTFTSDKSKQLEKRLVRIFIEWLIAGGHSSGKPPPKGGGGGGGSGGGGSGGGGSADKTHTCPPCPAPEAAGGPSVFLFPPKPKDTLMISRTPEVTCVVVDVSHEDPEVKFNWYVDGVEVHNAKTKPREEQYNSTYRVVSVLTVLHQDWLNGKEYKCKVSNKALPAPIEKTISKAKGQPREPQVYTLPPSRDELTKNQVSLTCLVKGFYPSDIAVEWESNGQPENNYKTTPPVLDSDGSFFLYSKLTVDKSRWQQGNVFSCSVMHEALHNHYTQKSLSLSPGGGGSGSAHPIPDSSPLLQFGGQVRQRYLYTDDACQTEAHLEIREDGTVGGAADQSPESLLQLKALKPGVIQILGVKTSRFLCQRPDGALYGSLHFDPEACSFRELLLEDGYNVYQSEAHGLPLHLPGCKSPHRDPAPRGPARFLPLPGLPPAPPEPPGILAPQPPDVGSSDPLSMVGSQGRSPSYAS

SEQ ID NO: 1269 - protein, 472 aa, Artificial Sequence
  Fusion Protein
HGEGTFTSDKSKQLEKRLVRIFIEWLIAGGHSSGKPPPKGGGGGGGSGGGGSGGGGSADKTHTCPPCPAPEAAGGPSVFLFPPKPKDTLMISRTPEVTCVVVDVSHEDPEVKFNWYVDGVEVHNAKTKPREEQYNSTYRVVSVLTVLHQDWLNGKEYKCKVSNKALPAPIEKTISKAKGQPREPQVYTLPPSRDELTKNQVSLTCLVKGFYPSDIAVEWESNGQPENNYKTTPPVLDSDGSFFLYSKLTVDKSRWQQGNVFSCSVMHEALHNHYTQKSLSLSPGGGGSGSAHPIPDSSPLLQFGGQVRQRYLYTDDACQTEAHLEIREDGTVGGAADQSPESLLQLKALKPGVIQILGVKTSRFLCQRPDGALYGSLHFDPEACSFRELLLEDGYNVYQSEAHGLPLHLPGCKSPHRDPAPRGPARFLPLPGLPPAPPEPPGILAPQPPDVGSSDPLSMVYPSQGRSPSYAS

SEQ ID NO: 1270 - protein, 471 aa, Artificial Sequence
  Fusion Protein
HGEGTFTSDKSKQLEKRLVRIFIEWLIAGGHSSGKPPPKGGGGGGGSGGGGSGGGGSADKTHTCPPCPAPEAAGGPSVFLFPPKPKDTLMISRTPEVTCVVVDVSHEDPEVKFNWYVDGVEVHNAKTKPREEQYNSTYRVVSVLTVLHQDWLNGKEYKCKVSNKALPAPIEKTISKAKGQPREPQVYTLPPSRDELTKNQVSLTCLVKGFYPSDIAVEWESNGQPENNYKTTPPVLDSDGSFFLYSKLTVDKSRWQQGNVFSCSVMHEALHNHYTQKSLSLSPGGGGSGSAHPIPDSSPLLQFGGQVRQRYLYTDDACQTEAHLEIREDGTVGGAADQSPESLLQLKALKPGVIQILGVKTSRFLCQRPDGALYGSLHFDPEACSFRELLLEDGYNVYQSEAHGLPLHLCGNKSPHRDPAPRGPARFLPLPGLPPAPPEPPGILAPQPPDVGSSDPLSMVGSQGRSPSYAS

SEQ ID NO: 1271 - protein, 472 aa, Artificial Sequence
  Fusion Protein
HGEGTFTSDKSKQLEKRLVRIFIEWLIAGGHSSGKPPPKGGGGGGGSGGGGSGGGGSADKTHTCPPCPAPEAAGGPSVFLFPPKPKDTLMISRTPEVTCVVVDVSHEDPEVKFNWYVDGVEVHNAKTKPREEQYNSTYRVVSVLTVLHQDWLNGKEYKCKVSNKALPAPIEKTISKAKGQPREPQVYTLPPSRDELTKNQVSLTCLVKGFYPSDIAVEWESNGQPENNYKTTPPVLDSDGSFFLYSKLTVDKSRWQQGNVFSCSVMHEALHNHYTQKSLSLSPGGGGSGSAHPIPDSSPLLQFGGQVRQRYLYTDDACQTEAHLEIREDGTVGGAADQSPESLLQLKALKPGVIQILGVKTSRFLCQRPDGALYGSLHFDPEACSFRELLLEDGYNVYQSEAHGLPLHLCGNKSPHRDPAPRGPARFLPLPGLPPAPPEPPGILAPQPPDVGSSDPLSMVYPSQGRSPSYAS

SEQ ID NO: 1272 - protein, 471 aa, Artificial Sequence
  Fusion Protein
HGEGTFTSDKSKQLEKRLVRIFIEWLIAGGHSSGKPPPKGGGGGGGSGGGGSGGGGSADKTHTCPPCPAPELLGGPSVFLFPPKPKDTLMISRTPEVTCVVVDVSHEDPEVKFNWYVDGVEVHNAKTKPREEQYNNASRVVSVLTVLHQDWLNGKEYKCKVSNKALPAPIEKTISKAKGQPREPQVYTLPPSRDELTKNQVSLTCLVKGFYPSDIAVEWESNGQPENNYKTTPPVLDSDGSFFLYSKLTVDKSRWQQGNVFSCSVMHEALHNHYTQKSLSLSPGGGGSGSAHPIPDSSPLLQFGGQVRQRYLYTDDACQTEAHLEIREDGTVGGAADQSPESLLQLKALKPGVIQILGVKTSRFLCQRPDGALYGSLHFDPEACSFRELLLEDGYNVYQSEAHGLPLHLPGCKSPHRDPAPRGPARFLPLPGLPPAPPEPPGILAPQPPDVGSSDPLSMVGSQGRSPSYAS

SEQ ID NO: 1273 - protein, 472 aa, Artificial Sequence
  Fusion Protein
HGEGTFTSDKSKQLEKRLVRIFIEWLIAGGHSSGKPPPKGGGGGGGSGGGGSGGGGSADKTHTCPPCPAPELLGGPSVFLFPPKPKDTLMISRTPEVTCVVVDVSHEDPEVKFNWYVDGVEVHNAKTKPREEQYNNASRVVSVLTVLHQDWLNGKEYKCKVSNKALPAPIEKTISKAKGQPREPQVYTLPPSRDELTKNQVSLTCLVKGFYPSDIAVEWESNGQPENNYKTTPPVLDSDGSFFLYSKLTVDKSRWQQGNVFSCSVMHEALHNHYTQKSLSLSPGGGGSGSAHPIPDSSPLLQFGGQVRQRYLYTDDACQTEAHLEIREDGTVGGAADQSPESLLQLKALKPGVIQILGVKTSRFLCQRPDGALYGSLHFDPEACSFRELLLEDGYNVYQSEAHGLPLHLPGCKSPHRDPAPRGPARFLPLPGLPPAPPEPPGILAPQPPDVGSSDPLSMVYPSQGRSPSYAS

SEQ ID NO: 1274 - protein, 471 aa, Artificial Sequence
  Fusion Protein
HGEGTFTSDKSKQLEKRLVRIFIEWLIAGGHSSGKPPPKGGGGGGGSGGGGSGGGGSADKTHTCPPCPAPELLGGPSVFLFPPKPKDTLMISRTPEVTCVVVDVSHEDPEVKFNWYVDGVEVHNAKTKPREEQYNNASRVVSVLTVLHQDWLNGKEYKCKVSNKALPAPIEKTISKAKGQPREPQVYTLPPSRDELTKNQVSLTCLVKGFYPSDIAVEWESNGQPENNYKTTPPVLDSDGSFFLYSKLTVDKSRWQQGNVFSCSVMHEALHNHYTQKSLSLSPGGGGSGSAHPIPDSSPLLQFGGQVRQRYLYTDDACQTEAHLEIREDGTVGGAADQSPESLLQLKALKPGVIQILGVKTSRFLCQRPDGALYGSLHFDPEACSFRELLLEDGYNVYQSEAHGLPLHLCGNKSPHRDPAPRGPARFLPLPGLPPAPPEPPGILAPQPPDVGSSDPLSMVGSQGRSPSYAS

SEQ ID NO: 1275 - protein, 472 aa, Artificial Sequence
  Fusion Protein
HGEGTFTSDKSKQLEKRLVRIFIEWLIAGGHSSGKPPPKGGGGGGGSGGGGSGGGGSADKTHTCPPCPAPELLGGPSVFLFPPKPKDTLMISRTPEVTCVVVDVSHEDPEVKFNWYVDGVEVHNAKTKPREEQYNNASRVVSVLTVLHQDWLNGKEYKCKVSNKALPAPIEKTISKAKGQPREPQVYTLPPSRDELTKNQVSLTCLVKGFYPSDIAVEWESNGQPENNYKTTPPVLDSDGSFFLYSKLTVDKSRWQQGNVFSCSVMHEALHNHYTQKSLSLSPGGGGSGSAHPIPDSSPLLQFGGQVRQRYLYTDDACQTEAHLEIREDGTVGGAADQSPESLLQLKALKPGVIQILGVKTSRFLCQRPDGALYGSLHFDPEACSFRELLLEDGYNVYQSEAHGLPLHLCGNKSPHRDPAPRGPARFLPLPGLPPAPPEPPGILAPQPPDVGSSDPLSMVYPSQGRSPSYAS

SEQ ID NO: 1276 - protein, 474 aa, Artificial Sequence
  Fusion Protein
HGEGTFTSDKSKQLEKRLVRIFIEWLIAGGHSSGKPPPKGGGGGGGSGGGGSGGGGSAESKYGPPCPPCPAPEFEGGPSVFLFPPKPKDTLMISRTPEVTCVVVDVSQEDPEVQFNWYVDGVEVHNAKTKPREEQFNSTYRVVSVLTVLHQDWLNGKEYKCKVSNKGLPSSIEKTISKAKGQPREPQVYTLPPSQEEMTKNQVSLTCLVKGFYPSDIAVEWESNGQPENNYKTTPPVLDSDGSFFLYSRLTVDKSRWQEGNVFSCSVMHEALHNHYTQKSLSLSLGGGGSGSAHPIPDSSPLLQFGGQVRQRYLYTDDACQTEAHLEIREDGTVGGAADQSPESLLQLKALKPGVIQILGVKTSRFLCQRPDGALYGSLHFDPEACSFRELLLEDGYNVYQSEAHGLPLHLPGCKSPHRDPAPRGPARFLPLPGLPPAPPEPPGILAPQPPDVGSSDPLSMVYPSQGRSPSYAS

SEQ ID NO: 1277 - protein, 473 aa, Artificial Sequence
  Fusion Protein
HGEGTFTSDKSKQLEKRLVRIFIEWLIAGGHSSGKPPPKGGGGGGGSGGGGSGGGGSAESKYGPPCPPCPAPEFEGGPSVFLFPPKPKDTLMISRTPEVTCVVVDVSQEDPEVQFNWYVDGVEVHNAKTKPREEQFNSTYRVVSVLTVLHQDWLNGKEYKCKVSNKGLPSSIEKTISKAKGQPREPQVYTLPPSQEEMTKNQVSLTCLVKGFYPSDIAVEWESNGQPENNYKTTPPVLDSDGSFFLYSRLTVDKSRWQEGNVFSCSVMHEALHNHYTQKSLSLSLGGGGSGSAHPIPDSSPLLQFGGQVRQRYLYTDDACQTEAHLEIREDGTVGGAADQSPESLLQLKALKPGVIQILGVKTSRFLCQRPDGALYGSLHFDPEACSFRELLLEDGYNVYQSEAHGLPLHLCGNKSPHRDPAPRGPARFLPLPGLPPAPPEPPGILAPQPPDVGSSDPLSMVGSQGRSPSYAS

SEQ ID NO: 1278 - protein, 474 aa, Artificial Sequence
  Fusion Protein
HGEGTFTSDKSKQLEKRLVRIFIEWLIAGGHSSGKPPPKGGGGGGGSGGGGSGGGGSAESKYGPPCPPCPAPEFEGGPSVFLFPPKPKDTLMISRTPEVTCVVVDVSQEDPEVQFNWYVDGVEVHNAKTKPREEQFNSTYRVVSVLTVLHQDWLNGKEYKCKVSNKGLPSSIEKTISKAKGQPREPQVYTLPPSQEEMTKNQVSLTCLVKGFYPSDIAVEWESNGQPENNYKTTPPVLDSDGSFFLYSRLTVDKSRWQEGNVFSCSVMHEALHNHYTQKSLSLSLGGGGSGSAHPIPDSSPLLQFGGQVRQRYLYTDDACQTEAHLEIREDGTVGGAADQSPESLLQLKALKPGVIQILGVKTSRFLCQRPDGALYGSLHFDPEACSFRELLLEDGYNVYQSEAHGLPLHLCGNKSPHRDPAPRGPARFLPLPGLPPAPPEPPGILAPQPPDVGSSDPLSMVYPSQGRSPSYAS

SEQ ID NO: 1279 - protein, 471 aa, Artificial Sequence
  Fusion Protein
HGEGTFTSDKSKQLEKRLVRLLIEWLIAGGHSSGKPPPKGGGGGGGSGGGGSGGGGSADKTHTCPPCPAPEAAGGPSVFLFPPKPKDTLMISRTPEVTCVVVDVSHEDPEVKFNWYVDGVEVHNAKTKPREEQYNSTYRVVSVLTVLHQDWLNGKEYKCKVSNKALPAPIEKTISKAKGQPREPQVYTLPPSRDELTKNQVSLTCLVKGFYPSDIAVEWESNGQPENNYKTTPPVLDSDGSFFLYSKLTVDKSRWQQGNVFSCSVMHEALHNHYTQKSLSLSPGGGGSGSAHPIPDSSPLLQFGGQVRQRYLYTDDACQTEAHLEIREDGTVGGAADQSPESLLQLKALKPGVIQILGVKTSRFLCQRPDGALYGSLHFDPEACSFRELLLEDGYNVYQSEAHGLPLHLPGCKSPHRDPAPRGPARFLPLPGLPPAPPEPPGILAPQPPDVGSSDPLSMVGSQGRSPSYAS

SEQ ID NO: 1280 - protein, 472 aa, Artificial Sequence
  Fusion Protein
HGEGTFTSDKSKQLEKRLVRLLIEWLIAGGHSSGKPPPKGGGGGGGSGGGGSGGGGSADKTHTCPPCPAPEAAGGPSVFLFPPKPKDTLMISRTPEVTCVVVDVSHEDPEVKFNWYVDGVEVHNAKTKPREEQYNSTYRVVSVLTVLHQDWLNGKEYKCKVSNKALPAPIEKTISKAKGQPREPQVYTLPPSRDELTKNQVSLTCLVKGFYPSDIAVEWESNGQPENNYKTTPPVLDSDGSFFLYSKLTVDKSRWQQGNVFSCSVMHEALHNHYTQKSLSLSPGGGGSGSAHPIPDSSPLLQFGGQVRQRYLYTDDACQTEAHLEIREDGTVGGAADQSPESLLQLKALKPGVIQILGVKTSRFLCQRPDGALYGSLHFDPEACSFRELLLEDGYNVYQSEAHGLPLHLPGCKSPHRDPAPRGPARFLPLPGLPPAPPEPPGILAPQPPDVGSSDPLSMVYPSQGRSPSYAS

SEQ ID NO: 1281 - protein, 471 aa, Artificial Sequence
  Fusion Protein
HGEGTFTSDKSKQLEKRLVRLLIEWLIAGGHSSGKPPPKGGGGGGGSGGGGSGGGGSADKTHTCPPCPAPEAAGGPSVFLFPPKPKDTLMISRTPEVTCVVVDVSHEDPEVKFNWYVDGVEVHNAKTKPREEQYNSTYRVVSVLTVLHQDWLNGKEYKCKVSNKALPAPIEKTISKAKGQPREPQVYTLPPSRDELTKNQVSLTCLVKGFYPSDIAVEWESNGQPENNYKTTPPVLDSDGSFFLYSKLTVDKSRWQQGNVFSCSVMHEALHNHYTQKSLSLSPGGGGSGSAHPIPDSSPLLQFGGQVRQRYLYTDDACQTEAHLEIREDGTVGGAADQSPESLLQLKALKPGVIQILGVKTSRFLCQRPDGALYGSLHFDPEACSFRELLLEDGYNVYQSEAHGLPLHLCGNKSPHRDPAPRGPARFLPLPGLPPAPPEPPGILAPQPPDVGSSDPLSMVGSQGRSPSYAS

SEQ ID NO: 1282 - protein, 472 aa, Artificial Sequence
  Fusion Protein
HGEGTFTSDKSKQLEKRLVRLLIEWLIAGGHSSGKPPPKGGGGGGGSGGGGSGGGGSADKTHTCPPCPAPEAAGGPSVFLFPPKPKDTLMISRTPEVTCVVVDVSHEDPEVKFNWYVDGVEVHNAKTKPREEQYNSTYRVVSVLTVLHQDWLNGKEYKCKVSNKALPAPIEKTISKAKGQPREPQVYTLPPSRDELTKNQVSLTCLVKGFYPSDIAVEWESNGQPENNYKTTPPVLDSDGSFFLYSKLTVDKSRWQQGNVFSCSVMHEALHNHYTQKSLSLSPGGGGSGSAHPIPDSSPLLQFGGQVRQRYLYTDDACQTEAHLEIREDGTVGGAADQSPESLLQLKALKPGVIQILGVKTSRFLCQRPDGALYGSLHFDPEACSFRELLLEDGYNVYQSEAHGLPLHLCGNKSPHRDPAPRGPARFLPLPGLPPAPPEPPGILAPQPPDVGSSDPLSMVYPSQGRSPSYAS

SEQ ID NO: 1283 - protein, 471 aa, Artificial Sequence
  Fusion Protein
HGEGTFTSDKSKQLEKRLVRLLIEWLIAGGHSSGKPPPKGGGGGGGSGGGGSGGGGSADKTHTCPPCPAPELLGGPSVFLFPPKPKDTLMISRTPEVTCVVVDVSHEDPEVKFNWYVDGVEVHNAKTKPREEQYNNASRVVSVLTVLHQDWLNGKEYKCKVSNKALPAPIEKTISKAKGQPREPQVYTLPPSRDELTKNQVSLTCLVKGFYPSDIAVEWESNGQPENNYKTTPPVLDSDGSFFLYSKLTVDKSRWQQGNVFSCSVMHEALHNHYTQKSLSLSPGGGGSGSAHPIPDSSPLLQFGGQVRQRYLYTDDACQTEAHLEIREDGTVGGAADQSPESLLQLKALKPGVIQILGVKTSRFLCQRPDGALYGSLHFDPEACSFRELLLEDGYNVYQSEAHGLPLHLPGCKSPHRDPAPRGPARFLPLPGLPPAPPEPPGILAPQPPDVGSSDPLSMVGSQGRSPSYAS

SEQ ID NO: 1284 - protein, 472 aa, Artificial Sequence
  Fusion Protein
HGEGTFTSDKSKQLEKRLVRLLIEWLIAGGHSSGKPPPKGGGGGGGSGGGGSGGGGSADKTHTCPPCPAPELLGGPSVFLFPPKPKDTLMISRTPEVTCVVVDVSHEDPEVKFNWYVDGVEVHNAKTKPREEQYNNASRVVSVLTVLHQDWLNGKEYKCKVSNKALPAPIEKTISKAKGQPREPQVYTLPPSRDELTKNQVSLTCLVKGFYPSDIAVEWESNGQPENNYKTTPPVLDSDGSFFLYSKLTVDKSRWQQGNVFSCSVMHEALHNHYTQKSLSLSPGGGGSGSAHPIPDSSPLLQFGGQVRQRYLYTDDACQTEAHLEIREDGTVGGAADQSPESLLQLKALKPGVIQILGVKTSRFLCQRPDGALYGSLHFDPEACSFRELLLEDGYNVYQSEAHGLPLHLPGCKSPHRDPAPRGPARFLPLPGLPPAPPEPPGILAPQPPDVGSSDPLSMVYPSQGRSPSYAS

SEQ ID NO: 1285 - protein, 471 aa, Artificial Sequence
  Fusion Protein
HGEGTFTSDKSKQLEKRLVRLLIEWLIAGGHSSGKPPPKGGGGGGGSGGGGSGGGGSADKTHTCPPCPAPELLGGPSVFLFPPKPKDTLMISRTPEVTCVVVDVSHEDPEVKFNWYVDGVEVHNAKTKPREEQYNNASRVVSVLTVLHQDWLNGKEYKCKVSNKALPAPIEKTISKAKGQPREPQVYTLPPSRDELTKNQVSLTCLVKGFYPSDIAVEWESNGQPENNYKTTPPVLDSDGSFFLYSKLTVDKSRWQQGNVFSCSVMHEALHNHYTQKSLSLSPGGGGSGSAHPIPDSSPLLQFGGQVRQRYLYTDDACQTEAHLEIREDGTVGGAADQSPESLLQLKALKPGVIQILGVKTSRFLCQRPDGALYGSLHFDPEACSFRELLLEDGYNVYQSEAHGLPLHLCGNKSPHRDPAPRGPARFLPLPGLPPAPPEPPGILAPQPPDVGSSDPLSMVGSQGRSPSYAS

SEQ ID NO: 1286 - protein, 472 aa, Artificial Sequence
  Fusion Protein
HGEGTFTSDKSKQLEKRLVRLLIEWLIAGGHSSGKPPPKGGGGGGGSGGGGSGGGGSADKTHTCPPCPAPELLGGPSVFLFPPKPKDTLMISRTPEVTCVVVDVSHEDPEVKFNWYVDGVEVHNAKTKPREEQYNNASRVVSVLTVLHQDWLNGKEYKCKVSNKALPAPIEKTISKAKGQPREPQVYTLPPSRDELTKNQVSLTCLVKGFYPSDIAVEWESNGQPENNYKTTPPVLDSDGSFFLYSKLTVDKSRWQQGNVFSCSVMHEALHNHYTQKSLSLSPGGGGSGSAHPIPDSSPLLQFGGQVRQRYLYTDDACQTEAHLEIREDGTVGGAADQSPESLLQLKALKPGVIQILGVKTSRFLCQRPDGALYGSLHFDPEACSFRELLLEDGYNVYQSEAHGLPLHLCGNKSPHRDPAPRGPARFLPLPGLPPAPPEPPGILAPQPPDVGSSDPLSMVYPSQGRSPSYAS

SEQ ID NO: 1287 - protein, 474 aa, Artificial Sequence
  Fusion Protein
HGEGTFTSDKSKQLEKRLVRLLIEWLIAGGHSSGKPPPKGGGGGGGSGGGGSGGGGSAESKYGPPCPPCPAPEFEGGPSVFLFPPKPKDTLMISRTPEVTCVVVDVSQEDPEVQFNWYVDGVEVHNAKTKPREEQFNSTYRVVSVLTVLHQDWLNGKEYKCKVSNKGLPSSIEKTISKAKGQPREPQVYTLPPSQEEMTKNQVSLTCLVKGFYPSDIAVEWESNGQPENNYKTTPPVLDSDGSFFLYSRLTVDKSRWQEGNVFSCSVMHEALHNHYTQKSLSLSLGGGGSGSAHPIPDSSPLLQFGGQVRQRYLYTDDACQTEAHLEIREDGTVGGAADQSPESLLQLKALKPGVIQILGVKTSRFLCQRPDGALYGSLHFDPEACSFRELLLEDGYNVYQSEAHGLPLHLPGCKSPHRDPAPRGPARFLPLPGLPPAPPEPPGILAPQPPDVGSSDPLSMVYPSQGRSPSYAS

SEQ ID NO: 1288 - protein, 473 aa, Artificial Sequence
  Fusion Protein
HGEGTFTSDKSKQLEKRLVRLLIEWLIAGGHSSGKPPPKGGGGGGGSGGGGSGGGGSAESKYGPPCPPCPAPEFEGGPSVFLFPPKPKDTLMISRTPEVTCVVVDVSQEDPEVQFNWYVDGVEVHNAKTKPREEQFNSTYRVVSVLTVLHQDWLNGKEYKCKVSNKGLPSSIEKTISKAKGQPREPQVYTLPPSQEEMTKNQVSLTCLVKGFYPSDIAVEWESNGQPENNYKTTPPVLDSDGSFFLYSRLTVDKSRWQEGNVFSCSVMHEALHNHYTQKSLSLSLGGGGSGSAHPIPDSSPLLQFGGQVRQRYLYTDDACQTEAHLEIREDGTVGGAADQSPESLLQLKALKPGVIQILGVKTSRFLCQRPDGALYGSLHFDPEACSFRELLLEDGYNVYQSEAHGLPLHLCGNKSPHRDPAPRGPARFLPLPGLPPAPPEPPGILAPQPPDVGSSDPLSMVGSQGRSPSYAS

SEQ ID NO: 1289 - protein, 474 aa, Artificial Sequence
  Fusion Protein
HGEGTFTSDKSKQLEKRLVRLLIEWLIAGGHSSGKPPPKGGGGGGGSGGGGSGGGGSAESKYGPPCPPCPAPEFEGGPSVFLFPPKPKDTLMISRTPEVTCVVVDVSQEDPEVQFNWYVDGVEVHNAKTKPREEQFNSTYRVVSVLTVLHQDWLNGKEYKCKVSNKGLPSSIEKTISKAKGQPREPQVYTLPPSQEEMTKNQVSLTCLVKGFYPSDIAVEWESNGQPENNYKTTPPVLDSDGSFFLYSRLTVDKSRWQEGNVFSCSVMHEALHNHYTQKSLSLSLGGGGSGSAHPIPDSSPLLQFGGQVRQRYLYTDDACQTEAHLEIREDGTVGGAADQSPESLLQLKALKPGVIQILGVKTSRFLCQRPDGALYGSLHFDPEACSFRELLLEDGYNVYQSEAHGLPLHLCGNKSPHRDPAPRGPARFLPLPGLPPAPPEPPGILAPQPPDVGSSDPLSMVYPSQGRSPSYAS

SEQ ID NO: 1290 - protein, 471 aa, Artificial Sequence
  Fusion Protein
HGEGTFTSDKSKQLEKRLVRLFHEWLIAGGHSSGKPPPKGGGGGGGSGGGGSGGGGSADKTHTCPPCPAPEAAGGPSVFLFPPKPKDTLMISRTPEVTCVVVDVSHEDPEVKFNWYVDGVEVHNAKTKPREEQYNSTYRVVSVLTVLHQDWLNGKEYKCKVSNKALPAPIEKTISKAKGQPREPQVYTLPPSRDELTKNQVSLTCLVKGFYPSDIAVEWESNGQPENNYKTTPPVLDSDGSFFLYSKLTVDKSRWQQGNVFSCSVMHEALHNHYTQKSLSLSPGGGGSGSAHPIPDSSPLLQFGGQVRQRYLYTDDACQTEAHLEIREDGTVGGAADQSPESLLQLKALKPGVIQILGVKTSRFLCQRPDGALYGSLHFDPEACSFRELLLEDGYNVYQSEAHGLPLHLPGCKSPHRDPAPRGPARFLPLPGLPPAPPEPPGILAPQPPDVGSSDPLSMVGSQGRSPSYAS

SEQ ID NO: 1291 - protein, 472 aa, Artificial Sequence
  Fusion Protein
HGEGTFTSDKSKQLEKRLVRLFHEWLIAGGHSSGKPPPKGGGGGGGSGGGGSGGGGSADKTHTCPPCPAPEAAGGPSVFLFPPKPKDTLMISRTPEVTCVVVDVSHEDPEVKFNWYVDGVEVHNAKTKPREEQYNSTYRVVSVLTVLHQDWLNGKEYKCKVSNKALPAPIEKTISKAKGQPREPQVYTLPPSRDELTKNQVSLTCLVKGFYPSDIAVEWESNGQPENNYKTTPPVLDSDGSFFLYSKLTVDKSRWQQGNVFSCSVMHEALHNHYTQKSLSLSPGGGGSGSAHPIPDSSPLLQFGGQVRQRYLYTDDACQTEAHLEIREDGTVGGAADQSPESLLQLKALKPGVIQILGVKTSRFLCQRPDGALYGSLHFDPEACSFRELLLEDGYNVYQSEAHGLPLHLPGCKSPHRDPAPRGPARFLPLPGLPPAPPEPPGILAPQPPDVGSSDPLSMVYPSQGRSPSYAS

SEQ ID NO: 1292 - protein, 471 aa, Artificial Sequence
  Fusion Protein
HGEGTFTSDKSKQLEKRLVRLFHEWLIAGGHSSGKPPPKGGGGGGGSGGGGSGGGGSADKTHTCPPCPAPEAAGGPSVFLFPPKPKDTLMISRTPEVTCVVVDVSHEDPEVKFNWYVDGVEVHNAKTKPREEQYNSTYRVVSVLTVLHQDWLNGKEYKCKVSNKALPAPIEKTISKAKGQPREPQVYTLPPSRDELTKNQVSLTCLVKGFYPSDIAVEWESNGQPENNYKTTPPVLDSDGSFFLYSKLTVDKSRWQQGNVFSCSVMHEALHNHYTQKSLSLSPGGGGSGSAHPIPDSSPLLQFGGQVRQRYLYTDDACQTEAHLEIREDGTVGGAADQSPESLLQLKALKPGVIQILGVKTSRFLCQRPDGALYGSLHFDPEACSFRELLLEDGYNVYQSEAHGLPLHLCGNKSPHRDPAPRGPARFLPLPGLPPAPPEPPGILAPQPPDVGSSDPLSMVGSQGRSPSYAS

SEQ ID NO: 1293 - protein, 472 aa, Artificial Sequence
  Fusion Protein
HGEGTFTSDKSKQLEKRLVRLFHEWLIAGGHSSGKPPPKGGGGGGGSGGGGSGGGGSADKTHTCPPCPAPEAAGGPSVFLFPPKPKDTLMISRTPEVTCVVVDVSHEDPEVKFNWYVDGVEVHNAKTKPREEQYNSTYRVVSVLTVLHQDWLNGKEYKCKVSNKALPAPIEKTISKAKGQPREPQVYTLPPSRDELTKNQVSLTCLVKGFYPSDIAVEWESNGQPENNYKTTPPVLDSDGSFFLYSKLTVDKSRWQQGNVFSCSVMHEALHNHYTQKSLSLSPGGGGSGSAHPIPDSSPLLQFGGQVRQRYLYTDDACQTEAHLEIREDGTVGGAADQSPESLLQLKALKPGVIQILGVKTSRFLCQRPDGALYGSLHFDPEACSFRELLLEDGYNVYQSEAHGLPLHLCGNKSPHRDPAPRGPARFLPLPGLPPAPPEPPGILAPQPPDVGSSDPLSMVYPSQGRSPSYAS

SEQ ID NO: 1294 - protein, 471 aa, Artificial Sequence
  Fusion Protein
HGEGTFTSDKSKQLEKRLVRLFHEWLIAGGHSSGKPPPKGGGGGGGSGGGGSGGGGSADKTHTCPPCPAPELLGGPSVFLFPPKPKDTLMISRTPEVTCVVVDVSHEDPEVKFNWYVDGVEVHNAKTKPREEQYNNASRVVSVLTVLHQDWLNGKEYKCKVSNKALPAPIEKTISKAKGQPREPQVYTLPPSRDELTKNQVSLTCLVKGFYPSDIAVEWESNGQPENNYKTTPPVLDSDGSFFLYSKLTVDKSRWQQGNVFSCSVMHEALHNHYTQKSLSLSPGGGGSGSAHPIPDSSPLLQFGGQVRQRYLYTDDACQTEAHLEIREDGTVGGAADQSPESLLQLKALKPGVIQILGVKTSRFLCQRPDGALYGSLHFDPEACSFRELLLEDGYNVYQSEAHGLPLHLPGCKSPHRDPAPRGPARFLPLPGLPPAPPEPPGILAPQPPDVGSSDPLSMVGSQGRSPSYAS

SEQ ID NO: 1295 - protein, 472 aa, Artificial Sequence
  Fusion Protein
HGEGTFTSDKSKQLEKRLVRLFHEWLIAGGHSSGKPPPKGGGGGGGSGGGGSGGGGSADKTHTCPPCPAPELLGGPSVFLFPPKPKDTLMISRTPEVTCVVVDVSHEDPEVKFNWYVDGVEVHNAKTKPREEQYNNASRVVSVLTVLHQDWLNGKEYKCKVSNKALPAPIEKTISKAKGQPREPQVYTLPPSRDELTKNQVSLTCLVKGFYPSDIAVEWESNGQPENNYKTTPPVLDSDGSFFLYSKLTVDKSRWQQGNVFSCSVMHEALHNHYTQKSLSLSPGGGGSGSAHPIPDSSPLLQFGGQVRQRYLYTDDACQTEAHLEIREDGTVGGAADQSPESLLQLKALKPGVIQILGVKTSRFLCQRPDGALYGSLHFDPEACSFRELLLEDGYNVYQSEAHGLPLHLPGCKSPHRDPAPRGPARFLPLPGLPPAPPEPPGILAPQPPDVGSSDPLSMVYPSQGRSPSYAS

SEQ ID NO: 1296 - protein, 471 aa, Artificial Sequence
  Fusion Protein
HGEGTFTSDKSKQLEKRLVRLFHEWLIAGGHSSGKPPPKGGGGGGGSGGGGSGGGGSADKTHTCPPCPAPELLGGPSVFLFPPKPKDTLMISRTPEVTCVVVDVSHEDPEVKFNWYVDGVEVHNAKTKPREEQYNNASRVVSVLTVLHQDWLNGKEYKCKVSNKALPAPIEKTISKAKGQPREPQVYTLPPSRDELTKNQVSLTCLVKGFYPSDIAVEWESNGQPENNYKTTPPVLDSDGSFFLYSKLTVDKSRWQQGNVFSCSVMHEALHNHYTQKSLSLSPGGGGSGSAHPIPDSSPLLQFGGQVRQRYLYTDDACQTEAHLEIREDGTVGGAADQSPESLLQLKALKPGVIQILGVKTSRFLCQRPDGALYGSLHFDPEACSFRELLLEDGYNVYQSEAHGLPLHLCGNKSPHRDPAPRGPARFLPLPGLPPAPPEPPGILAPQPPDVGSSDPLSMVGSQGRSPSYAS

SEQ ID NO: 1297 - protein, 472 aa, Artificial Sequence
  Fusion Protein
HGEGTFTSDKSKQLEKRLVRLFHEWLIAGGHSSGKPPPKGGGGGGGSGGGGSGGGGSADKTHTCPPCPAPELLGGPSVFLFPPKPKDTLMISRTPEVTCVVVDVSHEDPEVKFNWYVDGVEVHNAKTKPREEQYNNASRVVSVLTVLHQDWLNGKEYKCKVSNKALPAPIEKTISKAKGQPREPQVYTLPPSRDELTKNQVSLTCLVKGFYPSDIAVEWESNGQPENNYKTTPPVLDSDGSFFLYSKLTVDKSRWQQGNVFSCSVMHEALHNHYTQKSLSLSPGGGGSGSAHPIPDSSPLLQFGGQVRQRYLYTDDACQTEAHLEIREDGTVGGAADQSPESLLQLKALKPGVIQILGVKTSRFLCQRPDGALYGSLHFDPEACSFRELLLEDGYNVYQSEAHGLPLHLCGNKSPHRDPAPRGPARFLPLPGLPPAPPEPPGILAPQPPDVGSSDPLSMVYPSQGRSPSYAS

SEQ ID NO: 1298 - protein, 474 aa, Artificial Sequence
  Fusion Protein
HGEGTFTSDKSKQLEKRLVRLFHEWLIAGGHSSGKPPPKGGGGGGGSGGGGSGGGGSAESKYGPPCPPCPAPEFEGGPSVFLFPPKPKDTLMISRTPEVTCVVVDVSQEDPEVQFNWYVDGVEVHNAKTKPREEQFNSTYRVVSVLTVLHQDWLNGKEYKCKVSNKGLPSSIEKTISKAKGQPREPQVYTLPPSQEEMTKNQVSLTCLVKGFYPSDIAVEWESNGQPENNYKTTPPVLDSDGSFFLYSRLTVDKSRWQEGNVFSCSVMHEALHNHYTQKSLSLSLGGGGSGSAHPIPDSSPLLQFGGQVRQRYLYTDDACQTEAHLEIREDGTVGGAADQSPESLLQLKALKPGVIQILGVKTSRFLCQRPDGALYGSLHFDPEACSFRELLLEDGYNVYQSEAHGLPLHLPGCKSPHRDPAPRGPARFLPLPGLPPAPPEPPGILAPQPPDVGSSDPLSMVYPSQGRSPSYAS

SEQ ID NO: 1299 - protein, 473 aa, Artificial Sequence
  Fusion Protein
HGEGTFTSDKSKQLEKRLVRLFHEWLIAGGHSSGKPPPKGGGGGGGSGGGGSGGGGSAESKYGPPCPPCPAPEFEGGPSVFLFPPKPKDTLMISRTPEVTCVVVDVSQEDPEVQFNWYVDGVEVHNAKTKPREEQFNSTYRVVSVLTVLHQDWLNGKEYKCKVSNKGLPSSIEKTISKAKGQPREPQVYTLPPSQEEMTKNQVSLTCLVKGFYPSDIAVEWESNGQPENNYKTTPPVLDSDGSFFLYSRLTVDKSRWQEGNVFSCSVMHEALHNHYTQKSLSLSLGGGGSGSAHPIPDSSPLLQFGGQVRQRYLYTDDACQTEAHLEIREDGTVGGAADQSPESLLQLKALKPGVIQILGVKTSRFLCQRPDGALYGSLHFDPEACSFRELLLEDGYNVYQSEAHGLPLHLCGNKSPHRDPAPRGPARFLPLPGLPPAPPEPPGILAPQPPDVGSSDPLSMVGSQGRSPSYAS

SEQ ID NO: 1300 - protein, 474 aa, Artificial Sequence
  Fusion Protein
HGEGTFTSDKSKQLEKRLVRLFHEWLIAGGHSSGKPPPKGGGGGGGSGGGGSGGGGSAESKYGPPCPPCPAPEFEGGPSVFLFPPKPKDTLMISRTPEVTCVVVDVSQEDPEVQFNWYVDGVEVHNAKTKPREEQFNSTYRVVSVLTVLHQDWLNGKEYKCKVSNKGLPSSIEKTISKAKGQPREPQVYTLPPSQEEMTKNQVSLTCLVKGFYPSDIAVEWESNGQPENNYKTTPPVLDSDGSFFLYSRLTVDKSRWQEGNVFSCSVMHEALHNHYTQKSLSLSLGGGGSGSAHPIPDSSPLLQFGGQVRQRYLYTDDACQTEAHLEIREDGTVGGAADQSPESLLQLKALKPGVIQILGVKTSRFLCQRPDGALYGSLHFDPEACSFRELLLEDGYNVYQSEAHGLPLHLCGNKSPHRDPAPRGPARFLPLPGLPPAPPEPPGILAPQPPDVGSSDPLSMVYPSQGRSPSYAS

SEQ ID NO: 1301 - protein, 471 aa, Artificial Sequence
  Fusion Protein
HGEGTFTSDKSKQLEKRLVRLFYEWLIAGGHSSGKPPPKGGGGGGGSGGGGSGGGGSADKTHTCPPCPAPEAAGGPSVFLFPPKPKDTLMISRTPEVTCVVVDVSHEDPEVKFNWYVDGVEVHNAKTKPREEQYNSTYRVVSVLTVLHQDWLNGKEYKCKVSNKALPAPIEKTISKAKGQPREPQVYTLPPSRDELTKNQVSLTCLVKGFYPSDIAVEWESNGQPENNYKTTPPVLDSDGSFFLYSKLTVDKSRWQQGNVFSCSVMHEALHNHYTQKSLSLSPGGGGSGSAHPIPDSSPLLQFGGQVRQRYLYTDDACQTEAHLEIREDGTVGGAADQSPESLLQLKALKPGVIQILGVKTSRFLCQRPDGALYGSLHFDPEACSFRELLLEDGYNVYQSEAHGLPLHLPGCKSPHRDPAPRGPARFLPLPGLPPAPPEPPGILAPQPPDVGSSDPLSMVGSQGRSPSYAS

SEQ ID NO: 1302 - protein, 472 aa, Artificial Sequence; identical to SEQ ID NO: 229
  Fusion Protein

SEQ ID NO: 1303 - protein, 471 aa, Artificial Sequence
  Fusion Protein
HGEGTFTSDKSKQLEKRLVRLFYEWLIAGGHSSGKPPPKGGGGGGGSGGGGSGGGGSADKTHTCPPCPAPEAAGGPSVFLFPPKPKDTLMISRTPEVTCVVVDVSHEDPEVKFNWYVDGVEVHNAKTKPREEQYNSTYRVVSVLTVLHQDWLNGKEYKCKVSNKALPAPIEKTISKAKGQPREPQVYTLPPSRDELTKNQVSLTCLVKGFYPSDIAVEWESNGQPENNYKTTPPVLDSDGSFFLYSKLTVDKSRWQQGNVFSCSVMHEALHNHYTQKSLSLSPGGGGSGSAHPIPDSSPLLQFGGQVRQRYLYTDDACQTEAHLEIREDGTVGGAADQSPESLLQLKALKPGVIQILGVKTSRFLCQRPDGALYGSLHFDPEACSFRELLLEDGYNVYQSEAHGLPLHLCGNKSPHRDPAPRGPARFLPLPGLPPAPPEPPGILAPQPPDVGSSDPLSMVGSQGRSPSYAS

SEQ ID NO: 1304 - protein, 472 aa, Artificial Sequence
  Fusion Protein
HGEGTFTSDKSKQLEKRLVRLFYEWLIAGGHSSGKPPPKGGGGGGGSGGGGSGGGGSADKTHTCPPCPAPEAAGGPSVFLFPPKPKDTLMISRTPEVTCVVVDVSHEDPEVKFNWYVDGVEVHNAKTKPREEQYNSTYRVVSVLTVLHQDWLNGKEYKCKVSNKALPAPIEKTISKAKGQPREPQVYTLPPSRDELTKNQVSLTCLVKGFYPSDIAVEWESNGQPENNYKTTPPVLDSDGSFFLYSKLTVDKSRWQQGNVFSCSVMHEALHNHYTQKSLSLSPGGGGSGSAHPIPDSSPLLQFGGQVRQRYLYTDDACQTEAHLEIREDGTVGGAADQSPESLLQLKALKPGVIQILGVKTSRFLCQRPDGALYGSLHFDPEACSFRELLLEDGYNVYQSEAHGLPLHLCGNKSPHRDPAPRGPARFLPLPGLPPAPPEPPGILAPQPPDVGSSDPLSMVYPSQGRSPSYAS

SEQ ID NO: 1305 - protein, 471 aa, Artificial Sequence
  Fusion Protein
HGEGTFTSDKSKQLEKRLVRLFYEWLIAGGHSSGKPPPKGGGGGGGSGGGGSGGGGSADKTHTCPPCPAPELLGGPSVFLFPPKPKDTLMISRTPEVTCVVVDVSHEDPEVKFNWYVDGVEVHNAKTKPREEQYNNASRVVSVLTVLHQDWLNGKEYKCKVSNKALPAPIEKTISKAKGQPREPQVYTLPPSRDELTKNQVSLTCLVKGFYPSDIAVEWESNGQPENNYKTTPPVLDSDGSFFLYSKLTVDKSRWQQGNVFSCSVMHEALHNHYTQKSLSLSPGGGGSGSAHPIPDSSPLLQFGGQVRQRYLYTDDACQTEAHLEIREDGTVGGAADQSPESLLQLKALKPGVIQILGVKTSRFLCQRPDGALYGSLHFDPEACSFRELLLEDGYNVYQSEAHGLPLHLPGCKSPHRDPAPRGPARFLPLPGLPPAPPEPPGILAPQPPDVGSSDPLSMVGSQGRSPSYAS

SEQ ID NO: 1306 - protein, 472 aa, Artificial Sequence
  Fusion Protein
HGEGTFTSDKSKQLEKRLVRLFYEWLIAGGHSSGKPPPKGGGGGGGSGGGGSGGGGSADKTHTCPPCPAPELLGGPSVFLFPPKPKDTLMISRTPEVTCVVVDVSHEDPEVKFNWYVDGVEVHNAKTKPREEQYNNASRVVSVLTVLHQDWLNGKEYKCKVSNKALPAPIEKTISKAKGQPREPQVYTLPPSRDELTKNQVSLTCLVKGFYPSDIAVEWESNGQPENNYKTTPPVLDSDGSFFLYSKLTVDKSRWQQGNVFSCSVMHEALHNHYTQKSLSLSPGGGGSGSAHPIPDSSPLLQFGGQVRQRYLYTDDACQTEAHLEIREDGTVGGAADQSPESLLQLKALKPGVIQILGVKTSRFLCQRPDGALYGSLHFDPEACSFRELLLEDGYNVYQSEAHGLPLHLPGCKSPHRDPAPRGPARFLPLPGLPPAPPEPPGILAPQPPDVGSSDPLSMVYPSQGRSPSYAS

SEQ ID NO: 1307 - protein, 471 aa, Artificial Sequence
  Fusion Protein
HGEGTFTSDKSKQLEKRLVRLFYEWLIAGGHSSGKPPPKGGGGGGGSGGGGSGGGGSADKTHTCPPCPAPELLGGPSVFLFPPKPKDTLMISRTPEVTCVVVDVSHEDPEVKFNWYVDGVEVHNAKTKPREEQYNNASRVVSVLTVLHQDWLNGKEYKCKVSNKALPAPIEKTISKAKGQPREPQVYTLPPSRDELTKNQVSLTCLVKGFYPSDIAVEWESNGQPENNYKTTPPVLDSDGSFFLYSKLTVDKSRWQQGNVFSCSVMHEALHNHYTQKSLSLSPGGGGSGSAHPIPDSSPLLQFGGQVRQRYLYTDDACQTEAHLEIREDGTVGGAADQSPESLLQLKALKPGVIQILGVKTSRFLCQRPDGALYGSLHFDPEACSFRELLLEDGYNVYQSEAHGLPLHLCGNKSPHRDPAPRGPARFLPLPGLPPAPPEPPGILAPQPPDVGSSDPLSMVGSQGRSPSYAS

SEQ ID NO: 1308 - protein, 472 aa, Artificial Sequence
  Fusion Protein
HGEGTFTSDKSKQLEKRLVRLFYEWLIAGGHSSGKPPPKGGGGGGGSGGGGSGGGGSADKTHTCPPCPAPELLGGPSVFLFPPKPKDTLMISRTPEVTCVVVDVSHEDPEVKFNWYVDGVEVHNAKTKPREEQYNNASRVVSVLTVLHQDWLNGKEYKCKVSNKALPAPIEKTISKAKGQPREPQVYTLPPSRDELTKNQVSLTCLVKGFYPSDIAVEWESNGQPENNYKTTPPVLDSDGSFFLYSKLTVDKSRWQQGNVFSCSVMHEALHNHYTQKSLSLSPGGGGSGSAHPIPDSSPLLQFGGQVRQRYLYTDDACQTEAHLEIREDGTVGGAADQSPESLLQLKALKPGVIQILGVKTSRFLCQRPDGALYGSLHFDPEACSFRELLLEDGYNVYQSEAHGLPLHLCGNKSPHRDPAPRGPARFLPLPGLPPAPPEPPGILAPQPPDVGSSDPLSMVYPSQGRSPSYAS

SEQ ID NO: 1309 - protein, 474 aa, Artificial Sequence
  Fusion Protein
HGEGTFTSDKSKQLEKRLVRLFYEWLIAGGHSSGKPPPKGGGGGGGSGGGGSGGGGSAESKYGPPCPPCPAPEFEGGPSVFLFPPKPKDTLMISRTPEVTCVVVDVSQEDPEVQFNWYVDGVEVHNAKTKPREEQFNSTYRVVSVLTVLHQDWLNGKEYKCKVSNKGLPSSIEKTISKAKGQPREPQVYTLPPSQEEMTKNQVSLTCLVKGFYPSDIAVEWESNGQPENNYKTTPPVLDSDGSFFLYSRLTVDKSRWQEGNVFSCSVMHEALHNHYTQKSLSLSLGGGGSGSAHPIPDSSPLLQFGGQVRQRYLYTDDACQTEAHLEIREDGTVGGAADQSPESLLQLKALKPGVIQILGVKTSRFLCQRPDGALYGSLHFDPEACSFRELLLEDGYNVYQSEAHGLPLHLPGCKSPHRDPAPRGPARFLPLPGLPPAPPEPPGILAPQPPDVGSSDPLSMVYPSQGRSPSYAS

SEQ ID NO: 1310 - protein, 473 aa, Artificial Sequence
  Fusion Protein
HGEGTFTSDKSKQLEKRLVRLFYEWLIAGGHSSGKPPPKGGGGGGGSGGGGSGGGGSAESKYGPPCPPCPAPEFEGGPSVFLFPPKPKDTLMISRTPEVTCVVVDVSQEDPEVQFNWYVDGVEVHNAKTKPREEQFNSTYRVVSVLTVLHQDWLNGKEYKCKVSNKGLPSSIEKTISKAKGQPREPQVYTLPPSQEEMTKNQVSLTCLVKGFYPSDIAVEWESNGQPENNYKTTPPVLDSDGSFFLYSRLTVDKSRWQEGNVFSCSVMHEALHNHYTQKSLSLSLGGGGSGSAHPIPDSSPLLQFGGQVRQRYLYTDDACQTEAHLEIREDGTVGGAADQSPESLLQLKALKPGVIQILGVKTSRFLCQRPDGALYGSLHFDPEACSFRELLLEDGYNVYQSEAHGLPLHLCGNKSPHRDPAPRGPARFLPLPGLPPAPPEPPGILAPQPPDVGSSDPLSMVGSQGRSPSYAS

SEQ ID NO: 1311 - protein, 474 aa, Artificial Sequence
  Fusion Protein
HGEGTFTSDKSKQLEKRLVRLFYEWLIAGGHSSGKPPPKGGGGGGGSGGGGSGGGGSAESKYGPPCPPCPAPEFEGGPSVFLFPPKPKDTLMISRTPEVTCVVVDVSQEDPEVQFNWYVDGVEVHNAKTKPREEQFNSTYRVVSVLTVLHQDWLNGKEYKCKVSNKGLPSSIEKTISKAKGQPREPQVYTLPPSQEEMTKNQVSLTCLVKGFYPSDIAVEWESNGQPENNYKTTPPVLDSDGSFFLYSRLTVDKSRWQEGNVFSCSVMHEALHNHYTQKSLSLSLGGGGSGSAHPIPDSSPLLQFGGQVRQRYLYTDDACQTEAHLEIREDGTVGGAADQSPESLLQLKALKPGVIQILGVKTSRFLCQRPDGALYGSLHFDPEACSFRELLLEDGYNVYQSEAHGLPLHLCGNKSPHRDPAPRGPARFLPLPGLPPAPPEPPGILAPQPPDVGSSDPLSMVYPSQGRSPSYAS

SEQ ID NO: 1312 - protein, 471 aa, Artificial Sequence
  Fusion Protein
HGEGTFTSDKSKQLEKRLVRLFFEWLIAGGHSSGKPPPKGGGGGGGSGGGGSGGGGSADKTHTCPPCPAPEAAGGPSVFLFPPKPKDTLMISRTPEVTCVVVDVSHEDPEVKFNWYVDGVEVHNAKTKPREEQYNSTYRVVSVLTVLHQDWLNGKEYKCKVSNKALPAPIEKTISKAKGQPREPQVYTLPPSRDELTKNQVSLTCLVKGFYPSDIAVEWESNGQPENNYKTTPPVLDSDGSFFLYSKLTVDKSRWQQGNVFSCSVMHEALHNHYTQKSLSLSPGGGGSGSAHPIPDSSPLLQFGGQVRQRYLYTDDACQTEAHLEIREDGTVGGAADQSPESLLQLKALKPGVIQILGVKTSRFLCQRPDGALYGSLHFDPEACSFRELLLEDGYNVYQSEAHGLPLHLPGCKSPHRDPAPRGPARFLPLPGLPPAPPEPPGILAPQPPDVGSSDPLSMVGSQGRSPSYAS

SEQ ID NO: 1313 - protein, 472 aa, Artificial Sequence
  Fusion Protein
HGEGTFTSDKSKQLEKRLVRLFFEWLIAGGHSSGKPPPKGGGGGGGSGGGGSGGGGSADKTHTCPPCPAPEAAGGPSVFLFPPKPKDTLMISRTPEVTCVVVDVSHEDPEVKFNWYVDGVEVHNAKTKPREEQYNSTYRVVSVLTVLHQDWLNGKEYKCKVSNKALPAPIEKTISKAKGQPREPQVYTLPPSRDELTKNQVSLTCLVKGFYPSDIAVEWESNGQPENNYKTTPPVLDSDGSFFLYSKLTVDKSRWQQGNVFSCSVMHEALHNHYTQKSLSLSPGGGGSGSAHPIPDSSPLLQFGGQVRQRYLYTDDACQTEAHLEIREDGTVGGAADQSPESLLQLKALKPGVIQILGVKTSRFLCQRPDGALYGSLHFDPEACSFRELLLEDGYNVYQSEAHGLPLHLPGCKSPHRDPAPRGPARFLPLPGLPPAPPEPPGILAPQPPDVGSSDPLSMVYPSQGRSPSYAS

SEQ ID NO: 1314 - protein, 471 aa, Artificial Sequence
  Fusion Protein
HGEGTFTSDKSKQLEKRLVRLFFEWLIAGGHSSGKPPPKGGGGGGGSGGGGSGGGGSADKTHTCPPCPAPEAAGGPSVFLFPPKPKDTLMISRTPEVTCVVVDVSHEDPEVKFNWYVDGVEVHNAKTKPREEQYNSTYRVVSVLTVLHQDWLNGKEYKCKVSNKALPAPIEKTISKAKGQPREPQVYTLPPSRDELTKNQVSLTCLVKGFYPSDIAVEWESNGQPENNYKTTPPVLDSDGSFFLYSKLTVDKSRWQQGNVFSCSVMHEALHNHYTQKSLSLSPGGGGSGSAHPIPDSSPLLQFGGQVRQRYLYTDDACQTEAHLEIREDGTVGGAADQSPESLLQLKALKPGVIQILGVKTSRFLCQRPDGALYGSLHFDPEACSFRELLLEDGYNVYQSEAHGLPLHLCGNKSPHRDPAPRGPARFLPLPGLPPAPPEPPGILAPQPPDVGSSDPLSMVGSQGRSPSYAS

SEQ ID NO: 1315 - protein, 472 aa, Artificial Sequence
  Fusion Protein
HGEGTFTSDKSKQLEKRLVRLFFEWLIAGGHSSGKPPPKGGGGGGGSGGGGSGGGGSADKTHTCPPCPAPEAAGGPSVFLFPPKPKDTLMISRTPEVTCVVVDVSHEDPEVKFNWYVDGVEVHNAKTKPREEQYNSTYRVVSVLTVLHQDWLNGKEYKCKVSNKALPAPIEKTISKAKGQPREPQVYTLPPSRDELTKNQVSLTCLVKGFYPSDIAVEWESNGQPENNYKTTPPVLDSDGSFFLYSKLTVDKSRWQQGNVFSCSVMHEALHNHYTQKSLSLSPGGGGSGSAHPIPDSSPLLQFGGQVRQRYLYTDDACQTEAHLEIREDGTVGGAADQSPESLLQLKALKPGVIQILGVKTSRFLCQRPDGALYGSLHFDPEACSFRELLLEDGYNVYQSEAHGLPLHLCGNKSPHRDPAPRGPARFLPLPGLPPAPPEPPGILAPQPPDVGSSDPLSMVYPSQGRSPSYAS

SEQ ID NO: 1316 - protein, 471 aa, Artificial Sequence
  Fusion Protein
HGEGTFTSDKSKQLEKRLVRLFFEWLIAGGHSSGKPPPKGGGGGGGSGGGGSGGGGSADKTHTCPPCPAPELLGGPSVFLFPPKPKDTLMISRTPEVTCVVVDVSHEDPEVKFNWYVDGVEVHNAKTKPREEQYNNASRVVSVLTVLHQDWLNGKEYKCKVSNKALPAPIEKTISKAKGQPREPQVYTLPPSRDELTKNQVSLTCLVKGFYPSDIAVEWESNGQPENNYKTTPPVLDSDGSFFLYSKLTVDKSRWQQGNVFSCSVMHEALHNHYTQKSLSLSPGGGGSGSAHPIPDSSPLLQFGGQVRQRYLYTDDACQTEAHLEIREDGTVGGAADQSPESLLQLKALKPGVIQILGVKTSRFLCQRPDGALYGSLHFDPEACSFRELLLEDGYNVYQSEAHGLPLHLPGCKSPHRDPAPRGPARFLPLPGLPPAPPEPPGILAPQPPDVGSSDPLSMVGSQGRSPSYAS

SEQ ID NO: 1317 - protein, 472 aa, Artificial Sequence
  Fusion Protein
HGEGTFTSDKSKQLEKRLVRLFFEWLIAGGHSSGKPPPKGGGGGGGSGGGGSGGGGSADKTHTCPPCPAPELLGGPSVFLFPPKPKDTLMISRTPEVTCVVVDVSHEDPEVKFNWYVDGVEVHNAKTKPREEQYNNASRVVSVLTVLHQDWLNGKEYKCKVSNKALPAPIEKTISKAKGQPREPQVYTLPPSRDELTKNQVSLTCLVKGFYPSDIAVEWESNGQPENNYKTTPPVLDSDGSFFLYSKLTVDKSRWQQGNVFSCSVMHEALHNHYTQKSLSLSPGGGGSGSAHPIPDSSPLLQFGGQVRQRYLYTDDACQTEAHLEIREDGTVGGAADQSPESLLQLKALKPGVIQILGVKTSRFLCQRPDGALYGSLHFDPEACSFRELLLEDGYNVYQSEAHGLPLHLPGCKSPHRDPAPRGPARFLPLPGLPPAPPEPPGILAPQPPDVGSSDPLSMVYPSQGRSPSYAS

SEQ ID NO: 1318 - protein, 471 aa, Artificial Sequence
  Fusion Protein
HGEGTFTSDKSKQLEKRLVRLFFEWLIAGGHSSGKPPPKGGGGGGGSGGGGSGGGGSADKTHTCPPCPAPELLGGPSVFLFPPKPKDTLMISRTPEVTCVVVDVSHEDPEVKFNWYVDGVEVHNAKTKPREEQYNNASRVVSVLTVLHQDWLNGKEYKCKVSNKALPAPIEKTISKAKGQPREPQVYTLPPSRDELTKNQVSLTCLVKGFYPSDIAVEWESNGQPENNYKTTPPVLDSDGSFFLYSKLTVDKSRWQQGNVFSCSVMHEALHNHYTQKSLSLSPGGGGSGSAHPIPDSSPLLQFGGQVRQRYLYTDDACQTEAHLEIREDGTVGGAADQSPESLLQLKALKPGVIQILGVKTSRFLCQRPDGALYGSLHFDPEACSFRELLLEDGYNVYQSEAHGLPLHLCGNKSPHRDPAPRGPARFLPLPGLPPAPPEPPGILAPQPPDVGSSDPLSMVGSQGRSPSYAS

SEQ ID NO: 1319 - protein, 472 aa, Artificial Sequence
  Fusion Protein
HGEGTFTSDKSKQLEKRLVRLFFEWLIAGGHSSGKPPPKGGGGGGGSGGGGSGGGGSADKTHTCPPCPAPELLGGPSVFLFPPKPKDTLMISRTPEVTCVVVDVSHEDPEVKFNWYVDGVEVHNAKTKPREEQYNNASRVVSVLTVLHQDWLNGKEYKCKVSNKALPAPIEKTISKAKGQPREPQVYTLPPSRDELTKNQVSLTCLVKGFYPSDIAVEWESNGQPENNYKTTPPVLDSDGSFFLYSKLTVDKSRWQQGNVFSCSVMHEALHNHYTQKSLSLSPGGGGSGSAHPIPDSSPLLQFGGQVRQRYLYTDDACQTEAHLEIREDGTVGGAADQSPESLLQLKALKPGVIQILGVKTSRFLCQRPDGALYGSLHFDPEACSFRELLLEDGYNVYQSEAHGLPLHLCGNKSPHRDPAPRGPARFLPLPGLPPAPPEPPGILAPQPPDVGSSDPLSMVYPSQGRSPSYAS

SEQ ID NO: 1320 - protein, 474 aa, Artificial Sequence
  Fusion Protein
HGEGTFTSDKSKQLEKRLVRLFFEWLIAGGHSSGKPPPKGGGGGGGSGGGGSGGGGSAESKYGPPCPPCPAPEFEGGPSVFLFPPKPKDTLMISRTPEVTCVVVDVSQEDPEVQFNWYVDGVEVHNAKTKPREEQFNSTYRVVSVLTVLHQDWLNGKEYKCKVSNKGLPSSIEKTISKAKGQPREPQVYTLPPSQEEMTKNQVSLTCLVKGFYPSDIAVEWESNGQPENNYKTTPPVLDSDGSFFLYSRLTVDKSRWQEGNVFSCSVMHEALHNHYTQKSLSLSLGGGGSGSAHPIPDSSPLLQFGGQVRQRYLYTDDACQTEAHLEIREDGTVGGAADQSPESLLQLKALKPGVIQILGVKTSRFLCQRPDGALYGSLHFDPEACSFRELLLEDGYNVYQSEAHGLPLHLPGCKSPHRDPAPRGPARFLPLPGLPPAPPEPPGILAPQPPDVGSSDPLSMVYPSQGRSPSYAS

SEQ ID NO: 1321 - protein, 473 aa, Artificial Sequence
  Fusion Protein
HGEGTFTSDKSKQLEKRLVRLFFEWLIAGGHSSGKPPPKGGGGGGGSGGGGSGGGGSAESKYGPPCPPCPAPEFEGGPSVFLFPPKPKDTLMISRTPEVTCVVVDVSQEDPEVQFNWYVDGVEVHNAKTKPREEQFNSTYRVVSVLTVLHQDWLNGKEYKCKVSNKGLPSSIEKTISKAKGQPREPQVYTLPPSQEEMTKNQVSLTCLVKGFYPSDIAVEWESNGQPENNYKTTPPVLDSDGSFFLYSRLTVDKSRWQEGNVFSCSVMHEALHNHYTQKSLSLSLGGGGSGSAHPIPDSSPLLQFGGQVRQRYLYTDDACQTEAHLEIREDGTVGGAADQSPESLLQLKALKPGVIQILGVKTSRFLCQRPDGALYGSLHFDPEACSFRELLLEDGYNVYQSEAHGLPLHLCGNKSPHRDPAPRGPARFLPLPGLPPAPPEPPGILAPQPPDVGSSDPLSMVGSQGRSPSYAS

SEQ ID NO: 1322 - protein, 474 aa, Artificial Sequence
  Fusion Protein
HGEGTFTSDKSKQLEKRLVRLFFEWLIAGGHSSGKPPPKGGGGGGGSGGGGSGGGGSAESKYGPPCPPCPAPEFEGGPSVFLFPPKPKDTLMISRTPEVTCVVVDVSQEDPEVQFNWYVDGVEVHNAKTKPREEQFNSTYRVVSVLTVLHQDWLNGKEYKCKVSNKGLPSSIEKTISKAKGQPREPQVYTLPPSQEEMTKNQVSLTCLVKGFYPSDIAVEWESNGQPENNYKTTPPVLDSDGSFFLYSRLTVDKSRWQEGNVFSCSVMHEALHNHYTQKSLSLSLGGGGSGSAHPIPDSSPLLQFGGQVRQRYLYTDDACQTEAHLEIREDGTVGGAADQSPESLLQLKALKPGVIQILGVKTSRFLCQRPDGALYGSLHFDPEACSFRELLLEDGYNVYQSEAHGLPLHLCGNKSPHRDPAPRGPARFLPLPGLPPAPPEPPGILAPQPPDVGSSDPLSMVYPSQGRSPSYAS

SEQ ID NO: 1323 - protein, 471 aa, Artificial Sequence
  Fusion Protein
HGEGTFTSDKSKQLEKRLVRLFILWLIAGGHSSGKPPPKGGGGGGGSGGGGSGGGGSADKTHTCPPCPAPEAAGGPSVFLFPPKPKDTLMISRTPEVTCVVVDVSHEDPEVKFNWYVDGVEVHNAKTKPREEQYNSTYRVVSVLTVLHQDWLNGKEYKCKVSNKALPAPIEKTISKAKGQPREPQVYTLPPSRDELTKNQVSLTCLVKGFYPSDIAVEWESNGQPENNYKTTPPVLDSDGSFFLYSKLTVDKSRWQQGNVFSCSVMHEALHNHYTQKSLSLSPGGGGSGSAHPIPDSSPLLQFGGQVRQRYLYTDDACQTEAHLEIREDGTVGGAADQSPESLLQLKALKPGVIQILGVKTSRFLCQRPDGALYGSLHFDPEACSFRELLLEDGYNVYQSEAHGLPLHLPGCKSPHRDPAPRGPARFLPLPGLPPAPPEPPGILAPQPPDVGSSDPLSMVGSQGRSPSYAS

SEQ ID NO: 1324 - protein, 472 aa, Artificial Sequence
  Fusion Protein
HGEGTFTSDKSKQLEKRLVRLFILWLIAGGHSSGKPPPKGGGGGGGSGGGGSGGGGSADKTHTCPPCPAPEAAGGPSVFLFPPKPKDTLMISRTPEVTCVVVDVSHEDPEVKFNWYVDGVEVHNAKTKPREEQYNSTYRVVSVLTVLHQDWLNGKEYKCKVSNKALPAPIEKTISKAKGQPREPQVYTLPPSRDELTKNQVSLTCLVKGFYPSDIAVEWESNGQPENNYKTTPPVLDSDGSFFLYSKLTVDKSRWQQGNVFSCSVMHEALHNHYTQKSLSLSPGGGGSGSAHPIPDSSPLLQFGGQVRQRYLYTDDACQTEAHLEIREDGTVGGAADQSPESLLQLKALKPGVIQILGVKTSRFLCQRPDGALYGSLHFDPEACSFRELLLEDGYNVYQSEAHGLPLHLPGCKSPHRDPAPRGPARFLPLPGLPPAPPEPPGILAPQPPDVGSSDPLSMVYPSQGRSPSYAS

SEQ ID NO: 1325 - protein, 471 aa, Artificial Sequence
  Fusion Protein
HGEGTFTSDKSKQLEKRLVRLFILWLIAGGHSSGKPPPKGGGGGGGSGGGGSGGGGSADKTHTCPPCPAPEAAGGPSVFLFPPKPKDTLMISRTPEVTCVVVDVSHEDPEVKFNWYVDGVEVHNAKTKPREEQYNSTYRVVSVLTVLHQDWLNGKEYKCKVSNKALPAPIEKTISKAKGQPREPQVYTLPPSRDELTKNQVSLTCLVKGFYPSDIAVEWESNGQPENNYKTTPPVLDSDGSFFLYSKLTVDKSRWQQGNVFSCSVMHEALHNHYTQKSLSLSPGGGGSGSAHPIPDSSPLLQFGGQVRQRYLYTDDACQTEAHLEIREDGTVGGAADQSPESLLQLKALKPGVIQILGVKTSRFLCQRPDGALYGSLHFDPEACSFRELLLEDGYNVYQSEAHGLPLHLCGNKSPHRDPAPRGPARFLPLPGLPPAPPEPPGILAPQPPDVGSSDPLSMVGSQGRSPSYAS

SEQ ID NO: 1326 - protein, 472 aa, Artificial Sequence
  Fusion Protein
HGEGTFTSDKSKQLEKRLVRLFILWLIAGGHSSGKPPPKGGGGGGGSGGGGSGGGGSADKTHTCPPCPAPEAAGGPSVFLFPPKPKDTLMISRTPEVTCVVVDVSHEDPEVKFNWYVDGVEVHNAKTKPREEQYNSTYRVVSVLTVLHQDWLNGKEYKCKVSNKALPAPIEKTISKAKGQPREPQVYTLPPSRDELTKNQVSLTCLVKGFYPSDIAVEWESNGQPENNYKTTPPVLDSDGSFFLYSKLTVDKSRWQQGNVFSCSVMHEALHNHYTQKSLSLSPGGGGSGSAHPIPDSSPLLQFGGQVRQRYLYTDDACQTEAHLEIREDGTVGGAADQSPESLLQLKALKPGVIQILGVKTSRFLCQRPDGALYGSLHFDPEACSFRELLLEDGYNVYQSEAHGLPLHLCGNKSPHRDPAPRGPARFLPLPGLPPAPPEPPGILAPQPPDVGSSDPLSMVYPSQGRSPSYAS

SEQ ID NO: 1327 - protein, 471 aa, Artificial Sequence
  Fusion Protein
HGEGTFTSDKSKQLEKRLVRLFILWLIAGGHSSGKPPPKGGGGGGGSGGGGSGGGGSADKTHTCPPCPAPELLGGPSVFLFPPKPKDTLMISRTPEVTCVVVDVSHEDPEVKFNWYVDGVEVHNAKTKPREEQYNNASRVVSVLTVLHQDWLNGKEYKCKVSNKALPAPIEKTISKAKGQPREPQVYTLPPSRDELTKNQVSLTCLVKGFYPSDIAVEWESNGQPENNYKTTPPVLDSDGSFFLYSKLTVDKSRWQQGNVFSCSVMHEALHNHYTQKSLSLSPGGGGSGSAHPIPDSSPLLQFGGQVRQRYLYTDDACQTEAHLEIREDGTVGGAADQSPESLLQLKALKPGVIQILGVKTSRFLCQRPDGALYGSLHFDPEACSFRELLLEDGYNVYQSEAHGLPLHLPGCKSPHRDPAPRGPARFLPLPGLPPAPPEPPGILAPQPPDVGSSDPLSMVGSQGRSPSYAS

SEQ ID NO: 1328 - protein, 472 aa, Artificial Sequence
  Fusion Protein
HGEGTFTSDKSKQLEKRLVRLFILWLIAGGHSSGKPPPKGGGGGGGSGGGGSGGGGSADKTHTCPPCPAPELLGGPSVFLFPPKPKDTLMISRTPEVTCVVVDVSHEDPEVKFNWYVDGVEVHNAKTKPREEQYNNASRVVSVLTVLHQDWLNGKEYKCKVSNKALPAPIEKTISKAKGQPREPQVYTLPPSRDELTKNQVSLTCLVKGFYPSDIAVEWESNGQPENNYKTTPPVLDSDGSFFLYSKLTVDKSRWQQGNVFSCSVMHEALHNHYTQKSLSLSPGGGGSGSAHPIPDSSPLLQFGGQVRQRYLYTDDACQTEAHLEIREDGTVGGAADQSPESLLQLKALKPGVIQILGVKTSRFLCQRPDGALYGSLHFDPEACSFRELLLEDGYNVYQSEAHGLPLHLPGCKSPHRDPAPRGPARFLPLPGLPPAPPEPPGILAPQPPDVGSSDPLSMVYPSQGRSPSYAS

SEQ ID NO: 1329 - protein, 471 aa, Artificial Sequence
  Fusion Protein
HGEGTFTSDKSKQLEKRLVRLFILWLIAGGHSSGKPPPKGGGGGGGSGGGGSGGGGSADKTHTCPPCPAPELLGGPSVFLFPPKPKDTLMISRTPEVTCVVVDVSHEDPEVKFNWYVDGVEVHNAKTKPREEQYNNASRVVSVLTVLHQDWLNGKEYKCKVSNKALPAPIEKTISKAKGQPREPQVYTLPPSRDELTKNQVSLTCLVKGFYPSDIAVEWESNGQPENNYKTTPPVLDSDGSFFLYSKLTVDKSRWQQGNVFSCSVMHEALHNHYTQKSLSLSPGGGGSGSAHPIPDSSPLLQFGGQVRQRYLYTDDACQTEAHLEIREDGTVGGAADQSPESLLQLKALKPGVIQILGVKTSRFLCQRPDGALYGSLHFDPEACSFRELLLEDGYNVYQSEAHGLPLHLCGNKSPHRDPAPRGPARFLPLPGLPPAPPEPPGILAPQPPDVGSSDPLSMVGSQGRSPSYAS

SEQ ID NO: 1330 - protein, 472 aa, Artificial Sequence
  Fusion Protein
HGEGTFTSDKSKQLEKRLVRLFILWLIAGGHSSGKPPPKGGGGGGGSGGGGSGGGGSADKTHTCPPCPAPELLGGPSVFLFPPKPKDTLMISRTPEVTCVVVDVSHEDPEVKFNWYVDGVEVHNAKTKPREEQYNNASRVVSVLTVLHQDWLNGKEYKCKVSNKALPAPIEKTISKAKGQPREPQVYTLPPSRDELTKNQVSLTCLVKGFYPSDIAVEWESNGQPENNYKTTPPVLDSDGSFFLYSKLTVDKSRWQQGNVFSCSVMHEALHNHYTQKSLSLSPGGGGSGSAHPIPDSSPLLQFGGQVRQRYLYTDDACQTEAHLEIREDGTVGGAADQSPESLLQLKALKPGVIQILGVKTSRFLCQRPDGALYGSLHFDPEACSFRELLLEDGYNVYQSEAHGLPLHLCGNKSPHRDPAPRGPARFLPLPGLPPAPPEPPGILAPQPPDVGSSDPLSMVYPSQGRSPSYAS

SEQ ID NO: 1331 - protein, 474 aa, Artificial Sequence
  Fusion Protein
HGEGTFTSDKSKQLEKRLVRLFILWLIAGGHSSGKPPPKGGGGGGGSGGGGSGGGGSAESKYGPPCPPCPAPEFEGGPSVFLFPPKPKDTLMISRTPEVTCVVVDVSQEDPEVQFNWYVDGVEVHNAKTKPREEQFNSTYRVVSVLTVLHQDWLNGKEYKCKVSNKGLPSSIEKTISKAKGQPREPQVYTLPPSQEEMTKNQVSLTCLVKGFYPSDIAVEWESNGQPENNYKTTPPVLDSDGSFFLYSRLTVDKSRWQEGNVFSCSVMHEALHNHYTQKSLSLSLGGGGSGSAHPIPDSSPLLQFGGQVRQRYLYTDDACQTEAHLEIREDGTVGGAADQSPESLLQLKALKPGVIQILGVKTSRFLCQRPDGALYGSLHFDPEACSFRELLLEDGYNVYQSEAHGLPLHLPGCKSPHRDPAPRGPARFLPLPGLPPAPPEPPGILAPQPPDVGSSDPLSMVYPSQGRSPSYAS

SEQ ID NO: 1332 - protein, 473 aa, Artificial Sequence
  Fusion Protein
HGEGTFTSDKSKQLEKRLVRLFILWLIAGGHSSGKPPPKGGGGGGGSGGGGSGGGGSAESKYGPPCPPCPAPEFEGGPSVFLFPPKPKDTLMISRTPEVTCVVVDVSQEDPEVQFNWYVDGVEVHNAKTKPREEQFNSTYRVVSVLTVLHQDWLNGKEYKCKVSNKGLPSSIEKTISKAKGQPREPQVYTLPPSQEEMTKNQVSLTCLVKGFYPSDIAVEWESNGQPENNYKTTPPVLDSDGSFFLYSRLTVDKSRWQEGNVFSCSVMHEALHNHYTQKSLSLSLGGGGSGSAHPIPDSSPLLQFGGQVRQRYLYTDDACQTEAHLEIREDGTVGGAADQSPESLLQLKALKPGVIQILGVKTSRFLCQRPDGALYGSLHFDPEACSFRELLLEDGYNVYQSEAHGLPLHLCGNKSPHRDPAPRGPARFLPLPGLPPAPPEPPGILAPQPPDVGSSDPLSMVGSQGRSPSYAS

SEQ ID NO: 1333 - protein, 474 aa, Artificial Sequence
  Fusion Protein
HGEGTFTSDKSKQLEKRLVRLFILWLIAGGHSSGKPPPKGGGGGGGSGGGGSGGGGSAESKYGPPCPPCPAPEFEGGPSVFLFPPKPKDTLMISRTPEVTCVVVDVSQEDPEVQFNWYVDGVEVHNAKTKPREEQFNSTYRVVSVLTVLHQDWLNGKEYKCKVSNKGLPSSIEKTISKAKGQPREPQVYTLPPSQEEMTKNQVSLTCLVKGFYPSDIAVEWESNGQPENNYKTTPPVLDSDGSFFLYSRLTVDKSRWQEGNVFSCSVMHEALHNHYTQKSLSLSLGGGGSGSAHPIPDSSPLLQFGGQVRQRYLYTDDACQTEAHLEIREDGTVGGAADQSPESLLQLKALKPGVIQILGVKTSRFLCQRPDGALYGSLHFDPEACSFRELLLEDGYNVYQSEAHGLPLHLCGNKSPHRDPAPRGPARFLPLPGLPPAPPEPPGILAPQPPDVGSSDPLSMVYPSQGRSPSYAS

SEQ ID NO: 1334 - protein, 471 aa, Artificial Sequence
  Fusion Protein
HGEGTFTSDKSKQLEKRLVRLFIYWLIAGGHSSGKPPPKGGGGGGGSGGGGSGGGGSADKTHTCPPCPAPEAAGGPSVFLFPPKPKDTLMISRTPEVTCVVVDVSHEDPEVKFNWYVDGVEVHNAKTKPREEQYNSTYRVVSVLTVLHQDWLNGKEYKCKVSNKALPAPIEKTISKAKGQPREPQVYTLPPSRDELTKNQVSLTCLVKGFYPSDIAVEWESNGQPENNYKTTPPVLDSDGSFFLYSKLTVDKSRWQQGNVFSCSVMHEALHNHYTQKSLSLSPGGGGSGSAHPIPDSSPLLQFGGQVRQRYLYTDDACQTEAHLEIREDGTVGGAADQSPESLLQLKALKPGVIQILGVKTSRFLCQRPDGALYGSLHFDPEACSFRELLLEDGYNVYQSEAHGLPLHLPGCKSPHRDPAPRGPARFLPLPGLPPAPPEPPGILAPQPPDVGSSDPLSMVGSQGRSPSYAS

SEQ ID NO: 1335 - protein, 472 aa, Artificial Sequence
  Fusion Protein
HGEGTFTSDKSKQLEKRLVRLFIYWLIAGGHSSGKPPPKGGGGGGGSGGGGSGGGGSADKTHTCPPCPAPEAAGGPSVFLFPPKPKDTLMISRTPEVTCVVVDVSHEDPEVKFNWYVDGVEVHNAKTKPREEQYNSTYRVVSVLTVLHQDWLNGKEYKCKVSNKALPAPIEKTISKAKGQPREPQVYTLPPSRDELTKNQVSLTCLVKGFYPSDIAVEWESNGQPENNYKTTPPVLDSDGSFFLYSKLTVDKSRWQQGNVFSCSVMHEALHNHYTQKSLSLSPGGGGSGSAHPIPDSSPLLQFGGQVRQRYLYTDDACQTEAHLEIREDGTVGGAADQSPESLLQLKALKPGVIQILGVKTSRFLCQRPDGALYGSLHFDPEACSFRELLLEDGYNVYQSEAHGLPLHLPGCKSPHRDPAPRGPARFLPLPGLPPAPPEPPGILAPQPPDVGSSDPLSMVYPSQGRSPSYAS

SEQ ID NO: 1336 - protein, 471 aa, Artificial Sequence
  Fusion Protein
HGEGTFTSDKSKQLEKRLVRLFIYWLIAGGHSSGKPPPKGGGGGGGSGGGGSGGGGSADKTHTCPPCPAPEAAGGPSVFLFPPKPKDTLMISRTPEVTCVVVDVSHEDPEVKFNWYVDGVEVHNAKTKPREEQYNSTYRVVSVLTVLHQDWLNGKEYKCKVSNKALPAPIEKTISKAKGQPREPQVYTLPPSRDELTKNQVSLTCLVKGFYPSDIAVEWESNGQPENNYKTTPPVLDSDGSFFLYSKLTVDKSRWQQGNVFSCSVMHEALHNHYTQKSLSLSPGGGGSGSAHPIPDSSPLLQFGGQVRQRYLYTDDACQTEAHLEIREDGTVGGAADQSPESLLQLKALKPGVIQILGVKTSRFLCQRPDGALYGSLHFDPEACSFRELLLEDGYNVYQSEAHGLPLHLCGNKSPHRDPAPRGPARFLPLPGLPPAPPEPPGILAPQPPDVGSSDPLSMVGSQGRSPSYAS

SEQ ID NO: 1337 - protein, 472 aa, Artificial Sequence
  Fusion Protein
HGEGTFTSDKSKQLEKRLVRLFIYWLIAGGHSSGKPPPKGGGGGGGSGGGGSGGGGSADKTHTCPPCPAPEAAGGPSVFLFPPKPKDTLMISRTPEVTCVVVDVSHEDPEVKFNWYVDGVEVHNAKTKPREEQYNSTYRVVSVLTVLHQDWLNGKEYKCKVSNKALPAPIEKTISKAKGQPREPQVYTLPPSRDELTKNQVSLTCLVKGFYPSDIAVEWESNGQPENNYKTTPPVLDSDGSFFLYSKLTVDKSRWQQGNVFSCSVMHEALHNHYTQKSLSLSPGGGGSGSAHPIPDSSPLLQFGGQVRQRYLYTDDACQTEAHLEIREDGTVGGAADQSPESLLQLKALKPGVIQILGVKTSRFLCQRPDGALYGSLHFDPEACSFRELLLEDGYNVYQSEAHGLPLHLCGNKSPHRDPAPRGPARFLPLPGLPPAPPEPPGILAPQPPDVGSSDPLSMVYPSQGRSPSYAS

SEQ ID NO: 1338 - protein, 471 aa, Artificial Sequence
  Fusion Protein
HGEGTFTSDKSKQLEKRLVRLFIYWLIAGGHSSGKPPPKGGGGGGGSGGGGSGGGGSADKTHTCPPCPAPELLGGPSVFLFPPKPKDTLMISRTPEVTCVVVDVSHEDPEVKFNWYVDGVEVHNAKTKPREEQYNNASRVVSVLTVLHQDWLNGKEYKCKVSNKALPAPIEKTISKAKGQPREPQVYTLPPSRDELTKNQVSLTCLVKGFYPSDIAVEWESNGQPENNYKTTPPVLDSDGSFFLYSKLTVDKSRWQQGNVFSCSVMHEALHNHYTQKSLSLSPGGGGSGSAHPIPDSSPLLQFGGQVRQRYLYTDDACQTEAHLEIREDGTVGGAADQSPESLLQLKALKPGVIQILGVKTSRFLCQRPDGALYGSLHFDPEACSFRELLLEDGYNVYQSEAHGLPLHLPGCKSPHRDPAPRGPARFLPLPGLPPAPPEPPGILAPQPPDVGSSDPLSMVGSQGRSPSYAS

SEQ ID NO: 1339 - protein, 472 aa, Artificial Sequence
  Fusion Protein
HGEGTFTSDKSKQLEKRLVRLFIYWLIAGGHSSGKPPPKGGGGGGGSGGGGSGGGGSADKTHTCPPCPAPELLGGPSVFLFPPKPKDTLMISRTPEVTCVVVDVSHEDPEVKFNWYVDGVEVHNAKTKPREEQYNNASRVVSVLTVLHQDWLNGKEYKCKVSNKALPAPIEKTISKAKGQPREPQVYTLPPSRDELTKNQVSLTCLVKGFYPSDIAVEWESNGQPENNYKTTPPVLDSDGSFFLYSKLTVDKSRWQQGNVFSCSVMHEALHNHYTQKSLSLSPGGGGSGSAHPIPDSSPLLQFGGQVRQRYLYTDDACQTEAHLEIREDGTVGGAADQSPESLLQLKALKPGVIQILGVKTSRFLCQRPDGALYGSLHFDPEACSFRELLLEDGYNVYQSEAHGLPLHLPGCKSPHRDPAPRGPARFLPLPGLPPAPPEPPGILAPQPPDVGSSDPLSMVYPSQGRSPSYAS

SEQ ID NO: 1340 - protein, 471 aa, Artificial Sequence
  Fusion Protein
HGEGTFTSDKSKQLEKRLVRLFIYWLIAGGHSSGKPPPKGGGGGGGSGGGGSGGGGSADKTHTCPPCPAPELLGGPSVFLFPPKPKDTLMISRTPEVTCVVVDVSHEDPEVKFNWYVDGVEVHNAKTKPREEQYNNASRVVSVLTVLHQDWLNGKEYKCKVSNKALPAPIEKTISKAKGQPREPQVYTLPPSRDELTKNQVSLTCLVKGFYPSDIAVEWESNGQPENNYKTTPPVLDSDGSFFLYSKLTVDKSRWQQGNVFSCSVMHEALHNHYTQKSLSLSPGGGGSGSAHPIPDSSPLLQFGGQVRQRYLYTDDACQTEAHLEIREDGTVGGAADQSPESLLQLKALKPGVIQILGVKTSRFLCQRPDGALYGSLHFDPEACSFRELLLEDGYNVYQSEAHGLPLHLCGNKSPHRDPAPRGPARFLPLPGLPPAPPEPPGILAPQPPDVGSSDPLSMVGSQGRSPSYAS

SEQ ID NO: 1341 - protein, 472 aa, Artificial Sequence
  Fusion Protein
HGEGTFTSDKSKQLEKRLVRLFIYWLIAGGHSSGKPPPKGGGGGGGSGGGGSGGGGSADKTHTCPPCPAPELLGGPSVFLFPPKPKDTLMISRTPEVTCVVVDVSHEDPEVKFNWYVDGVEVHNAKTKPREEQYNNASRVVSVLTVLHQDWLNGKEYKCKVSNKALPAPIEKTISKAKGQPREPQVYTLPPSRDELTKNQVSLTCLVKGFYPSDIAVEWESNGQPENNYKTTPPVLDSDGSFFLYSKLTVDKSRWQQGNVFSCSVMHEALHNHYTQKSLSLSPGGGGSGSAHPIPDSSPLLQFGGQVRQRYLYTDDACQTEAHLEIREDGTVGGAADQSPESLLQLKALKPGVIQILGVKTSRFLCQRPDGALYGSLHFDPEACSFRELLLEDGYNVYQSEAHGLPLHLCGNKSPHRDPAPRGPARFLPLPGLPPAPPEPPGILAPQPPDVGSSDPLSMVYPSQGRSPSYAS

SEQ ID NO: 1342 - protein, 474 aa, Artificial Sequence
  Fusion Protein
HGEGTFTSDKSKQLEKRLVRLFIYWLIAGGHSSGKPPPKGGGGGGGSGGGGSGGGGSAESKYGPPCPPCPAPEFEGGPSVFLFPPKPKDTLMISRTPEVTCVVVDVSQEDPEVQFNWYVDGVEVHNAKTKPREEQFNSTYRVVSVLTVLHQDWLNGKEYKCKVSNKGLPSSIEKTISKAKGQPREPQVYTLPPSQEEMTKNQVSLTCLVKGFYPSDIAVEWESNGQPENNYKTTPPVLDSDGSFFLYSRLTVDKSRWQEGNVFSCSVMHEALHNHYTQKSLSLSLGGGGSGSAHPIPDSSPLLQFGGQVRQRYLYTDDACQTEAHLEIREDGTVGGAADQSPESLLQLKALKPGVIQILGVKTSRFLCQRPDGALYGSLHFDPEACSFRELLLEDGYNVYQSEAHGLPLHLPGCKSPHRDPAPRGPARFLPLPGLPPAPPEPPGILAPQPPDVGSSDPLSMVYPSQGRSPSYAS

SEQ ID NO: 1343 - protein, 473 aa, Artificial Sequence
  Fusion Protein
HGEGTFTSDKSKQLEKRLVRLFIYWLIAGGHSSGKPPPKGGGGGGGSGGGGSGGGGSAESKYGPPCPPCPAPEFEGGPSVFLFPPKPKDTLMISRTPEVTCVVVDVSQEDPEVQFNWYVDGVEVHNAKTKPREEQFNSTYRVVSVLTVLHQDWLNGKEYKCKVSNKGLPSSIEKTISKAKGQPREPQVYTLPPSQEEMTKNQVSLTCLVKGFYPSDIAVEWESNGQPENNYKTTPPVLDSDGSFFLYSRLTVDKSRWQEGNVFSCSVMHEALHNHYTQKSLSLSLGGGGSGSAHPIPDSSPLLQFGGQVRQRYLYTDDACQTEAHLEIREDGTVGGAADQSPESLLQLKALKPGVIQILGVKTSRFLCQRPDGALYGSLHFDPEACSFRELLLEDGYNVYQSEAHGLPLHLCGNKSPHRDPAPRGPARFLPLPGLPPAPPEPPGILAPQPPDVGSSDPLSMVGSQGRSPSYAS

SEQ ID NO: 1344 - protein, 474 aa, Artificial Sequence
  Fusion Protein
HGEGTFTSDKSKQLEKRLVRLFIYWLIAGGHSSGKPPPKGGGGGGGSGGGGSGGGGSAESKYGPPCPPCPAPEFEGGPSVFLFPPKPKDTLMISRTPEVTCVVVDVSQEDPEVQFNWYVDGVEVHNAKTKPREEQFNSTYRVVSVLTVLHQDWLNGKEYKCKVSNKGLPSSIEKTISKAKGQPREPQVYTLPPSQEEMTKNQVSLTCLVKGFYPSDIAVEWESNGQPENNYKTTPPVLDSDGSFFLYSRLTVDKSRWQEGNVFSCSVMHEALHNHYTQKSLSLSLGGGGSGSAHPIPDSSPLLQFGGQVRQRYLYTDDACQTEAHLEIREDGTVGGAADQSPESLLQLKALKPGVIQILGVKTSRFLCQRPDGALYGSLHFDPEACSFRELLLEDGYNVYQSEAHGLPLHLCGNKSPHRDPAPRGPARFLPLPGLPPAPPEPPGILAPQPPDVGSSDPLSMVYPSQGRSPSYAS

SEQ ID NO: 1345 - protein, 471 aa, Artificial Sequence
  Fusion Protein
HGEGTFTSDKSKQLEKRLVRLFIELLIAGGHSSGKPPPKGGGGGGGSGGGGSGGGGSADKTHTCPPCPAPEAAGGPSVFLFPPKPKDTLMISRTPEVTCVVVDVSHEDPEVKFNWYVDGVEVHNAKTKPREEQYNSTYRVVSVLTVLHQDWLNGKEYKCKVSNKALPAPIEKTISKAKGQPREPQVYTLPPSRDELTKNQVSLTCLVKGFYPSDIAVEWESNGQPENNYKTTPPVLDSDGSFFLYSKLTVDKSRWQQGNVFSCSVMHEALHNHYTQKSLSLSPGGGGSGSAHPIPDSSPLLQFGGQVRQRYLYTDDACQTEAHLEIREDGTVGGAADQSPESLLQLKALKPGVIQILGVKTSRFLCQRPDGALYGSLHFDPEACSFRELLLEDGYNVYQSEAHGLPLHLPGCKSPHRDPAPRGPARFLPLPGLPPAPPEPPGILAPQPPDVGSSDPLSMVGSQGRSPSYAS

SEQ ID NO: 1346 - protein, 472 aa, Artificial Sequence
  Fusion Protein
HGEGTFTSDKSKQLEKRLVRLFIELLIAGGHSSGKPPPKGGGGGGGSGGGGSGGGGSADKTHTCPPCPAPEAAGGPSVFLFPPKPKDTLMISRTPEVTCVVVDVSHEDPEVKFNWYVDGVEVHNAKTKPREEQYNSTYRVVSVLTVLHQDWLNGKEYKCKVSNKALPAPIEKTISKAKGQPREPQVYTLPPSRDELTKNQVSLTCLVKGFYPSDIAVEWESNGQPENNYKTTPPVLDSDGSFFLYSKLTVDKSRWQQGNVFSCSVMHEALHNHYTQKSLSLSPGGGGSGSAHPIPDSSPLLQFGGQVRQRYLYTDDACQTEAHLEIREDGTVGGAADQSPESLLQLKALKPGVIQILGVKTSRFLCQRPDGALYGSLHFDPEACSFRELLLEDGYNVYQSEAHGLPLHLPGCKSPHRDPAPRGPARFLPLPGLPPAPPEPPGILAPQPPDVGSSDPLSMVYPSQGRSPSYAS

SEQ ID NO: 1347 - protein, 471 aa, Artificial Sequence
  Fusion Protein
HGEGTFTSDKSKQLEKRLVRLFIELLIAGGHSSGKPPPKGGGGGGGSGGGGSGGGGSADKTHTCPPCPAPEAAGGPSVFLFPPKPKDTLMISRTPEVTCVVVDVSHEDPEVKFNWYVDGVEVHNAKTKPREEQYNSTYRVVSVLTVLHQDWLNGKEYKCKVSNKALPAPIEKTISKAKGQPREPQVYTLPPSRDELTKNQVSLTCLVKGFYPSDIAVEWESNGQPENNYKTTPPVLDSDGSFFLYSKLTVDKSRWQQGNVFSCSVMHEALHNHYTQKSLSLSPGGGGSGSAHPIPDSSPLLQFGGQVRQRYLYTDDACQTEAHLEIREDGTVGGAADQSPESLLQLKALKPGVIQILGVKTSRFLCQRPDGALYGSLHFDPEACSFRELLLEDGYNVYQSEAHGLPLHLCGNKSPHRDPAPRGPARFLPLPGLPPAPPEPPGILAPQPPDVGSSDPLSMVGSQGRSPSYAS

SEQ ID NO: 1348 - protein, 472 aa, Artificial Sequence
  Fusion Protein
HGEGTFTSDKSKQLEKRLVRLFIELLIAGGHSSGKPPPKGGGGGGGSGGGGSGGGGSADKTHTCPPCPAPEAAGGPSVFLFPPKPKDTLMISRTPEVTCVVVDVSHEDPEVKFNWYVDGVEVHNAKTKPREEQYNSTYRVVSVLTVLHQDWLNGKEYKCKVSNKALPAPIEKTISKAKGQPREPQVYTLPPSRDELTKNQVSLTCLVKGFYPSDIAVEWESNGQPENNYKTTPPVLDSDGSFFLYSKLTVDKSRWQQGNVFSCSVMHEALHNHYTQKSLSLSPGGGGSGSAHPIPDSSPLLQFGGQVRQRYLYTDDACQTEAHLEIREDGTVGGAADQSPESLLQLKALKPGVIQILGVKTSRFLCQRPDGALYGSLHFDPEACSFRELLLEDGYNVYQSEAHGLPLHLCGNKSPHRDPAPRGPARFLPLPGLPPAPPEPPGILAPQPPDVGSSDPLSMVYPSQGRSPSYAS

SEQ ID NO: 1349 - protein, 471 aa, Artificial Sequence
  Fusion Protein
HGEGTFTSDKSKQLEKRLVRLFIELLIAGGHSSGKPPPKGGGGGGGSGGGGSGGGGSADKTHTCPPCPAPELLGGPSVFLFPPKPKDTLMISRTPEVTCVVVDVSHEDPEVKFNWYVDGVEVHNAKTKPREEQYNNASRVVSVLTVLHQDWLNGKEYKCKVSNKALPAPIEKTISKAKGQPREPQVYTLPPSRDELTKNQVSLTCLVKGFYPSDIAVEWESNGQPENNYKTTPPVLDSDGSFFLYSKLTVDKSRWQQGNVFSCSVMHEALHNHYTQKSLSLSPGGGGSGSAHPIPDSSPLLQFGGQVRQRYLYTDDACQTEAHLEIREDGTVGGAADQSPESLLQLKALKPGVIQILGVKTSRFLCQRPDGALYGSLHFDPEACSFRELLLEDGYNVYQSEAHGLPLHLPGCKSPHRDPAPRGPARFLPLPGLPPAPPEPPGILAPQPPDVGSSDPLSMVGSQGRSPSYAS

SEQ ID NO: 1350 - protein, 472 aa, Artificial Sequence
  Fusion Protein
HGEGTFTSDKSKQLEKRLVRLFIELLIAGGHSSGKPPPKGGGGGGGSGGGGSGGGGSADKTHTCPPCPAPELLGGPSVFLFPPKPKDTLMISRTPEVTCVVVDVSHEDPEVKFNWYVDGVEVHNAKTKPREEQYNNASRVVSVLTVLHQDWLNGKEYKCKVSNKALPAPIEKTISKAKGQPREPQVYTLPPSRDELTKNQVSLTCLVKGFYPSDIAVEWESNGQPENNYKTTPPVLDSDGSFFLYSKLTVDKSRWQQGNVFSCSVMHEALHNHYTQKSLSLSPGGGGSGSAHPIPDSSPLLQFGGQVRQRYLYTDDACQTEAHLEIREDGTVGGAADQSPESLLQLKALKPGVIQILGVKTSRFLCQRPDGALYGSLHFDPEACSFRELLLEDGYNVYQSEAHGLPLHLPGCKSPHRDPAPRGPARFLPLPGLPPAPPEPPGILAPQPPDVGSSDPLSMVYPSQGRSPSYAS

SEQ ID NO: 1351 - protein, 471 aa, Artificial Sequence
  Fusion Protein
HGEGTFTSDKSKQLEKRLVRLFIELLIAGGHSSGKPPPKGGGGGGGSGGGGSGGGGSADKTHTCPPCPAPELLGGPSVFLFPPKPKDTLMISRTPEVTCVVVDVSHEDPEVKFNWYVDGVEVHNAKTKPREEQYNNASRVVSVLTVLHQDWLNGKEYKCKVSNKALPAPIEKTISKAKGQPREPQVYTLPPSRDELTKNQVSLTCLVKGFYPSDIAVEWESNGQPENNYKTTPPVLDSDGSFFLYSKLTVDKSRWQQGNVFSCSVMHEALHNHYTQKSLSLSPGGGGSGSAHPIPDSSPLLQFGGQVRQRYLYTDDACQTEAHLEIREDGTVGGAADQSPESLLQLKALKPGVIQILGVKTSRFLCQRPDGALYGSLHFDPEACSFRELLLEDGYNVYQSEAHGLPLHLCGNKSPHRDPAPRGPARFLPLPGLPPAPPEPPGILAPQPPDVGSSDPLSMVGSQGRSPSYAS

SEQ ID NO: 1352 - protein, 472 aa, Artificial Sequence
  Fusion Protein
HGEGTFTSDKSKQLEKRLVRLFIELLIAGGHSSGKPPPKGGGGGGGSGGGGSGGGGSADKTHTCPPCPAPELLGGPSVFLFPPKPKDTLMISRTPEVTCVVVDVSHEDPEVKFNWYVDGVEVHNAKTKPREEQYNNASRVVSVLTVLHQDWLNGKEYKCKVSNKALPAPIEKTISKAKGQPREPQVYTLPPSRDELTKNQVSLTCLVKGFYPSDIAVEWESNGQPENNYKTTPPVLDSDGSFFLYSKLTVDKSRWQQGNVFSCSVMHEALHNHYTQKSLSLSPGGGGSGSAHPIPDSSPLLQFGGQVRQRYLYTDDACQTEAHLEIREDGTVGGAADQSPESLLQLKALKPGVIQILGVKTSRFLCQRPDGALYGSLHFDPEACSFRELLLEDGYNVYQSEAHGLPLHLCGNKSPHRDPAPRGPARFLPLPGLPPAPPEPPGILAPQPPDVGSSDPLSMVYPSQGRSPSYAS

SEQ ID NO: 1353 - protein, 474 aa, Artificial Sequence
  Fusion Protein
HGEGTFTSDKSKQLEKRLVRLFIELLIAGGHSSGKPPPKGGGGGGGSGGGGSGGGGSAESKYGPPCPPCPAPEFEGGPSVFLFPPKPKDTLMISRTPEVTCVVVDVSQEDPEVQFNWYVDGVEVHNAKTKPREEQFNSTYRVVSVLTVLHQDWLNGKEYKCKVSNKGLPSSIEKTISKAKGQPREPQVYTLPPSQEEMTKNQVSLTCLVKGFYPSDIAVEWESNGQPENNYKTTPPVLDSDGSFFLYSRLTVDKSRWQEGNVFSCSVMHEALHNHYTQKSLSLSLGGGGSGSAHPIPDSSPLLQFGGQVRQRYLYTDDACQTEAHLEIREDGTVGGAADQSPESLLQLKALKPGVIQILGVKTSRFLCQRPDGALYGSLHFDPEACSFRELLLEDGYNVYQSEAHGLPLHLPGCKSPHRDPAPRGPARFLPLPGLPPAPPEPPGILAPQPPDVGSSDPLSMVYPSQGRSPSYAS

SEQ ID NO: 1354 - protein, 473 aa, Artificial Sequence
  Fusion Protein
HGEGTFTSDKSKQLEKRLVRLFIELLIAGGHSSGKPPPKGGGGGGGSGGGGSGGGGSAESKYGPPCPPCPAPEFEGGPSVFLFPPKPKDTLMISRTPEVTCVVVDVSQEDPEVQFNWYVDGVEVHNAKTKPREEQFNSTYRVVSVLTVLHQDWLNGKEYKCKVSNKGLPSSIEKTISKAKGQPREPQVYTLPPSQEEMTKNQVSLTCLVKGFYPSDIAVEWESNGQPENNYKTTPPVLDSDGSFFLYSRLTVDKSRWQEGNVFSCSVMHEALHNHYTQKSLSLSLGGGGSGSAHPIPDSSPLLQFGGQVRQRYLYTDDACQTEAHLEIREDGTVGGAADQSPESLLQLKALKPGVIQILGVKTSRFLCQRPDGALYGSLHFDPEACSFRELLLEDGYNVYQSEAHGLPLHLCGNKSPHRDPAPRGPARFLPLPGLPPAPPEPPGILAPQPPDVGSSDPLSMVGSQGRSPSYAS

SEQ ID NO: 1355 - protein, 474 aa, Artificial Sequence
  Fusion Protein
HGEGTFTSDKSKQLEKRLVRLFIELLIAGGHSSGKPPPKGGGGGGGSGGGGSGGGGSAESKYGPPCPPCPAPEFEGGPSVFLFPPKPKDTLMISRTPEVTCVVVDVSQEDPEVQFNWYVDGVEVHNAKTKPREEQFNSTYRVVSVLTVLHQDWLNGKEYKCKVSNKGLPSSIEKTISKAKGQPREPQVYTLPPSQEEMTKNQVSLTCLVKGFYPSDIAVEWESNGQPENNYKTTPPVLDSDGSFFLYSRLTVDKSRWQEGNVFSCSVMHEALHNHYTQKSLSLSLGGGGSGSAHPIPDSSPLLQFGGQVRQRYLYTDDACQTEAHLEIREDGTVGGAADQSPESLLQLKALKPGVIQILGVKTSRFLCQRPDGALYGSLHFDPEACSFRELLLEDGYNVYQSEAHGLPLHLCGNKSPHRDPAPRGPARFLPLPGLPPAPPEPPGILAPQPPDVGSSDPLSMVYPSQGRSPSYAS

SEQ ID NO: 1356 - protein, 470 aa, Artificial Sequence
  Fusion Protein
HGEGTFTSDKSKQLEKRLVRLFIEWLIAVGHSGKPPPKGGGGGGGSGGGGSGGGGSADKTHTCPPCPAPEAAGGPSVFLFPPKPKDTLMISRTPEVTCVVVDVSHEDPEVKFNWYVDGVEVHNAKTKPREEQYNSTYRVVSVLTVLHQDWLNGKEYKCKVSNKALPAPIEKTISKAKGQPREPQVYTLPPSRDELTKNQVSLTCLVKGFYPSDIAVEWESNGQPENNYKTTPPVLDSDGSFFLYSKLTVDKSRWQQGNVFSCSVMHEALHNHYTQKSLSLSPGGGGSGSAHPIPDSSPLLQFGGQVRQRYLYTDDACQTEAHLEIREDGTVGGAADQSPESLLQLKALKPGVIQILGVKTSRFLCQRPDGALYGSLHFDPEACSFRELLLEDGYNVYQSEAHGLPLHLPGCKSPHRDPAPRGPARFLPLPGLPPAPPEPPGILAPQPPDVGSSDPLSMVGSQGRSPSYAS

SEQ ID NO: 1357 - protein, 471 aa, Artificial Sequence
  Fusion Protein
HGEGTFTSDKSKQLEKRLVRLFIEWLIAVGHSGKPPPKGGGGGGGSGGGGSGGGGSADKTHTCPPCPAPEAAGGPSVFLFPPKPKDTLMISRTPEVTCVVVDVSHEDPEVKFNWYVDGVEVHNAKTKPREEQYNSTYRVVSVLTVLHQDWLNGKEYKCKVSNKALPAPIEKTISKAKGQPREPQVYTLPPSRDELTKNQVSLTCLVKGFYPSDIAVEWESNGQPENNYKTTPPVLDSDGSFFLYSKLTVDKSRWQQGNVFSCSVMHEALHNHYTQKSLSLSPGGGGSGSAHPIPDSSPLLQFGGQVRQRYLYTDDACQTEAHLEIREDGTVGGAADQSPESLLQLKALKPGVIQILGVKTSRFLCQRPDGALYGSLHFDPEACSFRELLLEDGYNVYQSEAHGLPLHLPGCKSPHRDPAPRGPARFLPLPGLPPAPPEPPGILAPQPPDVGSSDPLSMVYPSQGRSPSYAS

SEQ ID NO: 1358 - protein, 470 aa, Artificial Sequence
  Fusion Protein
HGEGTFTSDKSKQLEKRLVRLFIEWLIAVGHSGKPPPKGGGGGGGSGGGGSGGGGSADKTHTCPPCPAPEAAGGPSVFLFPPKPKDTLMISRTPEVTCVVVDVSHEDPEVKFNWYVDGVEVHNAKTKPREEQYNSTYRVVSVLTVLHQDWLNGKEYKCKVSNKALPAPIEKTISKAKGQPREPQVYTLPPSRDELTKNQVSLTCLVKGFYPSDIAVEWESNGQPENNYKTTPPVLDSDGSFFLYSKLTVDKSRWQQGNVFSCSVMHEALHNHYTQKSLSLSPGGGGSGSAHPIPDSSPLLQFGGQVRQRYLYTDDACQTEAHLEIREDGTVGGAADQSPESLLQLKALKPGVIQILGVKTSRFLCQRPDGALYGSLHFDPEACSFRELLLEDGYNVYQSEAHGLPLHLCGNKSPHRDPAPRGPARFLPLPGLPPAPPEPPGILAPQPPDVGSSDPLSMVGSQGRSPSYAS

SEQ ID NO: 1359 - protein, 471 aa, Artificial Sequence
  Fusion Protein
HGEGTFTSDKSKQLEKRLVRLFIEWLIAVGHSGKPPPKGGGGGGGSGGGGSGGGGSADKTHTCPPCPAPEAAGGPSVFLFPPKPKDTLMISRTPEVTCVVVDVSHEDPEVKFNWYVDGVEVHNAKTKPREEQYNSTYRVVSVLTVLHQDWLNGKEYKCKVSNKALPAPIEKTISKAKGQPREPQVYTLPPSRDELTKNQVSLTCLVKGFYPSDIAVEWESNGQPENNYKTTPPVLDSDGSFFLYSKLTVDKSRWQQGNVFSCSVMHEALHNHYTQKSLSLSPGGGGSGSAHPIPDSSPLLQFGGQVRQRYLYTDDACQTEAHLEIREDGTVGGAADQSPESLLQLKALKPGVIQILGVKTSRFLCQRPDGALYGSLHFDPEACSFRELLLEDGYNVYQSEAHGLPLHLCGNKSPHRDPAPRGPARFLPLPGLPPAPPEPPGILAPQPPDVGSSDPLSMVYPSQGRSPSYAS

SEQ ID NO: 1360 - protein, 470 aa, Artificial Sequence
  Fusion Protein
HGEGTFTSDKSKQLEKRLVRLFIEWLIAVGHSGKPPPKGGGGGGGSGGGGSGGGGSADKTHTCPPCPAPELLGGPSVFLFPPKPKDTLMISRTPEVTCVVVDVSHEDPEVKFNWYVDGVEVHNAKTKPREEQYNNASRVVSVLTVLHQDWLNGKEYKCKVSNKALPAPIEKTISKAKGQPREPQVYTLPPSRDELTKNQVSLTCLVKGFYPSDIAVEWESNGQPENNYKTTPPVLDSDGSFFLYSKLTVDKSRWQQGNVFSCSVMHEALHNHYTQKSLSLSPGGGGSGSAHPIPDSSPLLQFGGQVRQRYLYTDDACQTEAHLEIREDGTVGGAADQSPESLLQLKALKPGVIQILGVKTSRFLCQRPDGALYGSLHFDPEACSFRELLLEDGYNVYQSEAHGLPLHLPGCKSPHRDPAPRGPARFLPLPGLPPAPPEPPGILAPQPPDVGSSDPLSMVGSQGRSPSYAS

SEQ ID NO: 1361 - protein, 471 aa, Artificial Sequence
  Fusion Protein
HGEGTFTSDKSKQLEKRLVRLFIEWLIAVGHSGKPPPKGGGGGGGSGGGGSGGGGSADKTHTCPPCPAPELLGGPSVFLFPPKPKDTLMISRTPEVTCVVVDVSHEDPEVKFNWYVDGVEVHNAKTKPREEQYNNASRVVSVLTVLHQDWLNGKEYKCKVSNKALPAPIEKTISKAKGQPREPQVYTLPPSRDELTKNQVSLTCLVKGFYPSDIAVEWESNGQPENNYKTTPPVLDSDGSFFLYSKLTVDKSRWQQGNVFSCSVMHEALHNHYTQKSLSLSPGGGGSGSAHPIPDSSPLLQFGGQVRQRYLYTDDACQTEAHLEIREDGTVGGAADQSPESLLQLKALKPGVIQILGVKTSRFLCQRPDGALYGSLHFDPEACSFRELLLEDGYNVYQSEAHGLPLHLPGCKSPHRDPAPRGPARFLPLPGLPPAPPEPPGILAPQPPDVGSSDPLSMVYPSQGRSPSYAS

SEQ ID NO: 1362 - protein, 470 aa, Artificial Sequence
  Fusion Protein
HGEGTFTSDKSKQLEKRLVRLFIEWLIAVGHSGKPPPKGGGGGGGSGGGGSGGGGSADKTHTCPPCPAPELLGGPSVFLFPPKPKDTLMISRTPEVTCVVVDVSHEDPEVKFNWYVDGVEVHNAKTKPREEQYNNASRVVSVLTVLHQDWLNGKEYKCKVSNKALPAPIEKTISKAKGQPREPQVYTLPPSRDELTKNQVSLTCLVKGFYPSDIAVEWESNGQPENNYKTTPPVLDSDGSFFLYSKLTVDKSRWQQGNVFSCSVMHEALHNHYTQKSLSLSPGGGGSGSAHPIPDSSPLLQFGGQVRQRYLYTDDACQTEAHLEIREDGTVGGAADQSPESLLQLKALKPGVIQILGVKTSRFLCQRPDGALYGSLHFDPEACSFRELLLEDGYNVYQSEAHGLPLHLCGNKSPHRDPAPRGPARFLPLPGLPPAPPEPPGILAPQPPDVGSSDPLSMVGSQGRSPSYAS

SEQ ID NO: 1363 - protein, 471 aa, Artificial Sequence
  Fusion Protein
HGEGTFTSDKSKQLEKRLVRLFIEWLIAVGHSGKPPPKGGGGGGGSGGGGSGGGGSADKTHTCPPCPAPELLGGPSVFLFPPKPKDTLMISRTPEVTCVVVDVSHEDPEVKFNWYVDGVEVHNAKTKPREEQYNNASRVVSVLTVLHQDWLNGKEYKCKVSNKALPAPIEKTISKAKGQPREPQVYTLPPSRDELTKNQVSLTCLVKGFYPSDIAVEWESNGQPENNYKTTPPVLDSDGSFFLYSKLTVDKSRWQQGNVFSCSVMHEALHNHYTQKSLSLSPGGGGSGSAHPIPDSSPLLQFGGQVRQRYLYTDDACQTEAHLEIREDGTVGGAADQSPESLLQLKALKPGVIQILGVKTSRFLCQRPDGALYGSLHFDPEACSFRELLLEDGYNVYQSEAHGLPLHLCGNKSPHRDPAPRGPARFLPLPGLPPAPPEPPGILAPQPPDVGSSDPLSMVYPSQGRSPSYAS

SEQ ID NO: 1364 - protein, 472 aa, Artificial Sequence; identical to SEQ ID NO: 83
  Fusion Protein

SEQ ID NO: 1365 - protein, 473 aa, Artificial Sequence
  Fusion Protein
HGEGTFTSDKSKQLEKRLVRLFIEWLIAVGHSGKPPPKGGGGGGGSGGGGSGGGGSAESKYGPPCPPCPAPEFEGGPSVFLFPPKPKDTLMISRTPEVTCVVVDVSQEDPEVQFNWYVDGVEVHNAKTKPREEQFNSTYRVVSVLTVLHQDWLNGKEYKCKVSNKGLPSSIEKTISKAKGQPREPQVYTLPPSQEEMTKNQVSLTCLVKGFYPSDIAVEWESNGQPENNYKTTPPVLDSDGSFFLYSRLTVDKSRWQEGNVFSCSVMHEALHNHYTQKSLSLSLGGGGSGSAHPIPDSSPLLQFGGQVRQRYLYTDDACQTEAHLEIREDGTVGGAADQSPESLLQLKALKPGVIQILGVKTSRFLCQRPDGALYGSLHFDPEACSFRELLLEDGYNVYQSEAHGLPLHLPGCKSPHRDPAPRGPARFLPLPGLPPAPPEPPGILAPQPPDVGSSDPLSMVYPSQGRSPSYAS

SEQ ID NO: 1366 - protein, 472 aa, Artificial Sequence
  Fusion Protein
HGEGTFTSDKSKQLEKRLVRLFIEWLIAVGHSGKPPPKGGGGGGGSGGGGSGGGGSAESKYGPPCPPCPAPEFEGGPSVFLFPPKPKDTLMISRTPEVTCVVVDVSQEDPEVQFNWYVDGVEVHNAKTKPREEQFNSTYRVVSVLTVLHQDWLNGKEYKCKVSNKGLPSSIEKTISKAKGQPREPQVYTLPPSQEEMTKNQVSLTCLVKGFYPSDIAVEWESNGQPENNYKTTPPVLDSDGSFFLYSRLTVDKSRWQEGNVFSCSVMHEALHNHYTQKSLSLSLGGGGSGSAHPIPDSSPLLQFGGQVRQRYLYTDDACQTEAHLEIREDGTVGGAADQSPESLLQLKALKPGVIQILGVKTSRFLCQRPDGALYGSLHFDPEACSFRELLLEDGYNVYQSEAHGLPLHLCGNKSPHRDPAPRGPARFLPLPGLPPAPPEPPGILAPQPPDVGSSDPLSMVGSQGRSPSYAS

SEQ ID NO: 1367 - protein, 473 aa, Artificial Sequence
  Fusion Protein
HGEGTFTSDKSKQLEKRLVRLFIEWLIAVGHSGKPPPKGGGGGGGSGGGGSGGGGSAESKYGPPCPPCPAPEFEGGPSVFLFPPKPKDTLMISRTPEVTCVVVDVSQEDPEVQFNWYVDGVEVHNAKTKPREEQFNSTYRVVSVLTVLHQDWLNGKEYKCKVSNKGLPSSIEKTISKAKGQPREPQVYTLPPSQEEMTKNQVSLTCLVKGFYPSDIAVEWESNGQPENNYKTTPPVLDSDGSFFLYSRLTVDKSRWQEGNVFSCSVMHEALHNHYTQKSLSLSLGGGGSGSAHPIPDSSPLLQFGGQVRQRYLYTDDACQTEAHLEIREDGTVGGAADQSPESLLQLKALKPGVIQILGVKTSRFLCQRPDGALYGSLHFDPEACSFRELLLEDGYNVYQSEAHGLPLHLCGNKSPHRDPAPRGPARFLPLPGLPPAPPEPPGILAPQPPDVGSSDPLSMVYPSQGRSPSYAS

SEQ ID NO: 1368 - protein, 472 aa, Artificial Sequence
  Fusion Protein
GHGEGTFTSDKSKQLEEEAVRLFIEWLKAGGHPSGKPPPKGGGGGGGSGGGGSGGGGSADKTHTCPPCPAPEAAGGPSVFLFPPKPKDTLMISRTPEVTCVVVDVSHEDPEVKFNWYVDGVEVHNAKTKPREEQYNSTYRVVSVLTVLHQDWLNGKEYKCKVSNKALPAPIEKTISKAKGQPREPQVYTLPPSRDELTKNQVSLTCLVKGFYPSDIAVEWESNGQPENNYKTTPPVLDSDGSFFLYSKLTVDKSRWQQGNVFSCSVMHEALHNHYTQKSLSLSPGGGGSGSAHPIPDSSPLLQFGGQVRQRYLYTDDACQTEAHLEIREDGTVGGAADQSPESLLQLKALKPGVIQILGVKTSRFLCQRPDGALYGSLHFDPEACSFRELLLEDGYNVYQSEAHGLPLHLPGCKSPHRDPAPRGPARFLPLPGLPPAPPEPPGILAPQPPDVGSSDPLSMVGSQGRSPSYAS

SEQ ID NO: 1369 - protein, 473 aa, Artificial Sequence
  Fusion Protein
GHGEGTFTSDKSKQLEEEAVRLFIEWLKAGGHPSGKPPPKGGGGGGGSGGGGSGGGGSADKTHTCPPCPAPEAAGGPSVFLFPPKPKDTLMISRTPEVTCVVVDVSHEDPEVKFNWYVDGVEVHNAKTKPREEQYNSTYRVVSVLTVLHQDWLNGKEYKCKVSNKALPAPIEKTISKAKGQPREPQVYTLPPSRDELTKNQVSLTCLVKGFYPSDIAVEWESNGQPENNYKTTPPVLDSDGSFFLYSKLTVDKSRWQQGNVFSCSVMHEALHNHYTQKSLSLSPGGGGSGSAHPIPDSSPLLQFGGQVRQRYLYTDDACQTEAHLEIREDGTVGGAADQSPESLLQLKALKPGVIQILGVKTSRFLCQRPDGALYGSLHFDPEACSFRELLLEDGYNVYQSEAHGLPLHLPGCKSPHRDPAPRGPARFLPLPGLPPAPPEPPGILAPQPPDVGSSDPLSMVYPSQGRSPSYAS

SEQ ID NO: 1370 - protein, 472 aa, Artificial Sequence
  Fusion Protein
GHGEGTFTSDKSKQLEEEAVRLFIEWLKAGGHPSGKPPPKGGGGGGGSGGGGSGGGGSADKTHTCPPCPAPEAAGGPSVFLFPPKPKDTLMISRTPEVTCVVVDVSHEDPEVKFNWYVDGVEVHNAKTKPREEQYNSTYRVVSVLTVLHQDWLNGKEYKCKVSNKALPAPIEKTISKAKGQPREPQVYTLPPSRDELTKNQVSLTCLVKGFYPSDIAVEWESNGQPENNYKTTPPVLDSDGSFFLYSKLTVDKSRWQQGNVFSCSVMHEALHNHYTQKSLSLSPGGGGSGSAHPIPDSSPLLQFGGQVRQRYLYTDDACQTEAHLEIREDGTVGGAADQSPESLLQLKALKPGVIQILGVKTSRFLCQRPDGALYGSLHFDPEACSFRELLLEDGYNVYQSEAHGLPLHLCGNKSPHRDPAPRGPARFLPLPGLPPAPPEPPGILAPQPPDVGSSDPLSMVGSQGRSPSYAS

SEQ ID NO: 1371 - protein, 473 aa, Artificial Sequence
  Fusion Protein
GHGEGTFTSDKSKQLEEEAVRLFIEWLKAGGHPSGKPPPKGGGGGGGSGGGGSGGGGSADKTHTCPPCPAPEAAGGPSVFLFPPKPKDTLMISRTPEVTCVVVDVSHEDPEVKFNWYVDGVEVHNAKTKPREEQYNSTYRVVSVLTVLHQDWLNGKEYKCKVSNKALPAPIEKTISKAKGQPREPQVYTLPPSRDELTKNQVSLTCLVKGFYPSDIAVEWESNGQPENNYKTTPPVLDSDGSFFLYSKLTVDKSRWQQGNVFSCSVMHEALHNHYTQKSLSLSPGGGGSGSAHPIPDSSPLLQFGGQVRQRYLYTDDACQTEAHLEIREDGTVGGAADQSPESLLQLKALKPGVIQILGVKTSRFLCQRPDGALYGSLHFDPEACSFRELLLEDGYNVYQSEAHGLPLHLCGNKSPHRDPAPRGPARFLPLPGLPPAPPEPPGILAPQPPDVGSSDPLSMVYPSQGRSPSYAS

SEQ ID NO: 1372 - protein, 472 aa, Artificial Sequence
  Fusion Protein
GHGEGTFTSDKSKQLEEEAVRLFIEWLKAGGHPSGKPPPKGGGGGGGSGGGGSGGGGSADKTHTCPPCPAPELLGGPSVFLFPPKPKDTLMISRTPEVTCVVVDVSHEDPEVKFNWYVDGVEVHNAKTKPREEQYNNASRVVSVLTVLHQDWLNGKEYKCKVSNKALPAPIEKTISKAKGQPREPQVYTLPPSRDELTKNQVSLTCLVKGFYPSDIAVEWESNGQPENNYKTTPPVLDSDGSFFLYSKLTVDKSRWQQGNVFSCSVMHEALHNHYTQKSLSLSPGGGGSGSAHPIPDSSPLLQFGGQVRQRYLYTDDACQTEAHLEIREDGTVGGAADQSPESLLQLKALKPGVIQILGVKTSRFLCQRPDGALYGSLHFDPEACSFRELLLEDGYNVYQSEAHGLPLHLPGCKSPHRDPAPRGPARFLPLPGLPPAPPEPPGILAPQPPDVGSSDPLSMVGSQGRSPSYAS

SEQ ID NO: 1373 - protein, 473 aa, Artificial Sequence
  Fusion Protein
GHGEGTFTSDKSKQLEEEAVRLFIEWLKAGGHPSGKPPPKGGGGGGGSGGGGSGGGGSADKTHTCPPCPAPELLGGPSVFLFPPKPKDTLMISRTPEVTCVVVDVSHEDPEVKFNWYVDGVEVHNAKTKPREEQYNNASRVVSVLTVLHQDWLNGKEYKCKVSNKALPAPIEKTISKAKGQPREPQVYTLPPSRDELTKNQVSLTCLVKGFYPSDIAVEWESNGQPENNYKTTPPVLDSDGSFFLYSKLTVDKSRWQQGNVFSCSVMHEALHNHYTQKSLSLSPGGGGSGSAHPIPDSSPLLQFGGQVRQRYLYTDDACQTEAHLEIREDGTVGGAADQSPESLLQLKALKPGVIQILGVKTSRFLCQRPDGALYGSLHFDPEACSFRELLLEDGYNVYQSEAHGLPLHLPGCKSPHRDPAPRGPARFLPLPGLPPAPPEPPGILAPQPPDVGSSDPLSMVYPSQGRSPSYAS

SEQ ID NO: 1374 - protein, 472 aa, Artificial Sequence
  Fusion Protein
GHGEGTFTSDKSKQLEEEAVRLFIEWLKAGGHPSGKPPPKGGGGGGGSGGGGSGGGGSADKTHTCPPCPAPELLGGPSVFLFPPKPKDTLMISRTPEVTCVVVDVSHEDPEVKFNWYVDGVEVHNAKTKPREEQYNNASRVVSVLTVLHQDWLNGKEYKCKVSNKALPAPIEKTISKAKGQPREPQVYTLPPSRDELTKNQVSLTCLVKGFYPSDIAVEWESNGQPENNYKTTPPVLDSDGSFFLYSKLTVDKSRWQQGNVFSCSVMHEALHNHYTQKSLSLSPGGGGSGSAHPIPDSSPLLQFGGQVRQRYLYTDDACQTEAHLEIREDGTVGGAADQSPESLLQLKALKPGVIQILGVKTSRFLCQRPDGALYGSLHFDPEACSFRELLLEDGYNVYQSEAHGLPLHLCGNKSPHRDPAPRGPARFLPLPGLPPAPPEPPGILAPQPPDVGSSDPLSMVGSQGRSPSYAS

SEQ ID NO: 1375 - protein, 473 aa, Artificial Sequence
  Fusion Protein
GHGEGTFTSDKSKQLEEEAVRLFIEWLKAGGHPSGKPPPKGGGGGGGSGGGGSGGGGSADKTHTCPPCPAPELLGGPSVFLFPPKPKDTLMISRTPEVTCVVVDVSHEDPEVKFNWYVDGVEVHNAKTKPREEQYNNASRVVSVLTVLHQDWLNGKEYKCKVSNKALPAPIEKTISKAKGQPREPQVYTLPPSRDELTKNQVSLTCLVKGFYPSDIAVEWESNGQPENNYKTTPPVLDSDGSFFLYSKLTVDKSRWQQGNVFSCSVMHEALHNHYTQKSLSLSPGGGGSGSAHPIPDSSPLLQFGGQVRQRYLYTDDACQTEAHLEIREDGTVGGAADQSPESLLQLKALKPGVIQILGVKTSRFLCQRPDGALYGSLHFDPEACSFRELLLEDGYNVYQSEAHGLPLHLCGNKSPHRDPAPRGPARFLPLPGLPPAPPEPPGILAPQPPDVGSSDPLSMVYPSQGRSPSYAS

SEQ ID NO: 1376 - protein, 475 aa, Artificial Sequence
  Fusion Protein
GHGEGTFTSDKSKQLEEEAVRLFIEWLKAGGHPSGKPPPKGGGGGGGSGGGGSGGGGSAESKYGPPCPPCPAPEFEGGPSVFLFPPKPKDTLMISRTPEVTCVVVDVSQEDPEVQFNWYVDGVEVHNAKTKPREEQFNSTYRVVSVLTVLHQDWLNGKEYKCKVSNKGLPSSIEKTISKAKGQPREPQVYTLPPSQEEMTKNQVSLTCLVKGFYPSDIAVEWESNGQPENNYKTTPPVLDSDGSFFLYSRLTVDKSRWQEGNVFSCSVMHEALHNHYTQKSLSLSLGGGGSGSAHPIPDSSPLLQFGGQVRQRYLYTDDACQTEAHLEIREDGTVGGAADQSPESLLQLKALKPGVIQILGVKTSRFLCQRPDGALYGSLHFDPEACSFRELLLEDGYNVYQSEAHGLPLHLPGCKSPHRDPAPRGPARFLPLPGLPPAPPEPPGILAPQPPDVGSSDPLSMVYPSQGRSPSYAS

SEQ ID NO: 1377 - protein, 474 aa, Artificial Sequence
  Fusion Protein
GHGEGTFTSDKSKQLEEEAVRLFIEWLKAGGHPSGKPPPKGGGGGGGSGGGGSGGGGSAESKYGPPCPPCPAPEFEGGPSVFLFPPKPKDTLMISRTPEVTCVVVDVSQEDPEVQFNWYVDGVEVHNAKTKPREEQFNSTYRVVSVLTVLHQDWLNGKEYKCKVSNKGLPSSIEKTISKAKGQPREPQVYTLPPSQEEMTKNQVSLTCLVKGFYPSDIAVEWESNGQPENNYKTTPPVLDSDGSFFLYSRLTVDKSRWQEGNVFSCSVMHEALHNHYTQKSLSLSLGGGGSGSAHPIPDSSPLLQFGGQVRQRYLYTDDACQTEAHLEIREDGTVGGAADQSPESLLQLKALKPGVIQILGVKTSRFLCQRPDGALYGSLHFDPEACSFRELLLEDGYNVYQSEAHGLPLHLCGNKSPHRDPAPRGPARFLPLPGLPPAPPEPPGILAPQPPDVGSSDPLSMVGSQGRSPSYAS

SEQ ID NO: 1378 - protein, 475 aa, Artificial Sequence
  Fusion Protein
GHGEGTFTSDKSKQLEEEAVRLFIEWLKAGGHPSGKPPPKGGGGGGGSGGGGSGGGGSAESKYGPPCPPCPAPEFEGGPSVFLFPPKPKDTLMISRTPEVTCVVVDVSQEDPEVQFNWYVDGVEVHNAKTKPREEQFNSTYRVVSVLTVLHQDWLNGKEYKCKVSNKGLPSSIEKTISKAKGQPREPQVYTLPPSQEEMTKNQVSLTCLVKGFYPSDIAVEWESNGQPENNYKTTPPVLDSDGSFFLYSRLTVDKSRWQEGNVFSCSVMHEALHNHYTQKSLSLSLGGGGSGSAHPIPDSSPLLQFGGQVRQRYLYTDDACQTEAHLEIREDGTVGGAADQSPESLLQLKALKPGVIQILGVKTSRFLCQRPDGALYGSLHFDPEACSFRELLLEDGYNVYQSEAHGLPLHLCGNKSPHRDPAPRGPARFLPLPGLPPAPPEPPGILAPQPPDVGSSDPLSMVYPSQGRSPSYAS

SEQ ID NO: 1379 - protein, 471 aa, Artificial Sequence
  Fusion Protein
HGEGTFTSDLSIQLDEEAVREFIEWLLATGPVSGAPPPSGGGGGGGSGGGGSGGGGSADKTHTCPPCPAPEAAGGPSVFLFPPKPKDTLMISRTPEVTCVVVDVSHEDPEVKFNWYVDGVEVHNAKTKPREEQYNSTYRVVSVLTVLHQDWLNGKEYKCKVSNKALPAPIEKTISKAKGQPREPQVYTLPPSRDELTKNQVSLTCLVKGFYPSDIAVEWESNGQPENNYKTTPPVLDSDGSFFLYSKLTVDKSRWQQGNVFSCSVMHEALHNHYTQKSLSLSPGGGGSGSAHPIPDSSPLLQFGGQVRQRYLYTDDACQTEAHLEIREDGTVGGAADQSPESLLQLKALKPGVIQILGVKTSRFLCQRPDGALYGSLHFDPEACSFRELLLEDGYNVYQSEAHGLPLHLPGCKSPHRDPAPRGPARFLPLPGLPPAPPEPPGILAPQPPDVGSSDPLSMVGSQGRSPSYAS

SEQ ID NO: 1380 - protein, 472 aa, Artificial Sequence
  Fusion Protein
HGEGTFTSDLSIQLDEEAVREFIEWLLATGPVSGAPPPSGGGGGGGSGGGGSGGGGSADKTHTCPPCPAPEAAGGPSVFLFPPKPKDTLMISRTPEVTCVVVDVSHEDPEVKFNWYVDGVEVHNAKTKPREEQYNSTYRVVSVLTVLHQDWLNGKEYKCKVSNKALPAPIEKTISKAKGQPREPQVYTLPPSRDELTKNQVSLTCLVKGFYPSDIAVEWESNGQPENNYKTTPPVLDSDGSFFLYSKLTVDKSRWQQGNVFSCSVMHEALHNHYTQKSLSLSPGGGGSGSAHPIPDSSPLLQFGGQVRQRYLYTDDACQTEAHLEIREDGTVGGAADQSPESLLQLKALKPGVIQILGVKTSRFLCQRPDGALYGSLHFDPEACSFRELLLEDGYNVYQSEAHGLPLHLPGCKSPHRDPAPRGPARFLPLPGLPPAPPEPPGILAPQPPDVGSSDPLSMVYPSQGRSPSYAS

SEQ ID NO: 1381 - protein, 471 aa, Artificial Sequence
  Fusion Protein
HGEGTFTSDLSIQLDEEAVREFIEWLLATGPVSGAPPPSGGGGGGGSGGGGSGGGGSADKTHTCPPCPAPEAAGGPSVFLFPPKPKDTLMISRTPEVTCVVVDVSHEDPEVKFNWYVDGVEVHNAKTKPREEQYNSTYRVVSVLTVLHQDWLNGKEYKCKVSNKALPAPIEKTISKAKGQPREPQVYTLPPSRDELTKNQVSLTCLVKGFYPSDIAVEWESNGQPENNYKTTPPVLDSDGSFFLYSKLTVDKSRWQQGNVFSCSVMHEALHNHYTQKSLSLSPGGGGSGSAHPIPDSSPLLQFGGQVRQRYLYTDDACQTEAHLEIREDGTVGGAADQSPESLLQLKALKPGVIQILGVKTSRFLCQRPDGALYGSLHFDPEACSFRELLLEDGYNVYQSEAHGLPLHLCGNKSPHRDPAPRGPARFLPLPGLPPAPPEPPGILAPQPPDVGSSDPLSMVGSQGRSPSYAS

SEQ ID NO: 1382 - protein, 472 aa, Artificial Sequence
  Fusion Protein
HGEGTFTSDLSIQLDEEAVREFIEWLLATGPVSGAPPPSGGGGGGGSGGGGSGGGGSADKTHTCPPCPAPEAAGGPSVFLFPPKPKDTLMISRTPEVTCVVVDVSHEDPEVKFNWYVDGVEVHNAKTKPREEQYNSTYRVVSVLTVLHQDWLNGKEYKCKVSNKALPAPIEKTISKAKGQPREPQVYTLPPSRDELTKNQVSLTCLVKGFYPSDIAVEWESNGQPENNYKTTPPVLDSDGSFFLYSKLTVDKSRWQQGNVFSCSVMHEALHNHYTQKSLSLSPGGGGSGSAHPIPDSSPLLQFGGQVRQRYLYTDDACQTEAHLEIREDGTVGGAADQSPESLLQLKALKPGVIQILGVKTSRFLCQRPDGALYGSLHFDPEACSFRELLLEDGYNVYQSEAHGLPLHLCGNKSPHRDPAPRGPARFLPLPGLPPAPPEPPGILAPQPPDVGSSDPLSMVYPSQGRSPSYAS

SEQ ID NO: 1383 - protein, 471 aa, Artificial Sequence
  Fusion Protein
HGEGTFTSDLSIQLDEEAVREFIEWLLATGPVSGAPPPSGGGGGGGSGGGGSGGGGSADKTHTCPPCPAPELLGGPSVFLFPPKPKDTLMISRTPEVTCVVVDVSHEDPEVKFNWYVDGVEVHNAKTKPREEQYNNASRVVSVLTVLHQDWLNGKEYKCKVSNKALPAPIEKTISKAKGQPREPQVYTLPPSRDELTKNQVSLTCLVKGFYPSDIAVEWESNGQPENNYKTTPPVLDSDGSFFLYSKLTVDKSRWQQGNVFSCSVMHEALHNHYTQKSLSLSPGGGGSGSAHPIPDSSPLLQFGGQVRQRYLYTDDACQTEAHLEIREDGTVGGAADQSPESLLQLKALKPGVIQILGVKTSRFLCQRPDGALYGSLHFDPEACSFRELLLEDGYNVYQSEAHGLPLHLPGCKSPHRDPAPRGPARFLPLPGLPPAPPEPPGILAPQPPDVGSSDPLSMVGSQGRSPSYAS

SEQ ID NO: 1384 - protein, 472 aa, Artificial Sequence
  Fusion Protein
HGEGTFTSDLSIQLDEEAVREFIEWLLATGPVSGAPPPSGGGGGGGSGGGGSGGGGSADKTHTCPPCPAPELLGGPSVFLFPPKPKDTLMISRTPEVTCVVVDVSHEDPEVKFNWYVDGVEVHNAKTKPREEQYNNASRVVSVLTVLHQDWLNGKEYKCKVSNKALPAPIEKTISKAKGQPREPQVYTLPPSRDELTKNQVSLTCLVKGFYPSDIAVEWESNGQPENNYKTTPPVLDSDGSFFLYSKLTVDKSRWQQGNVFSCSVMHEALHNHYTQKSLSLSPGGGGSGSAHPIPDSSPLLQFGGQVRQRYLYTDDACQTEAHLEIREDGTVGGAADQSPESLLQLKALKPGVIQILGVKTSRFLCQRPDGALYGSLHFDPEACSFRELLLEDGYNVYQSEAHGLPLHLPGCKSPHRDPAPRGPARFLPLPGLPPAPPEPPGILAPQPPDVGSSDPLSMVYPSQGRSPSYAS

SEQ ID NO: 1385 - protein, 471 aa, Artificial Sequence
  Fusion Protein
HGEGTFTSDLSIQLDEEAVREFIEWLLATGPVSGAPPPSGGGGGGGSGGGGSGGGGSADKTHTCPPCPAPELLGGPSVFLFPPKPKDTLMISRTPEVTCVVVDVSHEDPEVKFNWYVDGVEVHNAKTKPREEQYNNASRVVSVLTVLHQDWLNGKEYKCKVSNKALPAPIEKTISKAKGQPREPQVYTLPPSRDELTKNQVSLTCLVKGFYPSDIAVEWESNGQPENNYKTTPPVLDSDGSFFLYSKLTVDKSRWQQGNVFSCSVMHEALHNHYTQKSLSLSPGGGGSGSAHPIPDSSPLLQFGGQVRQRYLYTDDACQTEAHLEIREDGTVGGAADQSPESLLQLKALKPGVIQILGVKTSRFLCQRPDGALYGSLHFDPEACSFRELLLEDGYNVYQSEAHGLPLHLCGNKSPHRDPAPRGPARFLPLPGLPPAPPEPPGILAPQPPDVGSSDPLSMVGSQGRSPSYAS

SEQ ID NO: 1386 - protein, 472 aa, Artificial Sequence
  Fusion Protein
HGEGTFTSDLSIQLDEEAVREFIEWLLATGPVSGAPPPSGGGGGGGSGGGGSGGGGSADKTHTCPPCPAPELLGGPSVFLFPPKPKDTLMISRTPEVTCVVVDVSHEDPEVKFNWYVDGVEVHNAKTKPREEQYNNASRVVSVLTVLHQDWLNGKEYKCKVSNKALPAPIEKTISKAKGQPREPQVYTLPPSRDELTKNQVSLTCLVKGFYPSDIAVEWESNGQPENNYKTTPPVLDSDGSFFLYSKLTVDKSRWQQGNVFSCSVMHEALHNHYTQKSLSLSPGGGGSGSAHPIPDSSPLLQFGGQVRQRYLYTDDACQTEAHLEIREDGTVGGAADQSPESLLQLKALKPGVIQILGVKTSRFLCQRPDGALYGSLHFDPEACSFRELLLEDGYNVYQSEAHGLPLHLCGNKSPHRDPAPRGPARFLPLPGLPPAPPEPPGILAPQPPDVGSSDPLSMVYPSQGRSPSYAS

SEQ ID NO: 1387 - protein, 474 aa, Artificial Sequence
  Fusion Protein
HGEGTFTSDLSIQLDEEAVREFIEWLLATGPVSGAPPPSGGGGGGGSGGGGSGGGGSAESKYGPPCPPCPAPEFEGGPSVFLFPPKPKDTLMISRTPEVTCVVVDVSQEDPEVQFNWYVDGVEVHNAKTKPREEQFNSTYRVVSVLTVLHQDWLNGKEYKCKVSNKGLPSSIEKTISKAKGQPREPQVYTLPPSQEEMTKNQVSLTCLVKGFYPSDIAVEWESNGQPENNYKTTPPVLDSDGSFFLYSRLTVDKSRWQEGNVFSCSVMHEALHNHYTQKSLSLSLGGGGSGSAHPIPDSSPLLQFGGQVRQRYLYTDDACQTEAHLEIREDGTVGGAADQSPESLLQLKALKPGVIQILGVKTSRFLCQRPDGALYGSLHFDPEACSFRELLLEDGYNVYQSEAHGLPLHLPGCKSPHRDPAPRGPARFLPLPGLPPAPPEPPGILAPQPPDVGSSDPLSMVYPSQGRSPSYAS

SEQ ID NO: 1388 - protein, 473 aa, Artificial Sequence
  Fusion Protein
HGEGTFTSDLSIQLDEEAVREFIEWLLATGPVSGAPPPSGGGGGGGSGGGGSGGGGSAESKYGPPCPPCPAPEFEGGPSVFLFPPKPKDTLMISRTPEVTCVVVDVSQEDPEVQFNWYVDGVEVHNAKTKPREEQFNSTYRVVSVLTVLHQDWLNGKEYKCKVSNKGLPSSIEKTISKAKGQPREPQVYTLPPSQEEMTKNQVSLTCLVKGFYPSDIAVEWESNGQPENNYKTTPPVLDSDGSFFLYSRLTVDKSRWQEGNVFSCSVMHEALHNHYTQKSLSLSLGGGGSGSAHPIPDSSPLLQFGGQVRQRYLYTDDACQTEAHLEIREDGTVGGAADQSPESLLQLKALKPGVIQILGVKTSRFLCQRPDGALYGSLHFDPEACSFRELLLEDGYNVYQSEAHGLPLHLCGNKSPHRDPAPRGPARFLPLPGLPPAPPEPPGILAPQPPDVGSSDPLSMVGSQGRSPSYAS

SEQ ID NO: 1389 - protein, 474 aa, Artificial Sequence
  Fusion Protein
HGEGTFTSDLSIQLDEEAVREFIEWLLATGPVSGAPPPSGGGGGGGSGGGGSGGGGSAESKYGPPCPPCPAPEFEGGPSVFLFPPKPKDTLMISRTPEVTCVVVDVSQEDPEVQFNWYVDGVEVHNAKTKPREEQFNSTYRVVSVLTVLHQDWLNGKEYKCKVSNKGLPSSIEKTISKAKGQPREPQVYTLPPSQEEMTKNQVSLTCLVKGFYPSDIAVEWESNGQPENNYKTTPPVLDSDGSFFLYSRLTVDKSRWQEGNVFSCSVMHEALHNHYTQKSLSLSLGGGGSGSAHPIPDSSPLLQFGGQVRQRYLYTDDACQTEAHLEIREDGTVGGAADQSPESLLQLKALKPGVIQILGVKTSRFLCQRPDGALYGSLHFDPEACSFRELLLEDGYNVYQSEAHGLPLHLCGNKSPHRDPAPRGPARFLPLPGLPPAPPEPPGILAPQPPDVGSSDPLSMVYPSQGRSPSYAS

SEQ ID NO: 1390 - protein, 472 aa, Artificial Sequence
  Fusion Protein
GHGEGTFTSDKSIQLEEEAVRLFIEWLLAGGHPSGKPPPKGGGGGGGSGGGGSGGGGSADKTHTCPPCPAPEAAGGPSVFLFPPKPKDTLMISRTPEVTCVVVDVSHEDPEVKFNWYVDGVEVHNAKTKPREEQYNSTYRVVSVLTVLHQDWLNGKEYKCKVSNKALPAPIEKTISKAKGQPREPQVYTLPPSRDELTKNQVSLTCLVKGFYPSDIAVEWESNGQPENNYKTTPPVLDSDGSFFLYSKLTVDKSRWQQGNVFSCSVMHEALHNHYTQKSLSLSPGGGGSGSAHPIPDSSPLLQFGGQVRQRYLYTDDACQTEAHLEIREDGTVGGAADQSPESLLQLKALKPGVIQILGVKTSRFLCQRPDGALYGSLHFDPEACSFRELLLEDGYNVYQSEAHGLPLHLPGCKSPHRDPAPRGPARFLPLPGLPPAPPEPPGILAPQPPDVGSSDPLSMVGSQGRSPSYAS

SEQ ID NO: 1391 - protein, 473 aa, Artificial Sequence
  Fusion Protein
GHGEGTFTSDKSIQLEEEAVRLFIEWLLAGGHPSGKPPPKGGGGGGGSGGGGSGGGGSADKTHTCPPCPAPEAAGGPSVFLFPPKPKDTLMISRTPEVTCVVVDVSHEDPEVKFNWYVDGVEVHNAKTKPREEQYNSTYRVVSVLTVLHQDWLNGKEYKCKVSNKALPAPIEKTISKAKGQPREPQVYTLPPSRDELTKNQVSLTCLVKGFYPSDIAVEWESNGQPENNYKTTPPVLDSDGSFFLYSKLTVDKSRWQQGNVFSCSVMHEALHNHYTQKSLSLSPGGGGSGSAHPIPDSSPLLQFGGQVRQRYLYTDDACQTEAHLEIREDGTVGGAADQSPESLLQLKALKPGVIQILGVKTSRFLCQRPDGALYGSLHFDPEACSFRELLLEDGYNVYQSEAHGLPLHLPGCKSPHRDPAPRGPARFLPLPGLPPAPPEPPGILAPQPPDVGSSDPLSMVYPSQGRSPSYAS

SEQ ID NO: 1392 - protein, 472 aa, Artificial Sequence
  Fusion Protein
GHGEGTFTSDKSIQLEEEAVRLFIEWLLAGGHPSGKPPPKGGGGGGGSGGGGSGGGGSADKTHTCPPCPAPEAAGGPSVFLFPPKPKDTLMISRTPEVTCVVVDVSHEDPEVKFNWYVDGVEVHNAKTKPREEQYNSTYRVVSVLTVLHQDWLNGKEYKCKVSNKALPAPIEKTISKAKGQPREPQVYTLPPSRDELTKNQVSLTCLVKGFYPSDIAVEWESNGQPENNYKTTPPVLDSDGSFFLYSKLTVDKSRWQQGNVFSCSVMHEALHNHYTQKSLSLSPGGGGSGSAHPIPDSSPLLQFGGQVRQRYLYTDDACQTEAHLEIREDGTVGGAADQSPESLLQLKALKPGVIQILGVKTSRFLCQRPDGALYGSLHFDPEACSFRELLLEDGYNVYQSEAHGLPLHLCGNKSPHRDPAPRGPARFLPLPGLPPAPPEPPGILAPQPPDVGSSDPLSMVGSQGRSPSYAS

SEQ ID NO: 1393 - protein, 473 aa, Artificial Sequence
  Fusion Protein
GHGEGTFTSDKSIQLEEEAVRLFIEWLLAGGHPSGKPPPKGGGGGGGSGGGGSGGGGSADKTHTCPPCPAPEAAGGPSVFLFPPKPKDTLMISRTPEVTCVVVDVSHEDPEVKFNWYVDGVEVHNAKTKPREEQYNSTYRVVSVLTVLHQDWLNGKEYKCKVSNKALPAPIEKTISKAKGQPREPQVYTLPPSRDELTKNQVSLTCLVKGFYPSDIAVEWESNGQPENNYKTTPPVLDSDGSFFLYSKLTVDKSRWQQGNVFSCSVMHEALHNHYTQKSLSLSPGGGGSGSAHPIPDSSPLLQFGGQVRQRYLYTDDACQTEAHLEIREDGTVGGAADQSPESLLQLKALKPGVIQILGVKTSRFLCQRPDGALYGSLHFDPEACSFRELLLEDGYNVYQSEAHGLPLHLCGNKSPHRDPAPRGPARFLPLPGLPPAPPEPPGILAPQPPDVGSSDPLSMVYPSQGRSPSYAS

SEQ ID NO: 1394 - protein, 472 aa, Artificial Sequence
  Fusion Protein
GHGEGTFTSDKSIQLEEEAVRLFIEWLLAGGHPSGKPPPKGGGGGGGSGGGGSGGGGSADKTHTCPPCPAPELLGGPSVFLFPPKPKDTLMISRTPEVTCVVVDVSHEDPEVKFNWYVDGVEVHNAKTKPREEQYNNASRVVSVLTVLHQDWLNGKEYKCKVSNKALPAPIEKTISKAKGQPREPQVYTLPPSRDELTKNQVSLTCLVKGFYPSDIAVEWESNGQPENNYKTTPPVLDSDGSFFLYSKLTVDKSRWQQGNVFSCSVMHEALHNHYTQKSLSLSPGGGGSGSAHPIPDSSPLLQFGGQVRQRYLYTDDACQTEAHLEIREDGTVGGAADQSPESLLQLKALKPGVIQILGVKTSRFLCQRPDGALYGSLHFDPEACSFRELLLEDGYNVYQSEAHGLPLHLPGCKSPHRDPAPRGPARFLPLPGLPPAPPEPPGILAPQPPDVGSSDPLSMVGSQGRSPSYAS

SEQ ID NO: 1395 - protein, 473 aa, Artificial Sequence
  Fusion Protein
GHGEGTFTSDKSIQLEEEAVRLFIEWLLAGGHPSGKPPPKGGGGGGGSGGGGSGGGGSADKTHTCPPCPAPELLGGPSVFLFPPKPKDTLMISRTPEVTCVVVDVSHEDPEVKFNWYVDGVEVHNAKTKPREEQYNNASRVVSVLTVLHQDWLNGKEYKCKVSNKALPAPIEKTISKAKGQPREPQVYTLPPSRDELTKNQVSLTCLVKGFYPSDIAVEWESNGQPENNYKTTPPVLDSDGSFFLYSKLTVDKSRWQQGNVFSCSVMHEALHNHYTQKSLSLSPGGGGSGSAHPIPDSSPLLQFGGQVRQRYLYTDDACQTEAHLEIREDGTVGGAADQSPESLLQLKALKPGVIQILGVKTSRFLCQRPDGALYGSLHFDPEACSFRELLLEDGYNVYQSEAHGLPLHLPGCKSPHRDPAPRGPARFLPLPGLPPAPPEPPGILAPQPPDVGSSDPLSMVYPSQGRSPSYAS

SEQ ID NO: 1396 - protein, 472 aa, Artificial Sequence
  Fusion Protein
GHGEGTFTSDKSIQLEEEAVRLFIEWLLAGGHPSGKPPPKGGGGGGGSGGGGSGGGGSADKTHTCPPCPAPELLGGPSVFLFPPKPKDTLMISRTPEVTCVVVDVSHEDPEVKFNWYVDGVEVHNAKTKPREEQYNNASRVVSVLTVLHQDWLNGKEYKCKVSNKALPAPIEKTISKAKGQPREPQVYTLPPSRDELTKNQVSLTCLVKGFYPSDIAVEWESNGQPENNYKTTPPVLDSDGSFFLYSKLTVDKSRWQQGNVFSCSVMHEALHNHYTQKSLSLSPGGGGSGSAHPIPDSSPLLQFGGQVRQRYLYTDDACQTEAHLEIREDGTVGGAADQSPESLLQLKALKPGVIQILGVKTSRFLCQRPDGALYGSLHFDPEACSFRELLLEDGYNVYQSEAHGLPLHLCGNKSPHRDPAPRGPARFLPLPGLPPAPPEPPGILAPQPPDVGSSDPLSMVGSQGRSPSYAS

SEQ ID NO: 1397 - protein, 473 aa, Artificial Sequence
  Fusion Protein
GHGEGTFTSDKSIQLEEEAVRLFIEWLLAGGHPSGKPPPKGGGGGGGSGGGGSGGGGSADKTHTCPPCPAPELLGGPSVFLFPPKPKDTLMISRTPEVTCVVVDVSHEDPEVKFNWYVDGVEVHNAKTKPREEQYNNASRVVSVLTVLHQDWLNGKEYKCKVSNKALPAPIEKTISKAKGQPREPQVYTLPPSRDELTKNQVSLTCLVKGFYPSDIAVEWESNGQPENNYKTTPPVLDSDGSFFLYSKLTVDKSRWQQGNVFSCSVMHEALHNHYTQKSLSLSPGGGGSGSAHPIPDSSPLLQFGGQVRQRYLYTDDACQTEAHLEIREDGTVGGAADQSPESLLQLKALKPGVIQILGVKTSRFLCQRPDGALYGSLHFDPEACSFRELLLEDGYNVYQSEAHGLPLHLCGNKSPHRDPAPRGPARFLPLPGLPPAPPEPPGILAPQPPDVGSSDPLSMVYPSQGRSPSYAS

SEQ ID NO: 1398 - protein, 475 aa, Artificial Sequence
  Fusion Protein
GHGEGTFTSDKSIQLEEEAVRLFIEWLLAGGHPSGKPPPKGGGGGGGSGGGGSGGGGSAESKYGPPCPPCPAPEFEGGPSVFLFPPKPKDTLMISRTPEVTCVVVDVSQEDPEVQFNWYVDGVEVHNAKTKPREEQFNSTYRVVSVLTVLHQDWLNGKEYKCKVSNKGLPSSIEKTISKAKGQPREPQVYTLPPSQEEMTKNQVSLTCLVKGFYPSDIAVEWESNGQPENNYKTTPPVLDSDGSFFLYSRLTVDKSRWQEGNVFSCSVMHEALHNHYTQKSLSLSLGGGGSGSAHPIPDSSPLLQFGGQVRQRYLYTDDACQTEAHLEIREDGTVGGAADQSPESLLQLKALKPGVIQILGVKTSRFLCQRPDGALYGSLHFDPEACSFRELLLEDGYNVYQSEAHGLPLHLPGCKSPHRDPAPRGPARFLPLPGLPPAPPEPPGILAPQPPDVGSSDPLSMVYPSQGRSPSYAS

SEQ ID NO: 1399 - protein, 474 aa, Artificial Sequence
  Fusion Protein
GHGEGTFTSDKSIQLEEEAVRLFIEWLLAGGHPSGKPPPKGGGGGGGSGGGGSGGGGSAESKYGPPCPPCPAPEFEGGPSVFLFPPKPKDTLMISRTPEVTCVVVDVSQEDPEVQFNWYVDGVEVHNAKTKPREEQFNSTYRVVSVLTVLHQDWLNGKEYKCKVSNKGLPSSIEKTISKAKGQPREPQVYTLPPSQEEMTKNQVSLTCLVKGFYPSDIAVEWESNGQPENNYKTTPPVLDSDGSFFLYSRLTVDKSRWQEGNVFSCSVMHEALHNHYTQKSLSLSLGGGGSGSAHPIPDSSPLLQFGGQVRQRYLYTDDACQTEAHLEIREDGTVGGAADQSPESLLQLKALKPGVIQILGVKTSRFLCQRPDGALYGSLHFDPEACSFRELLLEDGYNVYQSEAHGLPLHLCGNKSPHRDPAPRGPARFLPLPGLPPAPPEPPGILAPQPPDVGSSDPLSMVGSQGRSPSYAS

SEQ ID NO: 1400 - protein, 475 aa, Artificial Sequence
  Fusion Protein
GHGEGTFTSDKSIQLEEEAVRLFIEWLLAGGHPSGKPPPKGGGGGGGSGGGGSGGGGSAESKYGPPCPPCPAPEFEGGPSVFLFPPKPKDTLMISRTPEVTCVVVDVSQEDPEVQFNWYVDGVEVHNAKTKPREEQFNSTYRVVSVLTVLHQDWLNGKEYKCKVSNKGLPSSIEKTISKAKGQPREPQVYTLPPSQEEMTKNQVSLTCLVKGFYPSDIAVEWESNGQPENNYKTTPPVLDSDGSFFLYSRLTVDKSRWQEGNVFSCSVMHEALHNHYTQKSLSLSLGGGGSGSAHPIPDSSPLLQFGGQVRQRYLYTDDACQTEAHLEIREDGTVGGAADQSPESLLQLKALKPGVIQILGVKTSRFLCQRPDGALYGSLHFDPEACSFRELLLEDGYNVYQSEAHGLPLHLCGNKSPHRDPAPRGPARFLPLPGLPPAPPEPPGILAPQPPDVGSSDPLSMVYPSQGRSPSYAS

SEQ ID NO: 1401 - protein, 471 aa, Artificial Sequence
  Fusion Protein
HGEGTFTSDLSIQLDEEAVQEFIEWLLATGPSSGAPPPSGGGGGGGSGGGGSGGGGSADKTHTCPPCPAPEAAGGPSVFLFPPKPKDTLMISRTPEVTCVVVDVSHEDPEVKFNWYVDGVEVHNAKTKPREEQYNSTYRVVSVLTVLHQDWLNGKEYKCKVSNKALPAPIEKTISKAKGQPREPQVYTLPPSRDELTKNQVSLTCLVKGFYPSDIAVEWESNGQPENNYKTTPPVLDSDGSFFLYSKLTVDKSRWQQGNVFSCSVMHEALHNHYTQKSLSLSPGGGGSGSAHPIPDSSPLLQFGGQVRQRYLYTDDACQTEAHLEIREDGTVGGAADQSPESLLQLKALKPGVIQILGVKTSRFLCQRPDGALYGSLHFDPEACSFRELLLEDGYNVYQSEAHGLPLHLPGCKSPHRDPAPRGPARFLPLPGLPPAPPEPPGILAPQPPDVGSSDPLSMVGSQGRSPSYAS

SEQ ID NO: 1402 - protein, 472 aa, Artificial Sequence
  Fusion Protein
HGEGTFTSDLSIQLDEEAVQEFIEWLLATGPSSGAPPPSGGGGGGGSGGGGSGGGGSADKTHTCPPCPAPEAAGGPSVFLFPPKPKDTLMISRTPEVTCVVVDVSHEDPEVKFNWYVDGVEVHNAKTKPREEQYNSTYRVVSVLTVLHQDWLNGKEYKCKVSNKALPAPIEKTISKAKGQPREPQVYTLPPSRDELTKNQVSLTCLVKGFYPSDIAVEWESNGQPENNYKTTPPVLDSDGSFFLYSKLTVDKSRWQQGNVFSCSVMHEALHNHYTQKSLSLSPGGGGSGSAHPIPDSSPLLQFGGQVRQRYLYTDDACQTEAHLEIREDGTVGGAADQSPESLLQLKALKPGVIQILGVKTSRFLCQRPDGALYGSLHFDPEACSFRELLLEDGYNVYQSEAHGLPLHLPGCKSPHRDPAPRGPARFLPLPGLPPAPPEPPGILAPQPPDVGSSDPLSMVYPSQGRSPSYAS

SEQ ID NO: 1403 - protein, 471 aa, Artificial Sequence
  Fusion Protein
HGEGTFTSDLSIQLDEEAVQEFIEWLLATGPSSGAPPPSGGGGGGGSGGGGSGGGGSADKTHTCPPCPAPEAAGGPSVFLFPPKPKDTLMISRTPEVTCVVVDVSHEDPEVKFNWYVDGVEVHNAKTKPREEQYNSTYRVVSVLTVLHQDWLNGKEYKCKVSNKALPAPIEKTISKAKGQPREPQVYTLPPSRDELTKNQVSLTCLVKGFYPSDIAVEWESNGQPENNYKTTPPVLDSDGSFFLYSKLTVDKSRWQQGNVFSCSVMHEALHNHYTQKSLSLSPGGGGSGSAHPIPDSSPLLQFGGQVRQRYLYTDDACQTEAHLEIREDGTVGGAADQSPESLLQLKALKPGVIQILGVKTSRFLCQRPDGALYGSLHFDPEACSFRELLLEDGYNVYQSEAHGLPLHLCGNKSPHRDPAPRGPARFLPLPGLPPAPPEPPGILAPQPPDVGSSDPLSMVGSQGRSPSYAS

SEQ ID NO: 1404 - protein, 472 aa, Artificial Sequence
  Fusion Protein
HGEGTFTSDLSIQLDEEAVQEFIEWLLATGPSSGAPPPSGGGGGGGSGGGGSGGGGSADKTHTCPPCPAPEAAGGPSVFLFPPKPKDTLMISRTPEVTCVVVDVSHEDPEVKFNWYVDGVEVHNAKTKPREEQYNSTYRVVSVLTVLHQDWLNGKEYKCKVSNKALPAPIEKTISKAKGQPREPQVYTLPPSRDELTKNQVSLTCLVKGFYPSDIAVEWESNGQPENNYKTTPPVLDSDGSFFLYSKLTVDKSRWQQGNVFSCSVMHEALHNHYTQKSLSLSPGGGGSGSAHPIPDSSPLLQFGGQVRQRYLYTDDACQTEAHLEIREDGTVGGAADQSPESLLQLKALKPGVIQILGVKTSRFLCQRPDGALYGSLHFDPEACSFRELLLEDGYNVYQSEAHGLPLHLCGNKSPHRDPAPRGPARFLPLPGLPPAPPEPPGILAPQPPDVGSSDPLSMVYPSQGRSPSYAS

SEQ ID NO: 1405 - protein, 471 aa, Artificial Sequence
  Fusion Protein
HGEGTFTSDLSIQLDEEAVQEFIEWLLATGPSSGAPPPSGGGGGGGSGGGGSGGGGSADKTHTCPPCPAPELLGGPSVFLFPPKPKDTLMISRTPEVTCVVVDVSHEDPEVKFNWYVDGVEVHNAKTKPREEQYNNASRVVSVLTVLHQDWLNGKEYKCKVSNKALPAPIEKTISKAKGQPREPQVYTLPPSRDELTKNQVSLTCLVKGFYPSDIAVEWESNGQPENNYKTTPPVLDSDGSFFLYSKLTVDKSRWQQGNVFSCSVMHEALHNHYTQKSLSLSPGGGGSGSAHPIPDSSPLLQFGGQVRQRYLYTDDACQTEAHLEIREDGTVGGAADQSPESLLQLKALKPGVIQILGVKTSRFLCQRPDGALYGSLHFDPEACSFRELLLEDGYNVYQSEAHGLPLHLPGCKSPHRDPAPRGPARFLPLPGLPPAPPEPPGILAPQPPDVGSSDPLSMVGSQGRSPSYAS

SEQ ID NO: 1406 - protein, 472 aa, Artificial Sequence
  Fusion Protein
HGEGTFTSDLSIQLDEEAVQEFIEWLLATGPSSGAPPPSGGGGGGGSGGGGSGGGGSADKTHTCPPCPAPELLGGPSVFLFPPKPKDTLMISRTPEVTCVVVDVSHEDPEVKFNWYVDGVEVHNAKTKPREEQYNNASRVVSVLTVLHQDWLNGKEYKCKVSNKALPAPIEKTISKAKGQPREPQVYTLPPSRDELTKNQVSLTCLVKGFYPSDIAVEWESNGQPENNYKTTPPVLDSDGSFFLYSKLTVDKSRWQQGNVFSCSVMHEALHNHYTQKSLSLSPGGGGSGSAHPIPDSSPLLQFGGQVRQRYLYTDDACQTEAHLEIREDGTVGGAADQSPESLLQLKALKPGVIQILGVKTSRFLCQRPDGALYGSLHFDPEACSFRELLLEDGYNVYQSEAHGLPLHLPGCKSPHRDPAPRGPARFLPLPGLPPAPPEPPGILAPQPPDVGSSDPLSMVYPSQGRSPSYAS

SEQ ID NO: 1407 - protein, 471 aa, Artificial Sequence
  Fusion Protein
HGEGTFTSDLSIQLDEEAVQEFIEWLLATGPSSGAPPPSGGGGGGGSGGGGSGGGGSADKTHTCPPCPAPELLGGPSVFLFPPKPKDTLMISRTPEVTCVVVDVSHEDPEVKFNWYVDGVEVHNAKTKPREEQYNNASRVVSVLTVLHQDWLNGKEYKCKVSNKALPAPIEKTISKAKGQPREPQVYTLPPSRDELTKNQVSLTCLVKGFYPSDIAVEWESNGQPENNYKTTPPVLDSDGSFFLYSKLTVDKSRWQQGNVFSCSVMHEALHNHYTQKSLSLSPGGGGSGSAHPIPDSSPLLQFGGQVRQRYLYTDDACQTEAHLEIREDGTVGGAADQSPESLLQLKALKPGVIQILGVKTSRFLCQRPDGALYGSLHFDPEACSFRELLLEDGYNVYQSEAHGLPLHLCGNKSPHRDPAPRGPARFLPLPGLPPAPPEPPGILAPQPPDVGSSDPLSMVGSQGRSPSYAS

SEQ ID NO: 1408 - protein, 472 aa, Artificial Sequence
  Fusion Protein
HGEGTFTSDLSIQLDEEAVQEFIEWLLATGPSSGAPPPSGGGGGGGSGGGGSGGGGSADKTHTCPPCPAPELLGGPSVFLFPPKPKDTLMISRTPEVTCVVVDVSHEDPEVKFNWYVDGVEVHNAKTKPREEQYNNASRVVSVLTVLHQDWLNGKEYKCKVSNKALPAPIEKTISKAKGQPREPQVYTLPPSRDELTKNQVSLTCLVKGFYPSDIAVEWESNGQPENNYKTTPPVLDSDGSFFLYSKLTVDKSRWQQGNVFSCSVMHEALHNHYTQKSLSLSPGGGGSGSAHPIPDSSPLLQFGGQVRQRYLYTDDACQTEAHLEIREDGTVGGAADQSPESLLQLKALKPGVIQILGVKTSRFLCQRPDGALYGSLHFDPEACSFRELLLEDGYNVYQSEAHGLPLHLCGNKSPHRDPAPRGPARFLPLPGLPPAPPEPPGILAPQPPDVGSSDPLSMVYPSQGRSPSYAS

SEQ ID NO: 1409 - protein, 474 aa, Artificial Sequence
  Fusion Protein
HGEGTFTSDLSIQLDEEAVQEFIEWLLATGPSSGAPPPSGGGGGGGSGGGGSGGGGSAESKYGPPCPPCPAPEFEGGPSVFLFPPKPKDTLMISRTPEVTCVVVDVSQEDPEVQFNWYVDGVEVHNAKTKPREEQFNSTYRVVSVLTVLHQDWLNGKEYKCKVSNKGLPSSIEKTISKAKGQPREPQVYTLPPSQEEMTKNQVSLTCLVKGFYPSDIAVEWESNGQPENNYKTTPPVLDSDGSFFLYSRLTVDKSRWQEGNVFSCSVMHEALHNHYTQKSLSLSLGGGGSGSAHPIPDSSPLLQFGGQVRQRYLYTDDACQTEAHLEIREDGTVGGAADQSPESLLQLKALKPGVIQILGVKTSRFLCQRPDGALYGSLHFDPEACSFRELLLEDGYNVYQSEAHGLPLHLPGCKSPHRDPAPRGPARFLPLPGLPPAPPEPPGILAPQPPDVGSSDPLSMVYPSQGRSPSYAS

SEQ ID NO: 1410 - protein, 473 aa, Artificial Sequence
  Fusion Protein
HGEGTFTSDLSIQLDEEAVQEFIEWLLATGPSSGAPPPSGGGGGGGSGGGGSGGGGSAESKYGPPCPPCPAPEFEGGPSVFLFPPKPKDTLMISRTPEVTCVVVDVSQEDPEVQFNWYVDGVEVHNAKTKPREEQFNSTYRVVSVLTVLHQDWLNGKEYKCKVSNKGLPSSIEKTISKAKGQPREPQVYTLPPSQEEMTKNQVSLTCLVKGFYPSDIAVEWESNGQPENNYKTTPPVLDSDGSFFLYSRLTVDKSRWQEGNVFSCSVMHEALHNHYTQKSLSLSLGGGGSGSAHPIPDSSPLLQFGGQVRQRYLYTDDACQTEAHLEIREDGTVGGAADQSPESLLQLKALKPGVIQILGVKTSRFLCQRPDGALYGSLHFDPEACSFRELLLEDGYNVYQSEAHGLPLHLCGNKSPHRDPAPRGPARFLPLPGLPPAPPEPPGILAPQPPDVGSSDPLSMVGSQGRSPSYAS

SEQ ID NO: 1411 - protein, 474 aa, Artificial Sequence
  Fusion Protein
HGEGTFTSDLSIQLDEEAVQEFIEWLLATGPSSGAPPPSGGGGGGGSGGGGSGGGGSAESKYGPPCPPCPAPEFEGGPSVFLFPPKPKDTLMISRTPEVTCVVVDVSQEDPEVQFNWYVDGVEVHNAKTKPREEQFNSTYRVVSVLTVLHQDWLNGKEYKCKVSNKGLPSSIEKTISKAKGQPREPQVYTLPPSQEEMTKNQVSLTCLVKGFYPSDIAVEWESNGQPENNYKTTPPVLDSDGSFFLYSRLTVDKSRWQEGNVFSCSVMHEALHNHYTQKSLSLSLGGGGSGSAHPIPDSSPLLQFGGQVRQRYLYTDDACQTEAHLEIREDGTVGGAADQSPESLLQLKALKPGVIQILGVKTSRFLCQRPDGALYGSLHFDPEACSFRELLLEDGYNVYQSEAHGLPLHLCGNKSPHRDPAPRGPARFLPLPGLPPAPPEPPGILAPQPPDVGSSDPLSMVYPSQGRSPSYAS

SEQ ID NO: 1412 - protein, 471 aa, Artificial Sequence
  Fusion Protein
HGEGTFTSDLSIQLDEEAVQLFIEWLLATGPSSGAPPPSGGGGGGGSGGGGSGGGGSADKTHTCPPCPAPEAAGGPSVFLFPPKPKDTLMISRTPEVTCVVVDVSHEDPEVKFNWYVDGVEVHNAKTKPREEQYNSTYRVVSVLTVLHQDWLNGKEYKCKVSNKALPAPIEKTISKAKGQPREPQVYTLPPSRDELTKNQVSLTCLVKGFYPSDIAVEWESNGQPENNYKTTPPVLDSDGSFFLYSKLTVDKSRWQQGNVFSCSVMHEALHNHYTQKSLSLSPGGGGSGSAHPIPDSSPLLQFGGQVRQRYLYTDDACQTEAHLEIREDGTVGGAADQSPESLLQLKALKPGVIQILGVKTSRFLCQRPDGALYGSLHFDPEACSFRELLLEDGYNVYQSEAHGLPLHLPGCKSPHRDPAPRGPARFLPLPGLPPAPPEPPGILAPQPPDVGSSDPLSMVGSQGRSPSYAS

SEQ ID NO: 1413 - protein, 472 aa, Artificial Sequence
  Fusion Protein
HGEGTFTSDLSIQLDEEAVQLFIEWLLATGPSSGAPPPSGGGGGGGSGGGGSGGGGSADKTHTCPPCPAPEAAGGPSVFLFPPKPKDTLMISRTPEVTCVVVDVSHEDPEVKFNWYVDGVEVHNAKTKPREEQYNSTYRVVSVLTVLHQDWLNGKEYKCKVSNKALPAPIEKTISKAKGQPREPQVYTLPPSRDELTKNQVSLTCLVKGFYPSDIAVEWESNGQPENNYKTTPPVLDSDGSFFLYSKLTVDKSRWQQGNVFSCSVMHEALHNHYTQKSLSLSPGGGGSGSAHPIPDSSPLLQFGGQVRQRYLYTDDACQTEAHLEIREDGTVGGAADQSPESLLQLKALKPGVIQILGVKTSRFLCQRPDGALYGSLHFDPEACSFRELLLEDGYNVYQSEAHGLPLHLPGCKSPHRDPAPRGPARFLPLPGLPPAPPEPPGILAPQPPDVGSSDPLSMVYPSQGRSPSYAS

SEQ ID NO: 1414 - protein, 471 aa, Artificial Sequence
  Fusion Protein
HGEGTFTSDLSIQLDEEAVQLFIEWLLATGPSSGAPPPSGGGGGGGSGGGGSGGGGSADKTHTCPPCPAPEAAGGPSVFLFPPKPKDTLMISRTPEVTCVVVDVSHEDPEVKFNWYVDGVEVHNAKTKPREEQYNSTYRVVSVLTVLHQDWLNGKEYKCKVSNKALPAPIEKTISKAKGQPREPQVYTLPPSRDELTKNQVSLTCLVKGFYPSDIAVEWESNGQPENNYKTTPPVLDSDGSFFLYSKLTVDKSRWQQGNVFSCSVMHEALHNHYTQKSLSLSPGGGGSGSAHPIPDSSPLLQFGGQVRQRYLYTDDACQTEAHLEIREDGTVGGAADQSPESLLQLKALKPGVIQILGVKTSRFLCQRPDGALYGSLHFDPEACSFRELLLEDGYNVYQSEAHGLPLHLCGNKSPHRDPAPRGPARFLPLPGLPPAPPEPPGILAPQPPDVGSSDPLSMVGSQGRSPSYAS

SEQ ID NO: 1415 - protein, 472 aa, Artificial Sequence
  Fusion Protein
HGEGTFTSDLSIQLDEEAVQLFIEWLLATGPSSGAPPPSGGGGGGGSGGGGSGGGGSADKTHTCPPCPAPEAAGGPSVFLFPPKPKDTLMISRTPEVTCVVVDVSHEDPEVKFNWYVDGVEVHNAKTKPREEQYNSTYRVVSVLTVLHQDWLNGKEYKCKVSNKALPAPIEKTISKAKGQPREPQVYTLPPSRDELTKNQVSLTCLVKGFYPSDIAVEWESNGQPENNYKTTPPVLDSDGSFFLYSKLTVDKSRWQQGNVFSCSVMHEALHNHYTQKSLSLSPGGGGSGSAHPIPDSSPLLQFGGQVRQRYLYTDDACQTEAHLEIREDGTVGGAADQSPESLLQLKALKPGVIQILGVKTSRFLCQRPDGALYGSLHFDPEACSFRELLLEDGYNVYQSEAHGLPLHLCGNKSPHRDPAPRGPARFLPLPGLPPAPPEPPGILAPQPPDVGSSDPLSMVYPSQGRSPSYAS

SEQ ID NO: 1416 - protein, 471 aa, Artificial Sequence
  Fusion Protein
HGEGTFTSDLSIQLDEEAVQLFIEWLLATGPSSGAPPPSGGGGGGGSGGGGSGGGGSADKTHTCPPCPAPELLGGPSVFLFPPKPKDTLMISRTPEVTCVVVDVSHEDPEVKFNWYVDGVEVHNAKTKPREEQYNNASRVVSVLTVLHQDWLNGKEYKCKVSNKALPAPIEKTISKAKGQPREPQVYTLPPSRDELTKNQVSLTCLVKGFYPSDIAVEWESNGQPENNYKTTPPVLDSDGSFFLYSKLTVDKSRWQQGNVFSCSVMHEALHNHYTQKSLSLSPGGGGSGSAHPIPDSSPLLQFGGQVRQRYLYTDDACQTEAHLEIREDGTVGGAADQSPESLLQLKALKPGVIQILGVKTSRFLCQRPDGALYGSLHFDPEACSFRELLLEDGYNVYQSEAHGLPLHLPGCKSPHRDPAPRGPARFLPLPGLPPAPPEPPGILAPQPPDVGSSDPLSMVGSQGRSPSYAS

SEQ ID NO: 1417 - protein, 472 aa, Artificial Sequence
  Fusion Protein
HGEGTFTSDLSIQLDEEAVQLFIEWLLATGPSSGAPPPSGGGGGGGSGGGGSGGGGSADKTHTCPPCPAPELLGGPSVFLFPPKPKDTLMISRTPEVTCVVVDVSHEDPEVKFNWYVDGVEVHNAKTKPREEQYNNASRVVSVLTVLHQDWLNGKEYKCKVSNKALPAPIEKTISKAKGQPREPQVYTLPPSRDELTKNQVSLTCLVKGFYPSDIAVEWESNGQPENNYKTTPPVLDSDGSFFLYSKLTVDKSRWQQGNVFSCSVMHEALHNHYTQKSLSLSPGGGGSGSAHPIPDSSPLLQFGGQVRQRYLYTDDACQTEAHLEIREDGTVGGAADQSPESLLQLKALKPGVIQILGVKTSRFLCQRPDGALYGSLHFDPEACSFRELLLEDGYNVYQSEAHGLPLHLPGCKSPHRDPAPRGPARFLPLPGLPPAPPEPPGILAPQPPDVGSSDPLSMVYPSQGRSPSYAS

SEQ ID NO: 1418 - protein, 471 aa, Artificial Sequence
  Fusion Protein
HGEGTFTSDLSIQLDEEAVQLFIEWLLATGPSSGAPPPSGGGGGGGSGGGGSGGGGSADKTHTCPPCPAPELLGGPSVFLFPPKPKDTLMISRTPEVTCVVVDVSHEDPEVKFNWYVDGVEVHNAKTKPREEQYNNASRVVSVLTVLHQDWLNGKEYKCKVSNKALPAPIEKTISKAKGQPREPQVYTLPPSRDELTKNQVSLTCLVKGFYPSDIAVEWESNGQPENNYKTTPPVLDSDGSFFLYSKLTVDKSRWQQGNVFSCSVMHEALHNHYTQKSLSLSPGGGGSGSAHPIPDSSPLLQFGGQVRQRYLYTDDACQTEAHLEIREDGTVGGAADQSPESLLQLKALKPGVIQILGVKTSRFLCQRPDGALYGSLHFDPEACSFRELLLEDGYNVYQSEAHGLPLHLCGNKSPHRDPAPRGPARFLPLPGLPPAPPEPPGILAPQPPDVGSSDPLSMVGSQGRSPSYAS

SEQ ID NO: 1419 - protein, 472 aa, Artificial Sequence
  Fusion Protein
HGEGTFTSDLSIQLDEEAVQLFIEWLLATGPSSGAPPPSGGGGGGGSGGGGSGGGGSADKTHTCPPCPAPELLGGPSVFLFPPKPKDTLMISRTPEVTCVVVDVSHEDPEVKFNWYVDGVEVHNAKTKPREEQYNNASRVVSVLTVLHQDWLNGKEYKCKVSNKALPAPIEKTISKAKGQPREPQVYTLPPSRDELTKNQVSLTCLVKGFYPSDIAVEWESNGQPENNYKTTPPVLDSDGSFFLYSKLTVDKSRWQQGNVFSCSVMHEALHNHYTQKSLSLSPGGGGSGSAHPIPDSSPLLQFGGQVRQRYLYTDDACQTEAHLEIREDGTVGGAADQSPESLLQLKALKPGVIQILGVKTSRFLCQRPDGALYGSLHFDPEACSFRELLLEDGYNVYQSEAHGLPLHLCGNKSPHRDPAPRGPARFLPLPGLPPAPPEPPGILAPQPPDVGSSDPLSMVYPSQGRSPSYAS

SEQ ID NO: 1420 - protein, 474 aa, Artificial Sequence
  Fusion Protein
HGEGTFTSDLSIQLDEEAVQLFIEWLLATGPSSGAPPPSGGGGGGGSGGGGSGGGGSAESKYGPPCPPCPAPEFEGGPSVFLFPPKPKDTLMISRTPEVTCVVVDVSQEDPEVQFNWYVDGVEVHNAKTKPREEQFNSTYRVVSVLTVLHQDWLNGKEYKCKVSNKGLPSSIEKTISKAKGQPREPQVYTLPPSQEEMTKNQVSLTCLVKGFYPSDIAVEWESNGQPENNYKTTPPVLDSDGSFFLYSRLTVDKSRWQEGNVFSCSVMHEALHNHYTQKSLSLSLGGGGSGSAHPIPDSSPLLQFGGQVRQRYLYTDDACQTEAHLEIREDGTVGGAADQSPESLLQLKALKPGVIQILGVKTSRFLCQRPDGALYGSLHFDPEACSFRELLLEDGYNVYQSEAHGLPLHLPGCKSPHRDPAPRGPARFLPLPGLPPAPPEPPGILAPQPPDVGSSDPLSMVYPSQGRSPSYAS

SEQ ID NO: 1421 - protein, 473 aa, Artificial Sequence
  Fusion Protein
HGEGTFTSDLSIQLDEEAVQLFIEWLLATGPSSGAPPPSGGGGGGGSGGGGSGGGGSAESKYGPPCPPCPAPEFEGGPSVFLFPPKPKDTLMISRTPEVTCVVVDVSQEDPEVQFNWYVDGVEVHNAKTKPREEQFNSTYRVVSVLTVLHQDWLNGKEYKCKVSNKGLPSSIEKTISKAKGQPREPQVYTLPPSQEEMTKNQVSLTCLVKGFYPSDIAVEWESNGQPENNYKTTPPVLDSDGSFFLYSRLTVDKSRWQEGNVFSCSVMHEALHNHYTQKSLSLSLGGGGSGSAHPIPDSSPLLQFGGQVRQRYLYTDDACQTEAHLEIREDGTVGGAADQSPESLLQLKALKPGVIQILGVKTSRFLCQRPDGALYGSLHFDPEACSFRELLLEDGYNVYQSEAHGLPLHLCGNKSPHRDPAPRGPARFLPLPGLPPAPPEPPGILAPQPPDVGSSDPLSMVGSQGRSPSYAS

SEQ ID NO: 1422 - protein, 474 aa, Artificial Sequence
  Fusion Protein
HGEGTFTSDLSIQLDEEAVQLFIEWLLATGPSSGAPPPSGGGGGGGSGGGGSGGGGSAESKYGPPCPPCPAPEFEGGPSVFLFPPKPKDTLMISRTPEVTCVVVDVSQEDPEVQFNWYVDGVEVHNAKTKPREEQFNSTYRVVSVLTVLHQDWLNGKEYKCKVSNKGLPSSIEKTISKAKGQPREPQVYTLPPSQEEMTKNQVSLTCLVKGFYPSDIAVEWESNGQPENNYKTTPPVLDSDGSFFLYSRLTVDKSRWQEGNVFSCSVMHEALHNHYTQKSLSLSLGGGGSGSAHPIPDSSPLLQFGGQVRQRYLYTDDACQTEAHLEIREDGTVGGAADQSPESLLQLKALKPGVIQILGVKTSRFLCQRPDGALYGSLHFDPEACSFRELLLEDGYNVYQSEAHGLPLHLCGNKSPHRDPAPRGPARFLPLPGLPPAPPEPPGILAPQPPDVGSSDPLSMVYPSQGRSPSYAS

SEQ ID NO: 1423 - protein, 471 aa, Artificial Sequence
  Fusion Protein
HGEGTFTSDLSIQLDEEAVQLFIEWLLATGPVSGAPPPSGGGGGGGSGGGGSGGGGSADKTHTCPPCPAPEAAGGPSVFLFPPKPKDTLMISRTPEVTCVVVDVSHEDPEVKFNWYVDGVEVHNAKTKPREEQYNSTYRVVSVLTVLHQDWLNGKEYKCKVSNKALPAPIEKTISKAKGQPREPQVYTLPPSRDELTKNQVSLTCLVKGFYPSDIAVEWESNGQPENNYKTTPPVLDSDGSFFLYSKLTVDKSRWQQGNVFSCSVMHEALHNHYTQKSLSLSPGGGGSGSAHPIPDSSPLLQFGGQVRQRYLYTDDACQTEAHLEIREDGTVGGAADQSPESLLQLKALKPGVIQILGVKTSRFLCQRPDGALYGSLHFDPEACSFRELLLEDGYNVYQSEAHGLPLHLPGCKSPHRDPAPRGPARFLPLPGLPPAPPEPPGILAPQPPDVGSSDPLSMVGSQGRSPSYAS

SEQ ID NO: 1424 - protein, 472 aa, Artificial Sequence
  Fusion Protein
HGEGTFTSDLSIQLDEEAVQLFIEWLLATGPVSGAPPPSGGGGGGGSGGGGSGGGGSADKTHTCPPCPAPEAAGGPSVFLFPPKPKDTLMISRTPEVTCVVVDVSHEDPEVKFNWYVDGVEVHNAKTKPREEQYNSTYRVVSVLTVLHQDWLNGKEYKCKVSNKALPAPIEKTISKAKGQPREPQVYTLPPSRDELTKNQVSLTCLVKGFYPSDIAVEWESNGQPENNYKTTPPVLDSDGSFFLYSKLTVDKSRWQQGNVFSCSVMHEALHNHYTQKSLSLSPGGGGSGSAHPIPDSSPLLQFGGQVRQRYLYTDDACQTEAHLEIREDGTVGGAADQSPESLLQLKALKPGVIQILGVKTSRFLCQRPDGALYGSLHFDPEACSFRELLLEDGYNVYQSEAHGLPLHLPGCKSPHRDPAPRGPARFLPLPGLPPAPPEPPGILAPQPPDVGSSDPLSMVYPSQGRSPSYAS

SEQ ID NO: 1425 - protein, 471 aa, Artificial Sequence
  Fusion Protein
HGEGTFTSDLSIQLDEEAVQLFIEWLLATGPVSGAPPPSGGGGGGGSGGGGSGGGGSADKTHTCPPCPAPEAAGGPSVFLFPPKPKDTLMISRTPEVTCVVVDVSHEDPEVKFNWYVDGVEVHNAKTKPREEQYNSTYRVVSVLTVLHQDWLNGKEYKCKVSNKALPAPIEKTISKAKGQPREPQVYTLPPSRDELTKNQVSLTCLVKGFYPSDIAVEWESNGQPENNYKTTPPVLDSDGSFFLYSKLTVDKSRWQQGNVFSCSVMHEALHNHYTQKSLSLSPGGGGSGSAHPIPDSSPLLQFGGQVRQRYLYTDDACQTEAHLEIREDGTVGGAADQSPESLLQLKALKPGVIQILGVKTSRFLCQRPDGALYGSLHFDPEACSFRELLLEDGYNVYQSEAHGLPLHLCGNKSPHRDPAPRGPARFLPLPGLPPAPPEPPGILAPQPPDVGSSDPLSMVGSQGRSPSYAS

SEQ ID NO: 1426 - protein, 472 aa, Artificial Sequence
  Fusion Protein
HGEGTFTSDLSIQLDEEAVQLFIEWLLATGPVSGAPPPSGGGGGGGSGGGGSGGGGSADKTHTCPPCPAPEAAGGPSVFLFPPKPKDTLMISRTPEVTCVVVDVSHEDPEVKFNWYVDGVEVHNAKTKPREEQYNSTYRVVSVLTVLHQDWLNGKEYKCKVSNKALPAPIEKTISKAKGQPREPQVYTLPPSRDELTKNQVSLTCLVKGFYPSDIAVEWESNGQPENNYKTTPPVLDSDGSFFLYSKLTVDKSRWQQGNVFSCSVMHEALHNHYTQKSLSLSPGGGGSGSAHPIPDSSPLLQFGGQVRQRYLYTDDACQTEAHLEIREDGTVGGAADQSPESLLQLKALKPGVIQILGVKTSRFLCQRPDGALYGSLHFDPEACSFRELLLEDGYNVYQSEAHGLPLHLCGNKSPHRDPAPRGPARFLPLPGLPPAPPEPPGILAPQPPDVGSSDPLSMVYPSQGRSPSYAS

SEQ ID NO: 1427 - protein, 471 aa, Artificial Sequence
  Fusion Protein
HGEGTFTSDLSIQLDEEAVQLFIEWLLATGPVSGAPPPSGGGGGGGSGGGGSGGGGSADKTHTCPPCPAPELLGGPSVFLFPPKPKDTLMISRTPEVTCVVVDVSHEDPEVKFNWYVDGVEVHNAKTKPREEQYNNASRVVSVLTVLHQDWLNGKEYKCKVSNKALPAPIEKTISKAKGQPREPQVYTLPPSRDELTKNQVSLTCLVKGFYPSDIAVEWESNGQPENNYKTTPPVLDSDGSFFLYSKLTVDKSRWQQGNVFSCSVMHEALHNHYTQKSLSLSPGGGGSGSAHPIPDSSPLLQFGGQVRQRYLYTDDACQTEAHLEIREDGTVGGAADQSPESLLQLKALKPGVIQILGVKTSRFLCQRPDGALYGSLHFDPEACSFRELLLEDGYNVYQSEAHGLPLHLPGCKSPHRDPAPRGPARFLPLPGLPPAPPEPPGILAPQPPDVGSSDPLSMVGSQGRSPSYAS

SEQ ID NO: 1428 - protein, 472 aa, Artificial Sequence
  Fusion Protein
HGEGTFTSDLSIQLDEEAVQLFIEWLLATGPVSGAPPPSGGGGGGGSGGGGSGGGGSADKTHTCPPCPAPELLGGPSVFLFPPKPKDTLMISRTPEVTCVVVDVSHEDPEVKFNWYVDGVEVHNAKTKPREEQYNNASRVVSVLTVLHQDWLNGKEYKCKVSNKALPAPIEKTISKAKGQPREPQVYTLPPSRDELTKNQVSLTCLVKGFYPSDIAVEWESNGQPENNYKTTPPVLDSDGSFFLYSKLTVDKSRWQQGNVFSCSVMHEALHNHYTQKSLSLSPGGGGSGSAHPIPDSSPLLQFGGQVRQRYLYTDDACQTEAHLEIREDGTVGGAADQSPESLLQLKALKPGVIQILGVKTSRFLCQRPDGALYGSLHFDPEACSFRELLLEDGYNVYQSEAHGLPLHLPGCKSPHRDPAPRGPARFLPLPGLPPAPPEPPGILAPQPPDVGSSDPLSMVYPSQGRSPSYAS

SEQ ID NO: 1429 - protein, 471 aa, Artificial Sequence
  Fusion Protein
HGEGTFTSDLSIQLDEEAVQLFIEWLLATGPVSGAPPPSGGGGGGGSGGGGSGGGGSADKTHTCPPCPAPELLGGPSVFLFPPKPKDTLMISRTPEVTCVVVDVSHEDPEVKFNWYVDGVEVHNAKTKPREEQYNNASRVVSVLTVLHQDWLNGKEYKCKVSNKALPAPIEKTISKAKGQPREPQVYTLPPSRDELTKNQVSLTCLVKGFYPSDIAVEWESNGQPENNYKTTPPVLDSDGSFFLYSKLTVDKSRWQQGNVFSCSVMHEALHNHYTQKSLSLSPGGGGSGSAHPIPDSSPLLQFGGQVRQRYLYTDDACQTEAHLEIREDGTVGGAADQSPESLLQLKALKPGVIQILGVKTSRFLCQRPDGALYGSLHFDPEACSFRELLLEDGYNVYQSEAHGLPLHLCGNKSPHRDPAPRGPARFLPLPGLPPAPPEPPGILAPQPPDVGSSDPLSMVGSQGRSPSYAS

SEQ ID NO: 1430 - protein, 472 aa, Artificial Sequence
  Fusion Protein
HGEGTFTSDLSIQLDEEAVQLFIEWLLATGPVSGAPPPSGGGGGGGSGGGGSGGGGSADKTHTCPPCPAPELLGGPSVFLFPPKPKDTLMISRTPEVTCVVVDVSHEDPEVKFNWYVDGVEVHNAKTKPREEQYNNASRVVSVLTVLHQDWLNGKEYKCKVSNKALPAPIEKTISKAKGQPREPQVYTLPPSRDELTKNQVSLTCLVKGFYPSDIAVEWESNGQPENNYKTTPPVLDSDGSFFLYSKLTVDKSRWQQGNVFSCSVMHEALHNHYTQKSLSLSPGGGGSGSAHPIPDSSPLLQFGGQVRQRYLYTDDACQTEAHLEIREDGTVGGAADQSPESLLQLKALKPGVIQILGVKTSRFLCQRPDGALYGSLHFDPEACSFRELLLEDGYNVYQSEAHGLPLHLCGNKSPHRDPAPRGPARFLPLPGLPPAPPEPPGILAPQPPDVGSSDPLSMVYPSQGRSPSYAS

SEQ ID NO: 1431 - protein, 474 aa, Artificial Sequence
  Fusion Protein
HGEGTFTSDLSIQLDEEAVQLFIEWLLATGPVSGAPPPSGGGGGGGSGGGGSGGGGSAESKYGPPCPPCPAPEFEGGPSVFLFPPKPKDTLMISRTPEVTCVVVDVSQEDPEVQFNWYVDGVEVHNAKTKPREEQFNSTYRVVSVLTVLHQDWLNGKEYKCKVSNKGLPSSIEKTISKAKGQPREPQVYTLPPSQEEMTKNQVSLTCLVKGFYPSDIAVEWESNGQPENNYKTTPPVLDSDGSFFLYSRLTVDKSRWQEGNVFSCSVMHEALHNHYTQKSLSLSLGGGGSGSAHPIPDSSPLLQFGGQVRQRYLYTDDACQTEAHLEIREDGTVGGAADQSPESLLQLKALKPGVIQILGVKTSRFLCQRPDGALYGSLHFDPEACSFRELLLEDGYNVYQSEAHGLPLHLPGCKSPHRDPAPRGPARFLPLPGLPPAPPEPPGILAPQPPDVGSSDPLSMVYPSQGRSPSYAS

SEQ ID NO: 1432 - protein, 473 aa, Artificial Sequence
  Fusion Protein
HGEGTFTSDLSIQLDEEAVQLFIEWLLATGPVSGAPPPSGGGGGGGSGGGGSGGGGSAESKYGPPCPPCPAPEFEGGPSVFLFPPKPKDTLMISRTPEVTCVVVDVSQEDPEVQFNWYVDGVEVHNAKTKPREEQFNSTYRVVSVLTVLHQDWLNGKEYKCKVSNKGLPSSIEKTISKAKGQPREPQVYTLPPSQEEMTKNQVSLTCLVKGFYPSDIAVEWESNGQPENNYKTTPPVLDSDGSFFLYSRLTVDKSRWQEGNVFSCSVMHEALHNHYTQKSLSLSLGGGGSGSAHPIPDSSPLLQFGGQVRQRYLYTDDACQTEAHLEIREDGTVGGAADQSPESLLQLKALKPGVIQILGVKTSRFLCQRPDGALYGSLHFDPEACSFRELLLEDGYNVYQSEAHGLPLHLCGNKSPHRDPAPRGPARFLPLPGLPPAPPEPPGILAPQPPDVGSSDPLSMVGSQGRSPSYAS

SEQ ID NO: 1433 - protein, 474 aa, Artificial Sequence
  Fusion Protein
HGEGTFTSDLSIQLDEEAVQLFIEWLLATGPVSGAPPPSGGGGGGGSGGGGSGGGGSAESKYGPPCPPCPAPEFEGGPSVFLFPPKPKDTLMISRTPEVTCVVVDVSQEDPEVQFNWYVDGVEVHNAKTKPREEQFNSTYRVVSVLTVLHQDWLNGKEYKCKVSNKGLPSSIEKTISKAKGQPREPQVYTLPPSQEEMTKNQVSLTCLVKGFYPSDIAVEWESNGQPENNYKTTPPVLDSDGSFFLYSRLTVDKSRWQEGNVFSCSVMHEALHNHYTQKSLSLSLGGGGSGSAHPIPDSSPLLQFGGQVRQRYLYTDDACQTEAHLEIREDGTVGGAADQSPESLLQLKALKPGVIQILGVKTSRFLCQRPDGALYGSLHFDPEACSFRELLLEDGYNVYQSEAHGLPLHLCGNKSPHRDPAPRGPARFLPLPGLPPAPPEPPGILAPQPPDVGSSDPLSMVYPSQGRSPSYAS

SEQ ID NO: 1434 - protein, 471 aa, Artificial Sequence
  Fusion Protein
HGEGTFTSDLSILLDEEAVREFIEWLLATGPSSGAPPPSGGGGGGGSGGGGSGGGGSADKTHTCPPCPAPEAAGGPSVFLFPPKPKDTLMISRTPEVTCVVVDVSHEDPEVKFNWYVDGVEVHNAKTKPREEQYNSTYRVVSVLTVLHQDWLNGKEYKCKVSNKALPAPIEKTISKAKGQPREPQVYTLPPSRDELTKNQVSLTCLVKGFYPSDIAVEWESNGQPENNYKTTPPVLDSDGSFFLYSKLTVDKSRWQQGNVFSCSVMHEALHNHYTQKSLSLSPGGGGSGSAHPIPDSSPLLQFGGQVRQRYLYTDDACQTEAHLEIREDGTVGGAADQSPESLLQLKALKPGVIQILGVKTSRFLCQRPDGALYGSLHFDPEACSFRELLLEDGYNVYQSEAHGLPLHLPGCKSPHRDPAPRGPARFLPLPGLPPAPPEPPGILAPQPPDVGSSDPLSMVGSQGRSPSYAS

SEQ ID NO: 1435 - protein, 472 aa, Artificial Sequence
  Fusion Protein
HGEGTFTSDLSILLDEEAVREFIEWLLATGPSSGAPPPSGGGGGGGSGGGGSGGGGSADKTHTCPPCPAPEAAGGPSVFLFPPKPKDTLMISRTPEVTCVVVDVSHEDPEVKFNWYVDGVEVHNAKTKPREEQYNSTYRVVSVLTVLHQDWLNGKEYKCKVSNKALPAPIEKTISKAKGQPREPQVYTLPPSRDELTKNQVSLTCLVKGFYPSDIAVEWESNGQPENNYKTTPPVLDSDGSFFLYSKLTVDKSRWQQGNVFSCSVMHEALHNHYTQKSLSLSPGGGGSGSAHPIPDSSPLLQFGGQVRQRYLYTDDACQTEAHLEIREDGTVGGAADQSPESLLQLKALKPGVIQILGVKTSRFLCQRPDGALYGSLHFDPEACSFRELLLEDGYNVYQSEAHGLPLHLPGCKSPHRDPAPRGPARFLPLPGLPPAPPEPPGILAPQPPDVGSSDPLSMVYPSQGRSPSYAS

SEQ ID NO: 1436 - protein, 471 aa, Artificial Sequence
  Fusion Protein
HGEGTFTSDLSILLDEEAVREFIEWLLATGPSSGAPPPSGGGGGGGSGGGGSGGGGSADKTHTCPPCPAPEAAGGPSVFLFPPKPKDTLMISRTPEVTCVVVDVSHEDPEVKFNWYVDGVEVHNAKTKPREEQYNSTYRVVSVLTVLHQDWLNGKEYKCKVSNKALPAPIEKTISKAKGQPREPQVYTLPPSRDELTKNQVSLTCLVKGFYPSDIAVEWESNGQPENNYKTTPPVLDSDGSFFLYSKLTVDKSRWQQGNVFSCSVMHEALHNHYTQKSLSLSPGGGGSGSAHPIPDSSPLLQFGGQVRQRYLYTDDACQTEAHLEIREDGTVGGAADQSPESLLQLKALKPGVIQILGVKTSRFLCQRPDGALYGSLHFDPEACSFRELLLEDGYNVYQSEAHGLPLHLCGNKSPHRDPAPRGPARFLPLPGLPPAPPEPPGILAPQPPDVGSSDPLSMVGSQGRSPSYAS

SEQ ID NO: 1437 - protein, 472 aa, Artificial Sequence
  Fusion Protein
HGEGTFTSDLSILLDEEAVREFIEWLLATGPSSGAPPPSGGGGGGGSGGGGSGGGGSADKTHTCPPCPAPEAAGGPSVFLFPPKPKDTLMISRTPEVTCVVVDVSHEDPEVKFNWYVDGVEVHNAKTKPREEQYNSTYRVVSVLTVLHQDWLNGKEYKCKVSNKALPAPIEKTISKAKGQPREPQVYTLPPSRDELTKNQVSLTCLVKGFYPSDIAVEWESNGQPENNYKTTPPVLDSDGSFFLYSKLTVDKSRWQQGNVFSCSVMHEALHNHYTQKSLSLSPGGGGSGSAHPIPDSSPLLQFGGQVRQRYLYTDDACQTEAHLEIREDGTVGGAADQSPESLLQLKALKPGVIQILGVKTSRFLCQRPDGALYGSLHFDPEACSFRELLLEDGYNVYQSEAHGLPLHLCGNKSPHRDPAPRGPARFLPLPGLPPAPPEPPGILAPQPPDVGSSDPLSMVYPSQGRSPSYAS

SEQ ID NO: 1438 - protein, 471 aa, Artificial Sequence
  Fusion Protein
HGEGTFTSDLSILLDEEAVREFIEWLLATGPSSGAPPPSGGGGGGGSGGGGSGGGGSADKTHTCPPCPAPELLGGPSVFLFPPKPKDTLMISRTPEVTCVVVDVSHEDPEVKFNWYVDGVEVHNAKTKPREEQYNNASRVVSVLTVLHQDWLNGKEYKCKVSNKALPAPIEKTISKAKGQPREPQVYTLPPSRDELTKNQVSLTCLVKGFYPSDIAVEWESNGQPENNYKTTPPVLDSDGSFFLYSKLTVDKSRWQQGNVFSCSVMHEALHNHYTQKSLSLSPGGGGSGSAHPIPDSSPLLQFGGQVRQRYLYTDDACQTEAHLEIREDGTVGGAADQSPESLLQLKALKPGVIQILGVKTSRFLCQRPDGALYGSLHFDPEACSFRELLLEDGYNVYQSEAHGLPLHLPGCKSPHRDPAPRGPARFLPLPGLPPAPPEPPGILAPQPPDVGSSDPLSMVGSQGRSPSYAS

SEQ ID NO: 1439 - protein, 472 aa, Artificial Sequence
  Fusion Protein
HGEGTFTSDLSILLDEEAVREFIEWLLATGPSSGAPPPSGGGGGGGSGGGGSGGGGSADKTHTCPPCPAPELLGGPSVFLFPPKPKDTLMISRTPEVTCVVVDVSHEDPEVKFNWYVDGVEVHNAKTKPREEQYNNASRVVSVLTVLHQDWLNGKEYKCKVSNKALPAPIEKTISKAKGQPREPQVYTLPPSRDELTKNQVSLTCLVKGFYPSDIAVEWESNGQPENNYKTTPPVLDSDGSFFLYSKLTVDKSRWQQGNVFSCSVMHEALHNHYTQKSLSLSPGGGGSGSAHPIPDSSPLLQFGGQVRQRYLYTDDACQTEAHLEIREDGTVGGAADQSPESLLQLKALKPGVIQILGVKTSRFLCQRPDGALYGSLHFDPEACSFRELLLEDGYNVYQSEAHGLPLHLPGCKSPHRDPAPRGPARFLPLPGLPPAPPEPPGILAPQPPDVGSSDPLSMVYPSQGRSPSYAS

SEQ ID NO: 1440 - protein, 471 aa, Artificial Sequence
  Fusion Protein
HGEGTFTSDLSILLDEEAVREFIEWLLATGPSSGAPPPSGGGGGGGSGGGGSGGGGSADKTHTCPPCPAPELLGGPSVFLFPPKPKDTLMISRTPEVTCVVVDVSHEDPEVKFNWYVDGVEVHNAKTKPREEQYNNASRVVSVLTVLHQDWLNGKEYKCKVSNKALPAPIEKTISKAKGQPREPQVYTLPPSRDELTKNQVSLTCLVKGFYPSDIAVEWESNGQPENNYKTTPPVLDSDGSFFLYSKLTVDKSRWQQGNVFSCSVMHEALHNHYTQKSLSLSPGGGGSGSAHPIPDSSPLLQFGGQVRQRYLYTDDACQTEAHLEIREDGTVGGAADQSPESLLQLKALKPGVIQILGVKTSRFLCQRPDGALYGSLHFDPEACSFRELLLEDGYNVYQSEAHGLPLHLCGNKSPHRDPAPRGPARFLPLPGLPPAPPEPPGILAPQPPDVGSSDPLSMVGSQGRSPSYAS

SEQ ID NO: 1441 - protein, 472 aa, Artificial Sequence
  Fusion Protein
HGEGTFTSDLSILLDEEAVREFIEWLLATGPSSGAPPPSGGGGGGGSGGGGSGGGGSADKTHTCPPCPAPELLGGPSVFLFPPKPKDTLMISRTPEVTCVVVDVSHEDPEVKFNWYVDGVEVHNAKTKPREEQYNNASRVVSVLTVLHQDWLNGKEYKCKVSNKALPAPIEKTISKAKGQPREPQVYTLPPSRDELTKNQVSLTCLVKGFYPSDIAVEWESNGQPENNYKTTPPVLDSDGSFFLYSKLTVDKSRWQQGNVFSCSVMHEALHNHYTQKSLSLSPGGGGSGSAHPIPDSSPLLQFGGQVRQRYLYTDDACQTEAHLEIREDGTVGGAADQSPESLLQLKALKPGVIQILGVKTSRFLCQRPDGALYGSLHFDPEACSFRELLLEDGYNVYQSEAHGLPLHLCGNKSPHRDPAPRGPARFLPLPGLPPAPPEPPGILAPQPPDVGSSDPLSMVYPSQGRSPSYAS

SEQ ID NO: 1442 - protein, 474 aa, Artificial Sequence
  Fusion Protein
HGEGTFTSDLSILLDEEAVREFIEWLLATGPSSGAPPPSGGGGGGGSGGGGSGGGGSAESKYGPPCPPCPAPEFEGGPSVFLFPPKPKDTLMISRTPEVTCVVVDVSQEDPEVQFNWYVDGVEVHNAKTKPREEQFNSTYRVVSVLTVLHQDWLNGKEYKCKVSNKGLPSSIEKTISKAKGQPREPQVYTLPPSQEEMTKNQVSLTCLVKGFYPSDIAVEWESNGQPENNYKTTPPVLDSDGSFFLYSRLTVDKSRWQEGNVFSCSVMHEALHNHYTQKSLSLSLGGGGSGSAHPIPDSSPLLQFGGQVRQRYLYTDDACQTEAHLEIREDGTVGGAADQSPESLLQLKALKPGVIQILGVKTSRFLCQRPDGALYGSLHFDPEACSFRELLLEDGYNVYQSEAHGLPLHLPGCKSPHRDPAPRGPARFLPLPGLPPAPPEPPGILAPQPPDVGSSDPLSMVYPSQGRSPSYAS

SEQ ID NO: 1443 - protein, 473 aa, Artificial Sequence
  Fusion Protein
HGEGTFTSDLSILLDEEAVREFIEWLLATGPSSGAPPPSGGGGGGGSGGGGSGGGGSAESKYGPPCPPCPAPEFEGGPSVFLFPPKPKDTLMISRTPEVTCVVVDVSQEDPEVQFNWYVDGVEVHNAKTKPREEQFNSTYRVVSVLTVLHQDWLNGKEYKCKVSNKGLPSSIEKTISKAKGQPREPQVYTLPPSQEEMTKNQVSLTCLVKGFYPSDIAVEWESNGQPENNYKTTPPVLDSDGSFFLYSRLTVDKSRWQEGNVFSCSVMHEALHNHYTQKSLSLSLGGGGSGSAHPIPDSSPLLQFGGQVRQRYLYTDDACQTEAHLEIREDGTVGGAADQSPESLLQLKALKPGVIQILGVKTSRFLCQRPDGALYGSLHFDPEACSFRELLLEDGYNVYQSEAHGLPLHLCGNKSPHRDPAPRGPARFLPLPGLPPAPPEPPGILAPQPPDVGSSDPLSMVGSQGRSPSYAS

SEQ ID NO: 1444 - protein, 474 aa, Artificial Sequence
  Fusion Protein
HGEGTFTSDLSILLDEEAVREFIEWLLATGPSSGAPPPSGGGGGGGSGGGGSGGGGSAESKYGPPCPPCPAPEFEGGPSVFLFPPKPKDTLMISRTPEVTCVVVDVSQEDPEVQFNWYVDGVEVHNAKTKPREEQFNSTYRVVSVLTVLHQDWLNGKEYKCKVSNKGLPSSIEKTISKAKGQPREPQVYTLPPSQEEMTKNQVSLTCLVKGFYPSDIAVEWESNGQPENNYKTTPPVLDSDGSFFLYSRLTVDKSRWQEGNVFSCSVMHEALHNHYTQKSLSLSLGGGGSGSAHPIPDSSPLLQFGGQVRQRYLYTDDACQTEAHLEIREDGTVGGAADQSPESLLQLKALKPGVIQILGVKTSRFLCQRPDGALYGSLHFDPEACSFRELLLEDGYNVYQSEAHGLPLHLCGNKSPHRDPAPRGPARFLPLPGLPPAPPEPPGILAPQPPDVGSSDPLSMVYPSQGRSPSYAS

SEQ ID NO: 1445 - protein, 471 aa, Artificial Sequence
  Fusion Protein
HGEGTFTSDLSILLDEEAVRLFIEWLLATGPSSGAPPPSGGGGGGGSGGGGSGGGGSADKTHTCPPCPAPEAAGGPSVFLFPPKPKDTLMISRTPEVTCVVVDVSHEDPEVKFNWYVDGVEVHNAKTKPREEQYNSTYRVVSVLTVLHQDWLNGKEYKCKVSNKALPAPIEKTISKAKGQPREPQVYTLPPSRDELTKNQVSLTCLVKGFYPSDIAVEWESNGQPENNYKTTPPVLDSDGSFFLYSKLTVDKSRWQQGNVFSCSVMHEALHNHYTQKSLSLSPGGGGSGSAHPIPDSSPLLQFGGQVRQRYLYTDDACQTEAHLEIREDGTVGGAADQSPESLLQLKALKPGVIQILGVKTSRFLCQRPDGALYGSLHFDPEACSFRELLLEDGYNVYQSEAHGLPLHLPGCKSPHRDPAPRGPARFLPLPGLPPAPPEPPGILAPQPPDVGSSDPLSMVGSQGRSPSYAS

SEQ ID NO: 1446 - protein, 472 aa, Artificial Sequence
  Fusion Protein
HGEGTFTSDLSILLDEEAVRLFIEWLLATGPSSGAPPPSGGGGGGGSGGGGSGGGGSADKTHTCPPCPAPEAAGGPSVFLFPPKPKDTLMISRTPEVTCVVVDVSHEDPEVKFNWYVDGVEVHNAKTKPREEQYNSTYRVVSVLTVLHQDWLNGKEYKCKVSNKALPAPIEKTISKAKGQPREPQVYTLPPSRDELTKNQVSLTCLVKGFYPSDIAVEWESNGQPENNYKTTPPVLDSDGSFFLYSKLTVDKSRWQQGNVFSCSVMHEALHNHYTQKSLSLSPGGGGSGSAHPIPDSSPLLQFGGQVRQRYLYTDDACQTEAHLEIREDGTVGGAADQSPESLLQLKALKPGVIQILGVKTSRFLCQRPDGALYGSLHFDPEACSFRELLLEDGYNVYQSEAHGLPLHLPGCKSPHRDPAPRGPARFLPLPGLPPAPPEPPGILAPQPPDVGSSDPLSMVYPSQGRSPSYAS

SEQ ID NO: 1447 - protein, 471 aa, Artificial Sequence
  Fusion Protein
HGEGTFTSDLSILLDEEAVRLFIEWLLATGPSSGAPPPSGGGGGGGSGGGGSGGGGSADKTHTCPPCPAPEAAGGPSVFLFPPKPKDTLMISRTPEVTCVVVDVSHEDPEVKFNWYVDGVEVHNAKTKPREEQYNSTYRVVSVLTVLHQDWLNGKEYKCKVSNKALPAPIEKTISKAKGQPREPQVYTLPPSRDELTKNQVSLTCLVKGFYPSDIAVEWESNGQPENNYKTTPPVLDSDGSFFLYSKLTVDKSRWQQGNVFSCSVMHEALHNHYTQKSLSLSPGGGGSGSAHPIPDSSPLLQFGGQVRQRYLYTDDACQTEAHLEIREDGTVGGAADQSPESLLQLKALKPGVIQILGVKTSRFLCQRPDGALYGSLHFDPEACSFRELLLEDGYNVYQSEAHGLPLHLCGNKSPHRDPAPRGPARFLPLPGLPPAPPEPPGILAPQPPDVGSSDPLSMVGSQGRSPSYAS

SEQ ID NO: 1448 - protein, 472 aa, Artificial Sequence
  Fusion Protein
HGEGTFTSDLSILLDEEAVRLFIEWLLATGPSSGAPPPSGGGGGGGSGGGGSGGGGSADKTHTCPPCPAPEAAGGPSVFLFPPKPKDTLMISRTPEVTCVVVDVSHEDPEVKFNWYVDGVEVHNAKTKPREEQYNSTYRVVSVLTVLHQDWLNGKEYKCKVSNKALPAPIEKTISKAKGQPREPQVYTLPPSRDELTKNQVSLTCLVKGFYPSDIAVEWESNGQPENNYKTTPPVLDSDGSFFLYSKLTVDKSRWQQGNVFSCSVMHEALHNHYTQKSLSLSPGGGGSGSAHPIPDSSPLLQFGGQVRQRYLYTDDACQTEAHLEIREDGTVGGAADQSPESLLQLKALKPGVIQILGVKTSRFLCQRPDGALYGSLHFDPEACSFRELLLEDGYNVYQSEAHGLPLHLCGNKSPHRDPAPRGPARFLPLPGLPPAPPEPPGILAPQPPDVGSSDPLSMVYPSQGRSPSYAS

SEQ ID NO: 1449 - protein, 471 aa, Artificial Sequence
  Fusion Protein
HGEGTFTSDLSILLDEEAVRLFIEWLLATGPSSGAPPPSGGGGGGGSGGGGSGGGGSADKTHTCPPCPAPELLGGPSVFLFPPKPKDTLMISRTPEVTCVVVDVSHEDPEVKFNWYVDGVEVHNAKTKPREEQYNNASRVVSVLTVLHQDWLNGKEYKCKVSNKALPAPIEKTISKAKGQPREPQVYTLPPSRDELTKNQVSLTCLVKGFYPSDIAVEWESNGQPENNYKTTPPVLDSDGSFFLYSKLTVDKSRWQQGNVFSCSVMHEALHNHYTQKSLSLSPGGGGSGSAHPIPDSSPLLQFGGQVRQRYLYTDDACQTEAHLEIREDGTVGGAADQSPESLLQLKALKPGVIQILGVKTSRFLCQRPDGALYGSLHFDPEACSFRELLLEDGYNVYQSEAHGLPLHLPGCKSPHRDPAPRGPARFLPLPGLPPAPPEPPGILAPQPPDVGSSDPLSMVGSQGRSPSYAS

SEQ ID NO: 1450 - protein, 472 aa, Artificial Sequence
  Fusion Protein
HGEGTFTSDLSILLDEEAVRLFIEWLLATGPSSGAPPPSGGGGGGGSGGGGSGGGGSADKTHTCPPCPAPELLGGPSVFLFPPKPKDTLMISRTPEVTCVVVDVSHEDPEVKFNWYVDGVEVHNAKTKPREEQYNNASRVVSVLTVLHQDWLNGKEYKCKVSNKALPAPIEKTISKAKGQPREPQVYTLPPSRDELTKNQVSLTCLVKGFYPSDIAVEWESNGQPENNYKTTPPVLDSDGSFFLYSKLTVDKSRWQQGNVFSCSVMHEALHNHYTQKSLSLSPGGGGSGSAHPIPDSSPLLQFGGQVRQRYLYTDDACQTEAHLEIREDGTVGGAADQSPESLLQLKALKPGVIQILGVKTSRFLCQRPDGALYGSLHFDPEACSFRELLLEDGYNVYQSEAHGLPLHLPGCKSPHRDPAPRGPARFLPLPGLPPAPPEPPGILAPQPPDVGSSDPLSMVYPSQGRSPSYAS

SEQ ID NO: 1451 - protein, 471 aa, Artificial Sequence
  Fusion Protein
HGEGTFTSDLSILLDEEAVRLFIEWLLATGPSSGAPPPSGGGGGGGSGGGGSGGGGSADKTHTCPPCPAPELLGGPSVFLFPPKPKDTLMISRTPEVTCVVVDVSHEDPEVKFNWYVDGVEVHNAKTKPREEQYNNASRVVSVLTVLHQDWLNGKEYKCKVSNKALPAPIEKTISKAKGQPREPQVYTLPPSRDELTKNQVSLTCLVKGFYPSDIAVEWESNGQPENNYKTTPPVLDSDGSFFLYSKLTVDKSRWQQGNVFSCSVMHEALHNHYTQKSLSLSPGGGGSGSAHPIPDSSPLLQFGGQVRQRYLYTDDACQTEAHLEIREDGTVGGAADQSPESLLQLKALKPGVIQILGVKTSRFLCQRPDGALYGSLHFDPEACSFRELLLEDGYNVYQSEAHGLPLHLCGNKSPHRDPAPRGPARFLPLPGLPPAPPEPPGILAPQPPDVGSSDPLSMVGSQGRSPSYAS

SEQ ID NO: 1452 - protein, 472 aa, Artificial Sequence
  Fusion Protein
HGEGTFTSDLSILLDEEAVRLFIEWLLATGPSSGAPPPSGGGGGGGSGGGGSGGGGSADKTHTCPPCPAPELLGGPSVFLFPPKPKDTLMISRTPEVTCVVVDVSHEDPEVKFNWYVDGVEVHNAKTKPREEQYNNASRVVSVLTVLHQDWLNGKEYKCKVSNKALPAPIEKTISKAKGQPREPQVYTLPPSRDELTKNQVSLTCLVKGFYPSDIAVEWESNGQPENNYKTTPPVLDSDGSFFLYSKLTVDKSRWQQGNVFSCSVMHEALHNHYTQKSLSLSPGGGGSGSAHPIPDSSPLLQFGGQVRQRYLYTDDACQTEAHLEIREDGTVGGAADQSPESLLQLKALKPGVIQILGVKTSRFLCQRPDGALYGSLHFDPEACSFRELLLEDGYNVYQSEAHGLPLHLCGNKSPHRDPAPRGPARFLPLPGLPPAPPEPPGILAPQPPDVGSSDPLSMVYPSQGRSPSYAS

SEQ ID NO: 1453 - protein, 474 aa, Artificial Sequence
  Fusion Protein
HGEGTFTSDLSILLDEEAVRLFIEWLLATGPSSGAPPPSGGGGGGGSGGGGSGGGGSAESKYGPPCPPCPAPEFEGGPSVFLFPPKPKDTLMISRTPEVTCVVVDVSQEDPEVQFNWYVDGVEVHNAKTKPREEQFNSTYRVVSVLTVLHQDWLNGKEYKCKVSNKGLPSSIEKTISKAKGQPREPQVYTLPPSQEEMTKNQVSLTCLVKGFYPSDIAVEWESNGQPENNYKTTPPVLDSDGSFFLYSRLTVDKSRWQEGNVFSCSVMHEALHNHYTQKSLSLSLGGGGSGSAHPIPDSSPLLQFGGQVRQRYLYTDDACQTEAHLEIREDGTVGGAADQSPESLLQLKALKPGVIQILGVKTSRFLCQRPDGALYGSLHFDPEACSFRELLLEDGYNVYQSEAHGLPLHLPGCKSPHRDPAPRGPARFLPLPGLPPAPPEPPGILAPQPPDVGSSDPLSMVYPSQGRSPSYAS

SEQ ID NO: 1454 - protein, 473 aa, Artificial Sequence
  Fusion Protein
HGEGTFTSDLSILLDEEAVRLFIEWLLATGPSSGAPPPSGGGGGGGSGGGGSGGGGSAESKYGPPCPPCPAPEFEGGPSVFLFPPKPKDTLMISRTPEVTCVVVDVSQEDPEVQFNWYVDGVEVHNAKTKPREEQFNSTYRVVSVLTVLHQDWLNGKEYKCKVSNKGLPSSIEKTISKAKGQPREPQVYTLPPSQEEMTKNQVSLTCLVKGFYPSDIAVEWESNGQPENNYKTTPPVLDSDGSFFLYSRLTVDKSRWQEGNVFSCSVMHEALHNHYTQKSLSLSLGGGGSGSAHPIPDSSPLLQFGGQVRQRYLYTDDACQTEAHLEIREDGTVGGAADQSPESLLQLKALKPGVIQILGVKTSRFLCQRPDGALYGSLHFDPEACSFRELLLEDGYNVYQSEAHGLPLHLCGNKSPHRDPAPRGPARFLPLPGLPPAPPEPPGILAPQPPDVGSSDPLSMVGSQGRSPSYAS

SEQ ID NO: 1455 - protein, 474 aa, Artificial Sequence
  Fusion Protein
HGEGTFTSDLSILLDEEAVRLFIEWLLATGPSSGAPPPSGGGGGGGSGGGGSGGGGSAESKYGPPCPPCPAPEFEGGPSVFLFPPKPKDTLMISRTPEVTCVVVDVSQEDPEVQFNWYVDGVEVHNAKTKPREEQFNSTYRVVSVLTVLHQDWLNGKEYKCKVSNKGLPSSIEKTISKAKGQPREPQVYTLPPSQEEMTKNQVSLTCLVKGFYPSDIAVEWESNGQPENNYKTTPPVLDSDGSFFLYSRLTVDKSRWQEGNVFSCSVMHEALHNHYTQKSLSLSLGGGGSGSAHPIPDSSPLLQFGGQVRQRYLYTDDACQTEAHLEIREDGTVGGAADQSPESLLQLKALKPGVIQILGVKTSRFLCQRPDGALYGSLHFDPEACSFRELLLEDGYNVYQSEAHGLPLHLCGNKSPHRDPAPRGPARFLPLPGLPPAPPEPPGILAPQPPDVGSSDPLSMVYPSQGRSPSYAS

SEQ ID NO: 1456 - protein, 471 aa, Artificial Sequence
  Fusion Protein
HGEGTFTSDLSILLDEEAVQLFIEWLLATGPSSGAPPPSGGGGGGGSGGGGSGGGGSADKTHTCPPCPAPEAAGGPSVFLFPPKPKDTLMISRTPEVTCVVVDVSHEDPEVKFNWYVDGVEVHNAKTKPREEQYNSTYRVVSVLTVLHQDWLNGKEYKCKVSNKALPAPIEKTISKAKGQPREPQVYTLPPSRDELTKNQVSLTCLVKGFYPSDIAVEWESNGQPENNYKTTPPVLDSDGSFFLYSKLTVDKSRWQQGNVFSCSVMHEALHNHYTQKSLSLSPGGGGSGSAHPIPDSSPLLQFGGQVRQRYLYTDDACQTEAHLEIREDGTVGGAADQSPESLLQLKALKPGVIQILGVKTSRFLCQRPDGALYGSLHFDPEACSFRELLLEDGYNVYQSEAHGLPLHLPGCKSPHRDPAPRGPARFLPLPGLPPAPPEPPGILAPQPPDVGSSDPLSMVGSQGRSPSYAS

SEQ ID NO: 1457 - protein, 472 aa, Artificial Sequence
  Fusion Protein
HGEGTFTSDLSILLDEEAVQLFIEWLLATGPSSGAPPPSGGGGGGGSGGGGSGGGGSADKTHTCPPCPAPEAAGGPSVFLFPPKPKDTLMISRTPEVTCVVVDVSHEDPEVKFNWYVDGVEVHNAKTKPREEQYNSTYRVVSVLTVLHQDWLNGKEYKCKVSNKALPAPIEKTISKAKGQPREPQVYTLPPSRDELTKNQVSLTCLVKGFYPSDIAVEWESNGQPENNYKTTPPVLDSDGSFFLYSKLTVDKSRWQQGNVFSCSVMHEALHNHYTQKSLSLSPGGGGSGSAHPIPDSSPLLQFGGQVRQRYLYTDDACQTEAHLEIREDGTVGGAADQSPESLLQLKALKPGVIQILGVKTSRFLCQRPDGALYGSLHFDPEACSFRELLLEDGYNVYQSEAHGLPLHLPGCKSPHRDPAPRGPARFLPLPGLPPAPPEPPGILAPQPPDVGSSDPLSMVYPSQGRSPSYAS

SEQ ID NO: 1458 - protein, 471 aa, Artificial Sequence
  Fusion Protein
HGEGTFTSDLSILLDEEAVQLFIEWLLATGPSSGAPPPSGGGGGGGSGGGGSGGGGSADKTHTCPPCPAPEAAGGPSVFLFPPKPKDTLMISRTPEVTCVVVDVSHEDPEVKFNWYVDGVEVHNAKTKPREEQYNSTYRVVSVLTVLHQDWLNGKEYKCKVSNKALPAPIEKTISKAKGQPREPQVYTLPPSRDELTKNQVSLTCLVKGFYPSDIAVEWESNGQPENNYKTTPPVLDSDGSFFLYSKLTVDKSRWQQGNVFSCSVMHEALHNHYTQKSLSLSPGGGGSGSAHPIPDSSPLLQFGGQVRQRYLYTDDACQTEAHLEIREDGTVGGAADQSPESLLQLKALKPGVIQILGVKTSRFLCQRPDGALYGSLHFDPEACSFRELLLEDGYNVYQSEAHGLPLHLCGNKSPHRDPAPRGPARFLPLPGLPPAPPEPPGILAPQPPDVGSSDPLSMVGSQGRSPSYAS

SEQ ID NO: 1459 - protein, 472 aa, Artificial Sequence
  Fusion Protein
HGEGTFTSDLSILLDEEAVQLFIEWLLATGPSSGAPPPSGGGGGGGSGGGGSGGGGSADKTHTCPPCPAPEAAGGPSVFLFPPKPKDTLMISRTPEVTCVVVDVSHEDPEVKFNWYVDGVEVHNAKTKPREEQYNSTYRVVSVLTVLHQDWLNGKEYKCKVSNKALPAPIEKTISKAKGQPREPQVYTLPPSRDELTKNQVSLTCLVKGFYPSDIAVEWESNGQPENNYKTTPPVLDSDGSFFLYSKLTVDKSRWQQGNVFSCSVMHEALHNHYTQKSLSLSPGGGGSGSAHPIPDSSPLLQFGGQVRQRYLYTDDACQTEAHLEIREDGTVGGAADQSPESLLQLKALKPGVIQILGVKTSRFLCQRPDGALYGSLHFDPEACSFRELLLEDGYNVYQSEAHGLPLHLCGNKSPHRDPAPRGPARFLPLPGLPPAPPEPPGILAPQPPDVGSSDPLSMVYPSQGRSPSYAS

SEQ ID NO: 1460 - protein, 471 aa, Artificial Sequence
  Fusion Protein
HGEGTFTSDLSILLDEEAVQLFIEWLLATGPSSGAPPPSGGGGGGGSGGGGSGGGGSADKTHTCPPCPAPELLGGPSVFLFPPKPKDTLMISRTPEVTCVVVDVSHEDPEVKFNWYVDGVEVHNAKTKPREEQYNNASRVVSVLTVLHQDWLNGKEYKCKVSNKALPAPIEKTISKAKGQPREPQVYTLPPSRDELTKNQVSLTCLVKGFYPSDIAVEWESNGQPENNYKTTPPVLDSDGSFFLYSKLTVDKSRWQQGNVFSCSVMHEALHNHYTQKSLSLSPGGGGSGSAHPIPDSSPLLQFGGQVRQRYLYTDDACQTEAHLEIREDGTVGGAADQSPESLLQLKALKPGVIQILGVKTSRFLCQRPDGALYGSLHFDPEACSFRELLLEDGYNVYQSEAHGLPLHLPGCKSPHRDPAPRGPARFLPLPGLPPAPPEPPGILAPQPPDVGSSDPLSMVGSQGRSPSYAS

SEQ ID NO: 1461 - protein, 472 aa, Artificial Sequence
  Fusion Protein
HGEGTFTSDLSILLDEEAVQLFIEWLLATGPSSGAPPPSGGGGGGGSGGGGSGGGGSADKTHTCPPCPAPELLGGPSVFLFPPKPKDTLMISRTPEVTCVVVDVSHEDPEVKFNWYVDGVEVHNAKTKPREEQYNNASRVVSVLTVLHQDWLNGKEYKCKVSNKALPAPIEKTISKAKGQPREPQVYTLPPSRDELTKNQVSLTCLVKGFYPSDIAVEWESNGQPENNYKTTPPVLDSDGSFFLYSKLTVDKSRWQQGNVFSCSVMHEALHNHYTQKSLSLSPGGGGSGSAHPIPDSSPLLQFGGQVRQRYLYTDDACQTEAHLEIREDGTVGGAADQSPESLLQLKALKPGVIQILGVKTSRFLCQRPDGALYGSLHFDPEACSFRELLLEDGYNVYQSEAHGLPLHLPGCKSPHRDPAPRGPARFLPLPGLPPAPPEPPGILAPQPPDVGSSDPLSMVYPSQGRSPSYAS

SEQ ID NO: 1462 - protein, 471 aa, Artificial Sequence
  Fusion Protein
HGEGTFTSDLSILLDEEAVQLFIEWLLATGPSSGAPPPSGGGGGGGSGGGGSGGGGSADKTHTCPPCPAPELLGGPSVFLFPPKPKDTLMISRTPEVTCVVVDVSHEDPEVKFNWYVDGVEVHNAKTKPREEQYNNASRVVSVLTVLHQDWLNGKEYKCKVSNKALPAPIEKTISKAKGQPREPQVYTLPPSRDELTKNQVSLTCLVKGFYPSDIAVEWESNGQPENNYKTTPPVLDSDGSFFLYSKLTVDKSRWQQGNVFSCSVMHEALHNHYTQKSLSLSPGGGGSGSAHPIPDSSPLLQFGGQVRQRYLYTDDACQTEAHLEIREDGTVGGAADQSPESLLQLKALKPGVIQILGVKTSRFLCQRPDGALYGSLHFDPEACSFRELLLEDGYNVYQSEAHGLPLHLCGNKSPHRDPAPRGPARFLPLPGLPPAPPEPPGILAPQPPDVGSSDPLSMVGSQGRSPSYAS

SEQ ID NO: 1463 - protein, 472 aa, Artificial Sequence
  Fusion Protein
HGEGTFTSDLSILLDEEAVQLFIEWLLATGPSSGAPPPSGGGGGGGSGGGGSGGGGSADKTHTCPPCPAPELLGGPSVFLFPPKPKDTLMISRTPEVTCVVVDVSHEDPEVKFNWYVDGVEVHNAKTKPREEQYNNASRVVSVLTVLHQDWLNGKEYKCKVSNKALPAPIEKTISKAKGQPREPQVYTLPPSRDELTKNQVSLTCLVKGFYPSDIAVEWESNGQPENNYKTTPPVLDSDGSFFLYSKLTVDKSRWQQGNVFSCSVMHEALHNHYTQKSLSLSPGGGGSGSAHPIPDSSPLLQFGGQVRQRYLYTDDACQTEAHLEIREDGTVGGAADQSPESLLQLKALKPGVIQILGVKTSRFLCQRPDGALYGSLHFDPEACSFRELLLEDGYNVYQSEAHGLPLHLCGNKSPHRDPAPRGPARFLPLPGLPPAPPEPPGILAPQPPDVGSSDPLSMVYPSQGRSPSYAS

SEQ ID NO: 1464 - protein, 474 aa, Artificial Sequence
  Fusion Protein
HGEGTFTSDLSILLDEEAVQLFIEWLLATGPSSGAPPPSGGGGGGGSGGGGSGGGGSAESKYGPPCPPCPAPEFEGGPSVFLFPPKPKDTLMISRTPEVTCVVVDVSQEDPEVQFNWYVDGVEVHNAKTKPREEQFNSTYRVVSVLTVLHQDWLNGKEYKCKVSNKGLPSSIEKTISKAKGQPREPQVYTLPPSQEEMTKNQVSLTCLVKGFYPSDIAVEWESNGQPENNYKTTPPVLDSDGSFFLYSRLTVDKSRWQEGNVFSCSVMHEALHNHYTQKSLSLSLGGGGSGSAHPIPDSSPLLQFGGQVRQRYLYTDDACQTEAHLEIREDGTVGGAADQSPESLLQLKALKPGVIQILGVKTSRFLCQRPDGALYGSLHFDPEACSFRELLLEDGYNVYQSEAHGLPLHLPGCKSPHRDPAPRGPARFLPLPGLPPAPPEPPGILAPQPPDVGSSDPLSMVYPSQGRSPSYAS

SEQ ID NO: 1465 - protein, 473 aa, Artificial Sequence
  Fusion Protein
HGEGTFTSDLSILLDEEAVQLFIEWLLATGPSSGAPPPSGGGGGGGSGGGGSGGGGSAESKYGPPCPPCPAPEFEGGPSVFLFPPKPKDTLMISRTPEVTCVVVDVSQEDPEVQFNWYVDGVEVHNAKTKPREEQFNSTYRVVSVLTVLHQDWLNGKEYKCKVSNKGLPSSIEKTISKAKGQPREPQVYTLPPSQEEMTKNQVSLTCLVKGFYPSDIAVEWESNGQPENNYKTTPPVLDSDGSFFLYSRLTVDKSRWQEGNVFSCSVMHEALHNHYTQKSLSLSLGGGGSGSAHPIPDSSPLLQFGGQVRQRYLYTDDACQTEAHLEIREDGTVGGAADQSPESLLQLKALKPGVIQILGVKTSRFLCQRPDGALYGSLHFDPEACSFRELLLEDGYNVYQSEAHGLPLHLCGNKSPHRDPAPRGPARFLPLPGLPPAPPEPPGILAPQPPDVGSSDPLSMVGSQGRSPSYAS

SEQ ID NO: 1466 - protein, 474 aa, Artificial Sequence
  Fusion Protein
HGEGTFTSDLSILLDEEAVQLFIEWLLATGPSSGAPPPSGGGGGGGSGGGGSGGGGSAESKYGPPCPPCPAPEFEGGPSVFLFPPKPKDTLMISRTPEVTCVVVDVSQEDPEVQFNWYVDGVEVHNAKTKPREEQFNSTYRVVSVLTVLHQDWLNGKEYKCKVSNKGLPSSIEKTISKAKGQPREPQVYTLPPSQEEMTKNQVSLTCLVKGFYPSDIAVEWESNGQPENNYKTTPPVLDSDGSFFLYSRLTVDKSRWQEGNVFSCSVMHEALHNHYTQKSLSLSLGGGGSGSAHPIPDSSPLLQFGGQVRQRYLYTDDACQTEAHLEIREDGTVGGAADQSPESLLQLKALKPGVIQILGVKTSRFLCQRPDGALYGSLHFDPEACSFRELLLEDGYNVYQSEAHGLPLHLCGNKSPHRDPAPRGPARFLPLPGLPPAPPEPPGILAPQPPDVGSSDPLSMVYPSQGRSPSYAS

SEQ ID NO: 1467 - protein, 471 aa, Artificial Sequence
  Fusion Protein
HGEGTFTSDLSILLDEEAVQLFIEWLLATGPVSGAPPPSGGGGGGGSGGGGSGGGGSADKTHTCPPCPAPEAAGGPSVFLFPPKPKDTLMISRTPEVTCVVVDVSHEDPEVKFNWYVDGVEVHNAKTKPREEQYNSTYRVVSVLTVLHQDWLNGKEYKCKVSNKALPAPIEKTISKAKGQPREPQVYTLPPSRDELTKNQVSLTCLVKGFYPSDIAVEWESNGQPENNYKTTPPVLDSDGSFFLYSKLTVDKSRWQQGNVFSCSVMHEALHNHYTQKSLSLSPGGGGSGSAHPIPDSSPLLQFGGQVRQRYLYTDDACQTEAHLEIREDGTVGGAADQSPESLLQLKALKPGVIQILGVKTSRFLCQRPDGALYGSLHFDPEACSFRELLLEDGYNVYQSEAHGLPLHLPGCKSPHRDPAPRGPARFLPLPGLPPAPPEPPGILAPQPPDVGSSDPLSMVGSQGRSPSYAS

SEQ ID NO: 1468 - protein, 472 aa, Artificial Sequence
  Fusion Protein
HGEGTFTSDLSILLDEEAVQLFIEWLLATGPVSGAPPPSGGGGGGGSGGGGSGGGGSADKTHTCPPCPAPEAAGGPSVFLFPPKPKDTLMISRTPEVTCVVVDVSHEDPEVKFNWYVDGVEVHNAKTKPREEQYNSTYRVVSVLTVLHQDWLNGKEYKCKVSNKALPAPIEKTISKAKGQPREPQVYTLPPSRDELTKNQVSLTCLVKGFYPSDIAVEWESNGQPENNYKTTPPVLDSDGSFFLYSKLTVDKSRWQQGNVFSCSVMHEALHNHYTQKSLSLSPGGGGSGSAHPIPDSSPLLQFGGQVRQRYLYTDDACQTEAHLEIREDGTVGGAADQSPESLLQLKALKPGVIQILGVKTSRFLCQRPDGALYGSLHFDPEACSFRELLLEDGYNVYQSEAHGLPLHLPGCKSPHRDPAPRGPARFLPLPGLPPAPPEPPGILAPQPPDVGSSDPLSMVYPSQGRSPSYAS

SEQ ID NO: 1469 - protein, 471 aa, Artificial Sequence
  Fusion Protein
HGEGTFTSDLSILLDEEAVQLFIEWLLATGPVSGAPPPSGGGGGGGSGGGGSGGGGSADKTHTCPPCPAPEAAGGPSVFLFPPKPKDTLMISRTPEVTCVVVDVSHEDPEVKFNWYVDGVEVHNAKTKPREEQYNSTYRVVSVLTVLHQDWLNGKEYKCKVSNKALPAPIEKTISKAKGQPREPQVYTLPPSRDELTKNQVSLTCLVKGFYPSDIAVEWESNGQPENNYKTTPPVLDSDGSFFLYSKLTVDKSRWQQGNVFSCSVMHEALHNHYTQKSLSLSPGGGGSGSAHPIPDSSPLLQFGGQVRQRYLYTDDACQTEAHLEIREDGTVGGAADQSPESLLQLKALKPGVIQILGVKTSRFLCQRPDGALYGSLHFDPEACSFRELLLEDGYNVYQSEAHGLPLHLCGNKSPHRDPAPRGPARFLPLPGLPPAPPEPPGILAPQPPDVGSSDPLSMVGSQGRSPSYAS

SEQ ID NO: 1470 - protein, 472 aa, Artificial Sequence
  Fusion Protein
HGEGTFTSDLSILLDEEAVQLFIEWLLATGPVSGAPPPSGGGGGGGSGGGGSGGGGSADKTHTCPPCPAPEAAGGPSVFLFPPKPKDTLMISRTPEVTCVVVDVSHEDPEVKFNWYVDGVEVHNAKTKPREEQYNSTYRVVSVLTVLHQDWLNGKEYKCKVSNKALPAPIEKTISKAKGQPREPQVYTLPPSRDELTKNQVSLTCLVKGFYPSDIAVEWESNGQPENNYKTTPPVLDSDGSFFLYSKLTVDKSRWQQGNVFSCSVMHEALHNHYTQKSLSLSPGGGGSGSAHPIPDSSPLLQFGGQVRQRYLYTDDACQTEAHLEIREDGTVGGAADQSPESLLQLKALKPGVIQILGVKTSRFLCQRPDGALYGSLHFDPEACSFRELLLEDGYNVYQSEAHGLPLHLCGNKSPHRDPAPRGPARFLPLPGLPPAPPEPPGILAPQPPDVGSSDPLSMVYPSQGRSPSYAS

SEQ ID NO: 1471 - protein, 471 aa, Artificial Sequence
  Fusion Protein
HGEGTFTSDLSILLDEEAVQLFIEWLLATGPVSGAPPPSGGGGGGGSGGGGSGGGGSADKTHTCPPCPAPELLGGPSVFLFPPKPKDTLMISRTPEVTCVVVDVSHEDPEVKFNWYVDGVEVHNAKTKPREEQYNNASRVVSVLTVLHQDWLNGKEYKCKVSNKALPAPIEKTISKAKGQPREPQVYTLPPSRDELTKNQVSLTCLVKGFYPSDIAVEWESNGQPENNYKTTPPVLDSDGSFFLYSKLTVDKSRWQQGNVFSCSVMHEALHNHYTQKSLSLSPGGGGSGSAHPIPDSSPLLQFGGQVRQRYLYTDDACQTEAHLEIREDGTVGGAADQSPESLLQLKALKPGVIQILGVKTSRFLCQRPDGALYGSLHFDPEACSFRELLLEDGYNVYQSEAHGLPLHLPGCKSPHRDPAPRGPARFLPLPGLPPAPPEPPGILAPQPPDVGSSDPLSMVGSQGRSPSYAS

SEQ ID NO: 1472 - protein, 472 aa, Artificial Sequence
  Fusion Protein
HGEGTFTSDLSILLDEEAVQLFIEWLLATGPVSGAPPPSGGGGGGGSGGGGSGGGGSADKTHTCPPCPAPELLGGPSVFLFPPKPKDTLMISRTPEVTCVVVDVSHEDPEVKFNWYVDGVEVHNAKTKPREEQYNNASRVVSVLTVLHQDWLNGKEYKCKVSNKALPAPIEKTISKAKGQPREPQVYTLPPSRDELTKNQVSLTCLVKGFYPSDIAVEWESNGQPENNYKTTPPVLDSDGSFFLYSKLTVDKSRWQQGNVFSCSVMHEALHNHYTQKSLSLSPGGGGSGSAHPIPDSSPLLQFGGQVRQRYLYTDDACQTEAHLEIREDGTVGGAADQSPESLLQLKALKPGVIQILGVKTSRFLCQRPDGALYGSLHFDPEACSFRELLLEDGYNVYQSEAHGLPLHLPGCKSPHRDPAPRGPARFLPLPGLPPAPPEPPGILAPQPPDVGSSDPLSMVYPSQGRSPSYAS

SEQ ID NO: 1473 - protein, 471 aa, Artificial Sequence
  Fusion Protein
HGEGTFTSDLSILLDEEAVQLFIEWLLATGPVSGAPPPSGGGGGGGSGGGGSGGGGSADKTHTCPPCPAPELLGGPSVFLFPPKPKDTLMISRTPEVTCVVVDVSHEDPEVKFNWYVDGVEVHNAKTKPREEQYNNASRVVSVLTVLHQDWLNGKEYKCKVSNKALPAPIEKTISKAKGQPREPQVYTLPPSRDELTKNQVSLTCLVKGFYPSDIAVEWESNGQPENNYKTTPPVLDSDGSFFLYSKLTVDKSRWQQGNVFSCSVMHEALHNHYTQKSLSLSPGGGGSGSAHPIPDSSPLLQFGGQVRQRYLYTDDACQTEAHLEIREDGTVGGAADQSPESLLQLKALKPGVIQILGVKTSRFLCQRPDGALYGSLHFDPEACSFRELLLEDGYNVYQSEAHGLPLHLCGNKSPHRDPAPRGPARFLPLPGLPPAPPEPPGILAPQPPDVGSSDPLSMVGSQGRSPSYAS

SEQ ID NO: 1474 - protein, 472 aa, Artificial Sequence
  Fusion Protein
HGEGTFTSDLSILLDEEAVQLFIEWLLATGPVSGAPPPSGGGGGGGSGGGGSGGGGSADKTHTCPPCPAPELLGGPSVFLFPPKPKDTLMISRTPEVTCVVVDVSHEDPEVKFNWYVDGVEVHNAKTKPREEQYNNASRVVSVLTVLHQDWLNGKEYKCKVSNKALPAPIEKTISKAKGQPREPQVYTLPPSRDELTKNQVSLTCLVKGFYPSDIAVEWESNGQPENNYKTTPPVLDSDGSFFLYSKLTVDKSRWQQGNVFSCSVMHEALHNHYTQKSLSLSPGGGGSGSAHPIPDSSPLLQFGGQVRQRYLYTDDACQTEAHLEIREDGTVGGAADQSPESLLQLKALKPGVIQILGVKTSRFLCQRPDGALYGSLHFDPEACSFRELLLEDGYNVYQSEAHGLPLHLCGNKSPHRDPAPRGPARFLPLPGLPPAPPEPPGILAPQPPDVGSSDPLSMVYPSQGRSPSYAS

SEQ ID NO: 1475 - protein, 474 aa, Artificial Sequence
  Fusion Protein
HGEGTFTSDLSILLDEEAVQLFIEWLLATGPVSGAPPPSGGGGGGGSGGGGSGGGGSAESKYGPPCPPCPAPEFEGGPSVFLFPPKPKDTLMISRTPEVTCVVVDVSQEDPEVQFNWYVDGVEVHNAKTKPREEQFNSTYRVVSVLTVLHQDWLNGKEYKCKVSNKGLPSSIEKTISKAKGQPREPQVYTLPPSQEEMTKNQVSLTCLVKGFYPSDIAVEWESNGQPENNYKTTPPVLDSDGSFFLYSRLTVDKSRWQEGNVFSCSVMHEALHNHYTQKSLSLSLGGGGSGSAHPIPDSSPLLQFGGQVRQRYLYTDDACQTEAHLEIREDGTVGGAADQSPESLLQLKALKPGVIQILGVKTSRFLCQRPDGALYGSLHFDPEACSFRELLLEDGYNVYQSEAHGLPLHLPGCKSPHRDPAPRGPARFLPLPGLPPAPPEPPGILAPQPPDVGSSDPLSMVYPSQGRSPSYAS

SEQ ID NO: 1476 - protein, 473 aa, Artificial Sequence
  Fusion Protein
HGEGTFTSDLSILLDEEAVQLFIEWLLATGPVSGAPPPSGGGGGGGSGGGGSGGGGSAESKYGPPCPPCPAPEFEGGPSVFLFPPKPKDTLMISRTPEVTCVVVDVSQEDPEVQFNWYVDGVEVHNAKTKPREEQFNSTYRVVSVLTVLHQDWLNGKEYKCKVSNKGLPSSIEKTISKAKGQPREPQVYTLPPSQEEMTKNQVSLTCLVKGFYPSDIAVEWESNGQPENNYKTTPPVLDSDGSFFLYSRLTVDKSRWQEGNVFSCSVMHEALHNHYTQKSLSLSLGGGGSGSAHPIPDSSPLLQFGGQVRQRYLYTDDACQTEAHLEIREDGTVGGAADQSPESLLQLKALKPGVIQILGVKTSRFLCQRPDGALYGSLHFDPEACSFRELLLEDGYNVYQSEAHGLPLHLCGNKSPHRDPAPRGPARFLPLPGLPPAPPEPPGILAPQPPDVGSSDPLSMVGSQGRSPSYAS

SEQ ID NO: 1477 - protein, 474 aa, Artificial Sequence
  Fusion Protein
HGEGTFTSDLSILLDEEAVQLFIEWLLATGPVSGAPPPSGGGGGGGSGGGGSGGGGSAESKYGPPCPPCPAPEFEGGPSVFLFPPKPKDTLMISRTPEVTCVVVDVSQEDPEVQFNWYVDGVEVHNAKTKPREEQFNSTYRVVSVLTVLHQDWLNGKEYKCKVSNKGLPSSIEKTISKAKGQPREPQVYTLPPSQEEMTKNQVSLTCLVKGFYPSDIAVEWESNGQPENNYKTTPPVLDSDGSFFLYSRLTVDKSRWQEGNVFSCSVMHEALHNHYTQKSLSLSLGGGGSGSAHPIPDSSPLLQFGGQVRQRYLYTDDACQTEAHLEIREDGTVGGAADQSPESLLQLKALKPGVIQILGVKTSRFLCQRPDGALYGSLHFDPEACSFRELLLEDGYNVYQSEAHGLPLHLCGNKSPHRDPAPRGPARFLPLPGLPPAPPEPPGILAPQPPDVGSSDPLSMVYPSQGRSPSYAS

SEQ ID NO: 1478 - protein, 471 aa, Artificial Sequence
  Fusion Protein
HGEGTFTSDLSIQLEEEAVQEFIEWLLATGPVSGAPPPSGGGGGGGSGGGGSGGGGSADKTHTCPPCPAPEAAGGPSVFLFPPKPKDTLMISRTPEVTCVVVDVSHEDPEVKFNWYVDGVEVHNAKTKPREEQYNSTYRVVSVLTVLHQDWLNGKEYKCKVSNKALPAPIEKTISKAKGQPREPQVYTLPPSRDELTKNQVSLTCLVKGFYPSDIAVEWESNGQPENNYKTTPPVLDSDGSFFLYSKLTVDKSRWQQGNVFSCSVMHEALHNHYTQKSLSLSPGGGGSGSAHPIPDSSPLLQFGGQVRQRYLYTDDACQTEAHLEIREDGTVGGAADQSPESLLQLKALKPGVIQILGVKTSRFLCQRPDGALYGSLHFDPEACSFRELLLEDGYNVYQSEAHGLPLHLPGCKSPHRDPAPRGPARFLPLPGLPPAPPEPPGILAPQPPDVGSSDPLSMVGSQGRSPSYAS

SEQ ID NO: 1479 - protein, 472 aa, Artificial Sequence
  Fusion Protein
HGEGTFTSDLSIQLEEEAVQEFIEWLLATGPVSGAPPPSGGGGGGGSGGGGSGGGGSADKTHTCPPCPAPEAAGGPSVFLFPPKPKDTLMISRTPEVTCVVVDVSHEDPEVKFNWYVDGVEVHNAKTKPREEQYNSTYRVVSVLTVLHQDWLNGKEYKCKVSNKALPAPIEKTISKAKGQPREPQVYTLPPSRDELTKNQVSLTCLVKGFYPSDIAVEWESNGQPENNYKTTPPVLDSDGSFFLYSKLTVDKSRWQQGNVFSCSVMHEALHNHYTQKSLSLSPGGGGSGSAHPIPDSSPLLQFGGQVRQRYLYTDDACQTEAHLEIREDGTVGGAADQSPESLLQLKALKPGVIQILGVKTSRFLCQRPDGALYGSLHFDPEACSFRELLLEDGYNVYQSEAHGLPLHLPGCKSPHRDPAPRGPARFLPLPGLPPAPPEPPGILAPQPPDVGSSDPLSMVYPSQGRSPSYAS

SEQ ID NO: 1480 - protein, 471 aa, Artificial Sequence
  Fusion Protein
HGEGTFTSDLSIQLEEEAVQEFIEWLLATGPVSGAPPPSGGGGGGGSGGGGSGGGGSADKTHTCPPCPAPEAAGGPSVFLFPPKPKDTLMISRTPEVTCVVVDVSHEDPEVKFNWYVDGVEVHNAKTKPREEQYNSTYRVVSVLTVLHQDWLNGKEYKCKVSNKALPAPIEKTISKAKGQPREPQVYTLPPSRDELTKNQVSLTCLVKGFYPSDIAVEWESNGQPENNYKTTPPVLDSDGSFFLYSKLTVDKSRWQQGNVFSCSVMHEALHNHYTQKSLSLSPGGGGSGSAHPIPDSSPLLQFGGQVRQRYLYTDDACQTEAHLEIREDGTVGGAADQSPESLLQLKALKPGVIQILGVKTSRFLCQRPDGALYGSLHFDPEACSFRELLLEDGYNVYQSEAHGLPLHLCGNKSPHRDPAPRGPARFLPLPGLPPAPPEPPGILAPQPPDVGSSDPLSMVGSQGRSPSYAS

SEQ ID NO: 1481 - protein, 472 aa, Artificial Sequence
  Fusion Protein
HGEGTFTSDLSIQLEEEAVQEFIEWLLATGPVSGAPPPSGGGGGGGSGGGGSGGGGSADKTHTCPPCPAPEAAGGPSVFLFPPKPKDTLMISRTPEVTCVVVDVSHEDPEVKFNWYVDGVEVHNAKTKPREEQYNSTYRVVSVLTVLHQDWLNGKEYKCKVSNKALPAPIEKTISKAKGQPREPQVYTLPPSRDELTKNQVSLTCLVKGFYPSDIAVEWESNGQPENNYKTTPPVLDSDGSFFLYSKLTVDKSRWQQGNVFSCSVMHEALHNHYTQKSLSLSPGGGGSGSAHPIPDSSPLLQFGGQVRQRYLYTDDACQTEAHLEIREDGTVGGAADQSPESLLQLKALKPGVIQILGVKTSRFLCQRPDGALYGSLHFDPEACSFRELLLEDGYNVYQSEAHGLPLHLCGNKSPHRDPAPRGPARFLPLPGLPPAPPEPPGILAPQPPDVGSSDPLSMVYPSQGRSPSYAS

SEQ ID NO: 1482 - protein, 471 aa, Artificial Sequence
  Fusion Protein
HGEGTFTSDLSIQLEEEAVQEFIEWLLATGPVSGAPPPSGGGGGGGSGGGGSGGGGSADKTHTCPPCPAPELLGGPSVFLFPPKPKDTLMISRTPEVTCVVVDVSHEDPEVKFNWYVDGVEVHNAKTKPREEQYNNASRVVSVLTVLHQDWLNGKEYKCKVSNKALPAPIEKTISKAKGQPREPQVYTLPPSRDELTKNQVSLTCLVKGFYPSDIAVEWESNGQPENNYKTTPPVLDSDGSFFLYSKLTVDKSRWQQGNVFSCSVMHEALHNHYTQKSLSLSPGGGGSGSAHPIPDSSPLLQFGGQVRQRYLYTDDACQTEAHLEIREDGTVGGAADQSPESLLQLKALKPGVIQILGVKTSRFLCQRPDGALYGSLHFDPEACSFRELLLEDGYNVYQSEAHGLPLHLPGCKSPHRDPAPRGPARFLPLPGLPPAPPEPPGILAPQPPDVGSSDPLSMVGSQGRSPSYAS

SEQ ID NO: 1483 - protein, 472 aa, Artificial Sequence
  Fusion Protein
HGEGTFTSDLSIQLEEEAVQEFIEWLLATGPVSGAPPPSGGGGGGGSGGGGSGGGGSADKTHTCPPCPAPELLGGPSVFLFPPKPKDTLMISRTPEVTCVVVDVSHEDPEVKFNWYVDGVEVHNAKTKPREEQYNNASRVVSVLTVLHQDWLNGKEYKCKVSNKALPAPIEKTISKAKGQPREPQVYTLPPSRDELTKNQVSLTCLVKGFYPSDIAVEWESNGQPENNYKTTPPVLDSDGSFFLYSKLTVDKSRWQQGNVFSCSVMHEALHNHYTQKSLSLSPGGGGSGSAHPIPDSSPLLQFGGQVRQRYLYTDDACQTEAHLEIREDGTVGGAADQSPESLLQLKALKPGVIQILGVKTSRFLCQRPDGALYGSLHFDPEACSFRELLLEDGYNVYQSEAHGLPLHLPGCKSPHRDPAPRGPARFLPLPGLPPAPPEPPGILAPQPPDVGSSDPLSMVYPSQGRSPSYAS

SEQ ID NO: 1484 - protein, 471 aa, Artificial Sequence
  Fusion Protein
HGEGTFTSDLSIQLEEEAVQEFIEWLLATGPVSGAPPPSGGGGGGGSGGGGSGGGGSADKTHTCPPCPAPELLGGPSVFLFPPKPKDTLMISRTPEVTCVVVDVSHEDPEVKFNWYVDGVEVHNAKTKPREEQYNNASRVVSVLTVLHQDWLNGKEYKCKVSNKALPAPIEKTISKAKGQPREPQVYTLPPSRDELTKNQVSLTCLVKGFYPSDIAVEWESNGQPENNYKTTPPVLDSDGSFFLYSKLTVDKSRWQQGNVFSCSVMHEALHNHYTQKSLSLSPGGGGSGSAHPIPDSSPLLQFGGQVRQRYLYTDDACQTEAHLEIREDGTVGGAADQSPESLLQLKALKPGVIQILGVKTSRFLCQRPDGALYGSLHFDPEACSFRELLLEDGYNVYQSEAHGLPLHLCGNKSPHRDPAPRGPARFLPLPGLPPAPPEPPGILAPQPPDVGSSDPLSMVGSQGRSPSYAS

SEQ ID NO: 1485 - protein, 472 aa, Artificial Sequence
  Fusion Protein
HGEGTFTSDLSIQLEEEAVQEFIEWLLATGPVSGAPPPSGGGGGGGSGGGGSGGGGSADKTHTCPPCPAPELLGGPSVFLFPPKPKDTLMISRTPEVTCVVVDVSHEDPEVKFNWYVDGVEVHNAKTKPREEQYNNASRVVSVLTVLHQDWLNGKEYKCKVSNKALPAPIEKTISKAKGQPREPQVYTLPPSRDELTKNQVSLTCLVKGFYPSDIAVEWESNGQPENNYKTTPPVLDSDGSFFLYSKLTVDKSRWQQGNVFSCSVMHEALHNHYTQKSLSLSPGGGGSGSAHPIPDSSPLLQFGGQVRQRYLYTDDACQTEAHLEIREDGTVGGAADQSPESLLQLKALKPGVIQILGVKTSRFLCQRPDGALYGSLHFDPEACSFRELLLEDGYNVYQSEAHGLPLHLCGNKSPHRDPAPRGPARFLPLPGLPPAPPEPPGILAPQPPDVGSSDPLSMVYPSQGRSPSYAS

SEQ ID NO: 1486 - protein, 474 aa, Artificial Sequence
  Fusion Protein
HGEGTFTSDLSIQLEEEAVQEFIEWLLATGPVSGAPPPSGGGGGGGSGGGGSGGGGSAESKYGPPCPPCPAPEFEGGPSVFLFPPKPKDTLMISRTPEVTCVVVDVSQEDPEVQFNWYVDGVEVHNAKTKPREEQFNSTYRVVSVLTVLHQDWLNGKEYKCKVSNKGLPSSIEKTISKAKGQPREPQVYTLPPSQEEMTKNQVSLTCLVKGFYPSDIAVEWESNGQPENNYKTTPPVLDSDGSFFLYSRLTVDKSRWQEGNVFSCSVMHEALHNHYTQKSLSLSLGGGGSGSAHPIPDSSPLLQFGGQVRQRYLYTDDACQTEAHLEIREDGTVGGAADQSPESLLQLKALKPGVIQILGVKTSRFLCQRPDGALYGSLHFDPEACSFRELLLEDGYNVYQSEAHGLPLHLPGCKSPHRDPAPRGPARFLPLPGLPPAPPEPPGILAPQPPDVGSSDPLSMVYPSQGRSPSYAS

SEQ ID NO: 1487 - protein, 473 aa, Artificial Sequence
  Fusion Protein
HGEGTFTSDLSIQLEEEAVQEFIEWLLATGPVSGAPPPSGGGGGGGSGGGGSGGGGSAESKYGPPCPPCPAPEFEGGPSVFLFPPKPKDTLMISRTPEVTCVVVDVSQEDPEVQFNWYVDGVEVHNAKTKPREEQFNSTYRVVSVLTVLHQDWLNGKEYKCKVSNKGLPSSIEKTISKAKGQPREPQVYTLPPSQEEMTKNQVSLTCLVKGFYPSDIAVEWESNGQPENNYKTTPPVLDSDGSFFLYSRLTVDKSRWQEGNVFSCSVMHEALHNHYTQKSLSLSLGGGGSGSAHPIPDSSPLLQFGGQVRQRYLYTDDACQTEAHLEIREDGTVGGAADQSPESLLQLKALKPGVIQILGVKTSRFLCQRPDGALYGSLHFDPEACSFRELLLEDGYNVYQSEAHGLPLHLCGNKSPHRDPAPRGPARFLPLPGLPPAPPEPPGILAPQPPDVGSSDPLSMVGSQGRSPSYAS

SEQ ID NO: 1488 - protein, 474 aa, Artificial Sequence
  Fusion Protein
HGEGTFTSDLSIQLEEEAVQEFIEWLLATGPVSGAPPPSGGGGGGGSGGGGSGGGGSAESKYGPPCPPCPAPEFEGGPSVFLFPPKPKDTLMISRTPEVTCVVVDVSQEDPEVQFNWYVDGVEVHNAKTKPREEQFNSTYRVVSVLTVLHQDWLNGKEYKCKVSNKGLPSSIEKTISKAKGQPREPQVYTLPPSQEEMTKNQVSLTCLVKGFYPSDIAVEWESNGQPENNYKTTPPVLDSDGSFFLYSRLTVDKSRWQEGNVFSCSVMHEALHNHYTQKSLSLSLGGGGSGSAHPIPDSSPLLQFGGQVRQRYLYTDDACQTEAHLEIREDGTVGGAADQSPESLLQLKALKPGVIQILGVKTSRFLCQRPDGALYGSLHFDPEACSFRELLLEDGYNVYQSEAHGLPLHLCGNKSPHRDPAPRGPARFLPLPGLPPAPPEPPGILAPQPPDVGSSDPLSMVYPSQGRSPSYAS

SEQ ID NO: 1489 - protein, 471 aa, Artificial Sequence
  Fusion Protein
HGEGTFTSDLSILLEEEAVREFIEWLLATGPSSGAPPPSGGGGGGGSGGGGSGGGGSADKTHTCPPCPAPEAAGGPSVFLFPPKPKDTLMISRTPEVTCVVVDVSHEDPEVKFNWYVDGVEVHNAKTKPREEQYNSTYRVVSVLTVLHQDWLNGKEYKCKVSNKALPAPIEKTISKAKGQPREPQVYTLPPSRDELTKNQVSLTCLVKGFYPSDIAVEWESNGQPENNYKTTPPVLDSDGSFFLYSKLTVDKSRWQQGNVFSCSVMHEALHNHYTQKSLSLSPGGGGSGSAHPIPDSSPLLQFGGQVRQRYLYTDDACQTEAHLEIREDGTVGGAADQSPESLLQLKALKPGVIQILGVKTSRFLCQRPDGALYGSLHFDPEACSFRELLLEDGYNVYQSEAHGLPLHLPGCKSPHRDPAPRGPARFLPLPGLPPAPPEPPGILAPQPPDVGSSDPLSMVGSQGRSPSYAS

SEQ ID NO: 1490 - protein, 472 aa, Artificial Sequence
  Fusion Protein
HGEGTFTSDLSILLEEEAVREFIEWLLATGPSSGAPPPSGGGGGGGSGGGGSGGGGSADKTHTCPPCPAPEAAGGPSVFLFPPKPKDTLMISRTPEVTCVVVDVSHEDPEVKFNWYVDGVEVHNAKTKPREEQYNSTYRVVSVLTVLHQDWLNGKEYKCKVSNKALPAPIEKTISKAKGQPREPQVYTLPPSRDELTKNQVSLTCLVKGFYPSDIAVEWESNGQPENNYKTTPPVLDSDGSFFLYSKLTVDKSRWQQGNVFSCSVMHEALHNHYTQKSLSLSPGGGGSGSAHPIPDSSPLLQFGGQVRQRYLYTDDACQTEAHLEIREDGTVGGAADQSPESLLQLKALKPGVIQILGVKTSRFLCQRPDGALYGSLHFDPEACSFRELLLEDGYNVYQSEAHGLPLHLPGCKSPHRDPAPRGPARFLPLPGLPPAPPEPPGILAPQPPDVGSSDPLSMVYPSQGRSPSYAS

SEQ ID NO: 1491 - protein, 471 aa, Artificial Sequence
  Fusion Protein
HGEGTFTSDLSILLEEEAVREFIEWLLATGPSSGAPPPSGGGGGGGSGGGGSGGGGSADKTHTCPPCPAPEAAGGPSVFLFPPKPKDTLMISRTPEVTCVVVDVSHEDPEVKFNWYVDGVEVHNAKTKPREEQYNSTYRVVSVLTVLHQDWLNGKEYKCKVSNKALPAPIEKTISKAKGQPREPQVYTLPPSRDELTKNQVSLTCLVKGFYPSDIAVEWESNGQPENNYKTTPPVLDSDGSFFLYSKLTVDKSRWQQGNVFSCSVMHEALHNHYTQKSLSLSPGGGGSGSAHPIPDSSPLLQFGGQVRQRYLYTDDACQTEAHLEIREDGTVGGAADQSPESLLQLKALKPGVIQILGVKTSRFLCQRPDGALYGSLHFDPEACSFRELLLEDGYNVYQSEAHGLPLHLCGNKSPHRDPAPRGPARFLPLPGLPPAPPEPPGILAPQPPDVGSSDPLSMVGSQGRSPSYAS

SEQ ID NO: 1492 - protein, 472 aa, Artificial Sequence
  Fusion Protein
HGEGTFTSDLSILLEEEAVREFIEWLLATGPSSGAPPPSGGGGGGGSGGGGSGGGGSADKTHTCPPCPAPEAAGGPSVFLFPPKPKDTLMISRTPEVTCVVVDVSHEDPEVKFNWYVDGVEVHNAKTKPREEQYNSTYRVVSVLTVLHQDWLNGKEYKCKVSNKALPAPIEKTISKAKGQPREPQVYTLPPSRDELTKNQVSLTCLVKGFYPSDIAVEWESNGQPENNYKTTPPVLDSDGSFFLYSKLTVDKSRWQQGNVFSCSVMHEALHNHYTQKSLSLSPGGGGSGSAHPIPDSSPLLQFGGQVRQRYLYTDDACQTEAHLEIREDGTVGGAADQSPESLLQLKALKPGVIQILGVKTSRFLCQRPDGALYGSLHFDPEACSFRELLLEDGYNVYQSEAHGLPLHLCGNKSPHRDPAPRGPARFLPLPGLPPAPPEPPGILAPQPPDVGSSDPLSMVYPSQGRSPSYAS

SEQ ID NO: 1493 - protein, 471 aa, Artificial Sequence
  Fusion Protein
HGEGTFTSDLSILLEEEAVREFIEWLLATGPSSGAPPPSGGGGGGGSGGGGSGGGGSADKTHTCPPCPAPELLGGPSVFLFPPKPKDTLMISRTPEVTCVVVDVSHEDPEVKFNWYVDGVEVHNAKTKPREEQYNNASRVVSVLTVLHQDWLNGKEYKCKVSNKALPAPIEKTISKAKGQPREPQVYTLPPSRDELTKNQVSLTCLVKGFYPSDIAVEWESNGQPENNYKTTPPVLDSDGSFFLYSKLTVDKSRWQQGNVFSCSVMHEALHNHYTQKSLSLSPGGGGSGSAHPIPDSSPLLQFGGQVRQRYLYTDDACQTEAHLEIREDGTVGGAADQSPESLLQLKALKPGVIQILGVKTSRFLCQRPDGALYGSLHFDPEACSFRELLLEDGYNVYQSEAHGLPLHLPGCKSPHRDPAPRGPARFLPLPGLPPAPPEPPGILAPQPPDVGSSDPLSMVGSQGRSPSYAS

SEQ ID NO: 1494 - protein, 472 aa, Artificial Sequence
  Fusion Protein
HGEGTFTSDLSILLEEEAVREFIEWLLATGPSSGAPPPSGGGGGGGSGGGGSGGGGSADKTHTCPPCPAPELLGGPSVFLFPPKPKDTLMISRTPEVTCVVVDVSHEDPEVKFNWYVDGVEVHNAKTKPREEQYNNASRVVSVLTVLHQDWLNGKEYKCKVSNKALPAPIEKTISKAKGQPREPQVYTLPPSRDELTKNQVSLTCLVKGFYPSDIAVEWESNGQPENNYKTTPPVLDSDGSFFLYSKLTVDKSRWQQGNVFSCSVMHEALHNHYTQKSLSLSPGGGGSGSAHPIPDSSPLLQFGGQVRQRYLYTDDACQTEAHLEIREDGTVGGAADQSPESLLQLKALKPGVIQILGVKTSRFLCQRPDGALYGSLHFDPEACSFRELLLEDGYNVYQSEAHGLPLHLPGCKSPHRDPAPRGPARFLPLPGLPPAPPEPPGILAPQPPDVGSSDPLSMVYPSQGRSPSYAS

SEQ ID NO: 1495 - protein, 471 aa, Artificial Sequence
  Fusion Protein
HGEGTFTSDLSILLEEEAVREFIEWLLATGPSSGAPPPSGGGGGGGSGGGGSGGGGSADKTHTCPPCPAPELLGGPSVFLFPPKPKDTLMISRTPEVTCVVVDVSHEDPEVKFNWYVDGVEVHNAKTKPREEQYNNASRVVSVLTVLHQDWLNGKEYKCKVSNKALPAPIEKTISKAKGQPREPQVYTLPPSRDELTKNQVSLTCLVKGFYPSDIAVEWESNGQPENNYKTTPPVLDSDGSFFLYSKLTVDKSRWQQGNVFSCSVMHEALHNHYTQKSLSLSPGGGGSGSAHPIPDSSPLLQFGGQVRQRYLYTDDACQTEAHLEIREDGTVGGAADQSPESLLQLKALKPGVIQILGVKTSRFLCQRPDGALYGSLHFDPEACSFRELLLEDGYNVYQSEAHGLPLHLCGNKSPHRDPAPRGPARFLPLPGLPPAPPEPPGILAPQPPDVGSSDPLSMVGSQGRSPSYAS

SEQ ID NO: 1496 - protein, 472 aa, Artificial Sequence
  Fusion Protein
HGEGTFTSDLSILLEEEAVREFIEWLLATGPSSGAPPPSGGGGGGGSGGGGSGGGGSADKTHTCPPCPAPELLGGPSVFLFPPKPKDTLMISRTPEVTCVVVDVSHEDPEVKFNWYVDGVEVHNAKTKPREEQYNNASRVVSVLTVLHQDWLNGKEYKCKVSNKALPAPIEKTISKAKGQPREPQVYTLPPSRDELTKNQVSLTCLVKGFYPSDIAVEWESNGQPENNYKTTPPVLDSDGSFFLYSKLTVDKSRWQQGNVFSCSVMHEALHNHYTQKSLSLSPGGGGSGSAHPIPDSSPLLQFGGQVRQRYLYTDDACQTEAHLEIREDGTVGGAADQSPESLLQLKALKPGVIQILGVKTSRFLCQRPDGALYGSLHFDPEACSFRELLLEDGYNVYQSEAHGLPLHLCGNKSPHRDPAPRGPARFLPLPGLPPAPPEPPGILAPQPPDVGSSDPLSMVYPSQGRSPSYAS

SEQ ID NO: 1497 - protein, 474 aa, Artificial Sequence
  Fusion Protein
HGEGTFTSDLSILLEEEAVREFIEWLLATGPSSGAPPPSGGGGGGGSGGGGSGGGGSAESKYGPPCPPCPAPEFEGGPSVFLFPPKPKDTLMISRTPEVTCVVVDVSQEDPEVQFNWYVDGVEVHNAKTKPREEQFNSTYRVVSVLTVLHQDWLNGKEYKCKVSNKGLPSSIEKTISKAKGQPREPQVYTLPPSQEEMTKNQVSLTCLVKGFYPSDIAVEWESNGQPENNYKTTPPVLDSDGSFFLYSRLTVDKSRWQEGNVFSCSVMHEALHNHYTQKSLSLSLGGGGSGSAHPIPDSSPLLQFGGQVRQRYLYTDDACQTEAHLEIREDGTVGGAADQSPESLLQLKALKPGVIQILGVKTSRFLCQRPDGALYGSLHFDPEACSFRELLLEDGYNVYQSEAHGLPLHLPGCKSPHRDPAPRGPARFLPLPGLPPAPPEPPGILAPQPPDVGSSDPLSMVYPSQGRSPSYAS

SEQ ID NO: 1498 - protein, 473 aa, Artificial Sequence
  Fusion Protein
HGEGTFTSDLSILLEEEAVREFIEWLLATGPSSGAPPPSGGGGGGGSGGGGSGGGGSAESKYGPPCPPCPAPEFEGGPSVFLFPPKPKDTLMISRTPEVTCVVVDVSQEDPEVQFNWYVDGVEVHNAKTKPREEQFNSTYRVVSVLTVLHQDWLNGKEYKCKVSNKGLPSSIEKTISKAKGQPREPQVYTLPPSQEEMTKNQVSLTCLVKGFYPSDIAVEWESNGQPENNYKTTPPVLDSDGSFFLYSRLTVDKSRWQEGNVFSCSVMHEALHNHYTQKSLSLSLGGGGSGSAHPIPDSSPLLQFGGQVRQRYLYTDDACQTEAHLEIREDGTVGGAADQSPESLLQLKALKPGVIQILGVKTSRFLCQRPDGALYGSLHFDPEACSFRELLLEDGYNVYQSEAHGLPLHLCGNKSPHRDPAPRGPARFLPLPGLPPAPPEPPGILAPQPPDVGSSDPLSMVGSQGRSPSYAS

SEQ ID NO: 1499 - protein, 474 aa, Artificial Sequence
  Fusion Protein
HGEGTFTSDLSILLEEEAVREFIEWLLATGPSSGAPPPSGGGGGGGSGGGGSGGGGSAESKYGPPCPPCPAPEFEGGPSVFLFPPKPKDTLMISRTPEVTCVVVDVSQEDPEVQFNWYVDGVEVHNAKTKPREEQFNSTYRVVSVLTVLHQDWLNGKEYKCKVSNKGLPSSIEKTISKAKGQPREPQVYTLPPSQEEMTKNQVSLTCLVKGFYPSDIAVEWESNGQPENNYKTTPPVLDSDGSFFLYSRLTVDKSRWQEGNVFSCSVMHEALHNHYTQKSLSLSLGGGGSGSAHPIPDSSPLLQFGGQVRQRYLYTDDACQTEAHLEIREDGTVGGAADQSPESLLQLKALKPGVIQILGVKTSRFLCQRPDGALYGSLHFDPEACSFRELLLEDGYNVYQSEAHGLPLHLCGNKSPHRDPAPRGPARFLPLPGLPPAPPEPPGILAPQPPDVGSSDPLSMVYPSQGRSPSYAS

SEQ ID NO: 1500 - protein, 471 aa, Artificial Sequence
  Fusion Protein
HGEGTFTSDLSILLEEEAVRLFIEWLLATGPSSGAPPPSGGGGGGGSGGGGSGGGGSADKTHTCPPCPAPEAAGGPSVFLFPPKPKDTLMISRTPEVTCVVVDVSHEDPEVKFNWYVDGVEVHNAKTKPREEQYNSTYRVVSVLTVLHQDWLNGKEYKCKVSNKALPAPIEKTISKAKGQPREPQVYTLPPSRDELTKNQVSLTCLVKGFYPSDIAVEWESNGQPENNYKTTPPVLDSDGSFFLYSKLTVDKSRWQQGNVFSCSVMHEALHNHYTQKSLSLSPGGGGSGSAHPIPDSSPLLQFGGQVRQRYLYTDDACQTEAHLEIREDGTVGGAADQSPESLLQLKALKPGVIQILGVKTSRFLCQRPDGALYGSLHFDPEACSFRELLLEDGYNVYQSEAHGLPLHLPGCKSPHRDPAPRGPARFLPLPGLPPAPPEPPGILAPQPPDVGSSDPLSMVGSQGRSPSYAS

SEQ ID NO: 1501 - protein, 472 aa, Artificial Sequence
  Fusion Protein
HGEGTFTSDLSILLEEEAVRLFIEWLLATGPSSGAPPPSGGGGGGGSGGGGSGGGGSADKTHTCPPCPAPEAAGGPSVFLFPPKPKDTLMISRTPEVTCVVVDVSHEDPEVKFNWYVDGVEVHNAKTKPREEQYNSTYRVVSVLTVLHQDWLNGKEYKCKVSNKALPAPIEKTISKAKGQPREPQVYTLPPSRDELTKNQVSLTCLVKGFYPSDIAVEWESNGQPENNYKTTPPVLDSDGSFFLYSKLTVDKSRWQQGNVFSCSVMHEALHNHYTQKSLSLSPGGGGSGSAHPIPDSSPLLQFGGQVRQRYLYTDDACQTEAHLEIREDGTVGGAADQSPESLLQLKALKPGVIQILGVKTSRFLCQRPDGALYGSLHFDPEACSFRELLLEDGYNVYQSEAHGLPLHLPGCKSPHRDPAPRGPARFLPLPGLPPAPPEPPGILAPQPPDVGSSDPLSMVYPSQGRSPSYAS

SEQ ID NO: 1502 - protein, 471 aa, Artificial Sequence
  Fusion Protein
HGEGTFTSDLSILLEEEAVRLFIEWLLATGPSSGAPPPSGGGGGGGSGGGGSGGGGSADKTHTCPPCPAPEAAGGPSVFLFPPKPKDTLMISRTPEVTCVVVDVSHEDPEVKFNWYVDGVEVHNAKTKPREEQYNSTYRVVSVLTVLHQDWLNGKEYKCKVSNKALPAPIEKTISKAKGQPREPQVYTLPPSRDELTKNQVSLTCLVKGFYPSDIAVEWESNGQPENNYKTTPPVLDSDGSFFLYSKLTVDKSRWQQGNVFSCSVMHEALHNHYTQKSLSLSPGGGGSGSAHPIPDSSPLLQFGGQVRQRYLYTDDACQTEAHLEIREDGTVGGAADQSPESLLQLKALKPGVIQILGVKTSRFLCQRPDGALYGSLHFDPEACSFRELLLEDGYNVYQSEAHGLPLHLCGNKSPHRDPAPRGPARFLPLPGLPPAPPEPPGILAPQPPDVGSSDPLSMVGSQGRSPSYAS

SEQ ID NO: 1503 - protein, 472 aa, Artificial Sequence
  Fusion Protein
HGEGTFTSDLSILLEEEAVRLFIEWLLATGPSSGAPPPSGGGGGGGSGGGGSGGGGSADKTHTCPPCPAPEAAGGPSVFLFPPKPKDTLMISRTPEVTCVVVDVSHEDPEVKFNWYVDGVEVHNAKTKPREEQYNSTYRVVSVLTVLHQDWLNGKEYKCKVSNKALPAPIEKTISKAKGQPREPQVYTLPPSRDELTKNQVSLTCLVKGFYPSDIAVEWESNGQPENNYKTTPPVLDSDGSFFLYSKLTVDKSRWQQGNVFSCSVMHEALHNHYTQKSLSLSPGGGGSGSAHPIPDSSPLLQFGGQVRQRYLYTDDACQTEAHLEIREDGTVGGAADQSPESLLQLKALKPGVIQILGVKTSRFLCQRPDGALYGSLHFDPEACSFRELLLEDGYNVYQSEAHGLPLHLCGNKSPHRDPAPRGPARFLPLPGLPPAPPEPPGILAPQPPDVGSSDPLSMVYPSQGRSPSYAS

SEQ ID NO: 1504 - protein, 471 aa, Artificial Sequence
  Fusion Protein
HGEGTFTSDLSILLEEEAVRLFIEWLLATGPSSGAPPPSGGGGGGGSGGGGSGGGGSADKTHTCPPCPAPELLGGPSVFLFPPKPKDTLMISRTPEVTCVVVDVSHEDPEVKFNWYVDGVEVHNAKTKPREEQYNNASRVVSVLTVLHQDWLNGKEYKCKVSNKALPAPIEKTISKAKGQPREPQVYTLPPSRDELTKNQVSLTCLVKGFYPSDIAVEWESNGQPENNYKTTPPVLDSDGSFFLYSKLTVDKSRWQQGNVFSCSVMHEALHNHYTQKSLSLSPGGGGSGSAHPIPDSSPLLQFGGQVRQRYLYTDDACQTEAHLEIREDGTVGGAADQSPESLLQLKALKPGVIQILGVKTSRFLCQRPDGALYGSLHFDPEACSFRELLLEDGYNVYQSEAHGLPLHLPGCKSPHRDPAPRGPARFLPLPGLPPAPPEPPGILAPQPPDVGSSDPLSMVGSQGRSPSYAS

SEQ ID NO: 1505 - protein, 472 aa, Artificial Sequence
  Fusion Protein
HGEGTFTSDLSILLEEEAVRLFIEWLLATGPSSGAPPPSGGGGGGGSGGGGSGGGGSADKTHTCPPCPAPELLGGPSVFLFPPKPKDTLMISRTPEVTCVVVDVSHEDPEVKFNWYVDGVEVHNAKTKPREEQYNNASRVVSVLTVLHQDWLNGKEYKCKVSNKALPAPIEKTISKAKGQPREPQVYTLPPSRDELTKNQVSLTCLVKGFYPSDIAVEWESNGQPENNYKTTPPVLDSDGSFFLYSKLTVDKSRWQQGNVFSCSVMHEALHNHYTQKSLSLSPGGGGSGSAHPIPDSSPLLQFGGQVRQRYLYTDDACQTEAHLEIREDGTVGGAADQSPESLLQLKALKPGVIQILGVKTSRFLCQRPDGALYGSLHFDPEACSFRELLLEDGYNVYQSEAHGLPLHLPGCKSPHRDPAPRGPARFLPLPGLPPAPPEPPGILAPQPPDVGSSDPLSMVYPSQGRSPSYAS

SEQ ID NO: 1506 - protein, 471 aa, Artificial Sequence
  Fusion Protein
HGEGTFTSDLSILLEEEAVRLFIEWLLATGPSSGAPPPSGGGGGGGSGGGGSGGGGSADKTHTCPPCPAPELLGGPSVFLFPPKPKDTLMISRTPEVTCVVVDVSHEDPEVKFNWYVDGVEVHNAKTKPREEQYNNASRVVSVLTVLHQDWLNGKEYKCKVSNKALPAPIEKTISKAKGQPREPQVYTLPPSRDELTKNQVSLTCLVKGFYPSDIAVEWESNGQPENNYKTTPPVLDSDGSFFLYSKLTVDKSRWQQGNVFSCSVMHEALHNHYTQKSLSLSPGGGGSGSAHPIPDSSPLLQFGGQVRQRYLYTDDACQTEAHLEIREDGTVGGAADQSPESLLQLKALKPGVIQILGVKTSRFLCQRPDGALYGSLHFDPEACSFRELLLEDGYNVYQSEAHGLPLHLCGNKSPHRDPAPRGPARFLPLPGLPPAPPEPPGILAPQPPDVGSSDPLSMVGSQGRSPSYAS

SEQ ID NO: 1507 - protein, 472 aa, Artificial Sequence
  Fusion Protein
HGEGTFTSDLSILLEEEAVRLFIEWLLATGPSSGAPPPSGGGGGGGSGGGGSGGGGSADKTHTCPPCPAPELLGGPSVFLFPPKPKDTLMISRTPEVTCVVVDVSHEDPEVKFNWYVDGVEVHNAKTKPREEQYNNASRVVSVLTVLHQDWLNGKEYKCKVSNKALPAPIEKTISKAKGQPREPQVYTLPPSRDELTKNQVSLTCLVKGFYPSDIAVEWESNGQPENNYKTTPPVLDSDGSFFLYSKLTVDKSRWQQGNVFSCSVMHEALHNHYTQKSLSLSPGGGGSGSAHPIPDSSPLLQFGGQVRQRYLYTDDACQTEAHLEIREDGTVGGAADQSPESLLQLKALKPGVIQILGVKTSRFLCQRPDGALYGSLHFDPEACSFRELLLEDGYNVYQSEAHGLPLHLCGNKSPHRDPAPRGPARFLPLPGLPPAPPEPPGILAPQPPDVGSSDPLSMVYPSQGRSPSYAS

SEQ ID NO: 1508 - protein, 474 aa, Artificial Sequence
  Fusion Protein
HGEGTFTSDLSILLEEEAVRLFIEWLLATGPSSGAPPPSGGGGGGGSGGGGSGGGGSAESKYGPPCPPCPAPEFEGGPSVFLFPPKPKDTLMISRTPEVTCVVVDVSQEDPEVQFNWYVDGVEVHNAKTKPREEQFNSTYRVVSVLTVLHQDWLNGKEYKCKVSNKGLPSSIEKTISKAKGQPREPQVYTLPPSQEEMTKNQVSLTCLVKGFYPSDIAVEWESNGQPENNYKTTPPVLDSDGSFFLYSRLTVDKSRWQEGNVFSCSVMHEALHNHYTQKSLSLSLGGGGSGSAHPIPDSSPLLQFGGQVRQRYLYTDDACQTEAHLEIREDGTVGGAADQSPESLLQLKALKPGVIQILGVKTSRFLCQRPDGALYGSLHFDPEACSFRELLLEDGYNVYQSEAHGLPLHLPGCKSPHRDPAPRGPARFLPLPGLPPAPPEPPGILAPQPPDVGSSDPLSMVYPSQGRSPSYAS

SEQ ID NO: 1509 - protein, 473 aa, Artificial Sequence
  Fusion Protein
HGEGTFTSDLSILLEEEAVRLFIEWLLATGPSSGAPPPSGGGGGGGSGGGGSGGGGSAESKYGPPCPPCPAPEFEGGPSVFLFPPKPKDTLMISRTPEVTCVVVDVSQEDPEVQFNWYVDGVEVHNAKTKPREEQFNSTYRVVSVLTVLHQDWLNGKEYKCKVSNKGLPSSIEKTISKAKGQPREPQVYTLPPSQEEMTKNQVSLTCLVKGFYPSDIAVEWESNGQPENNYKTTPPVLDSDGSFFLYSRLTVDKSRWQEGNVFSCSVMHEALHNHYTQKSLSLSLGGGGSGSAHPIPDSSPLLQFGGQVRQRYLYTDDACQTEAHLEIREDGTVGGAADQSPESLLQLKALKPGVIQILGVKTSRFLCQRPDGALYGSLHFDPEACSFRELLLEDGYNVYQSEAHGLPLHLCGNKSPHRDPAPRGPARFLPLPGLPPAPPEPPGILAPQPPDVGSSDPLSMVGSQGRSPSYAS

SEQ ID NO: 1510 - protein, 474 aa, Artificial Sequence
  Fusion Protein
HGEGTFTSDLSILLEEEAVRLFIEWLLATGPSSGAPPPSGGGGGGGSGGGGSGGGGSAESKYGPPCPPCPAPEFEGGPSVFLFPPKPKDTLMISRTPEVTCVVVDVSQEDPEVQFNWYVDGVEVHNAKTKPREEQFNSTYRVVSVLTVLHQDWLNGKEYKCKVSNKGLPSSIEKTISKAKGQPREPQVYTLPPSQEEMTKNQVSLTCLVKGFYPSDIAVEWESNGQPENNYKTTPPVLDSDGSFFLYSRLTVDKSRWQEGNVFSCSVMHEALHNHYTQKSLSLSLGGGGSGSAHPIPDSSPLLQFGGQVRQRYLYTDDACQTEAHLEIREDGTVGGAADQSPESLLQLKALKPGVIQILGVKTSRFLCQRPDGALYGSLHFDPEACSFRELLLEDGYNVYQSEAHGLPLHLCGNKSPHRDPAPRGPARFLPLPGLPPAPPEPPGILAPQPPDVGSSDPLSMVYPSQGRSPSYAS

SEQ ID NO: 1511 - protein, 471 aa, Artificial Sequence
  Fusion Protein
HGEGTFTSDLSILLEEEAVRLFIEWLLATGPVSGAPPPSGGGGGGGSGGGGSGGGGSADKTHTCPPCPAPEAAGGPSVFLFPPKPKDTLMISRTPEVTCVVVDVSHEDPEVKFNWYVDGVEVHNAKTKPREEQYNSTYRVVSVLTVLHQDWLNGKEYKCKVSNKALPAPIEKTISKAKGQPREPQVYTLPPSRDELTKNQVSLTCLVKGFYPSDIAVEWESNGQPENNYKTTPPVLDSDGSFFLYSKLTVDKSRWQQGNVFSCSVMHEALHNHYTQKSLSLSPGGGGSGSAHPIPDSSPLLQFGGQVRQRYLYTDDACQTEAHLEIREDGTVGGAADQSPESLLQLKALKPGVIQILGVKTSRFLCQRPDGALYGSLHFDPEACSFRELLLEDGYNVYQSEAHGLPLHLPGCKSPHRDPAPRGPARFLPLPGLPPAPPEPPGILAPQPPDVGSSDPLSMVGSQGRSPSYAS

SEQ ID NO: 1512 - protein, 472 aa, Artificial Sequence
  Fusion Protein
HGEGTFTSDLSILLEEEAVRLFIEWLLATGPVSGAPPPSGGGGGGGSGGGGSGGGGSADKTHTCPPCPAPEAAGGPSVFLFPPKPKDTLMISRTPEVTCVVVDVSHEDPEVKFNWYVDGVEVHNAKTKPREEQYNSTYRVVSVLTVLHQDWLNGKEYKCKVSNKALPAPIEKTISKAKGQPREPQVYTLPPSRDELTKNQVSLTCLVKGFYPSDIAVEWESNGQPENNYKTTPPVLDSDGSFFLYSKLTVDKSRWQQGNVFSCSVMHEALHNHYTQKSLSLSPGGGGSGSAHPIPDSSPLLQFGGQVRQRYLYTDDACQTEAHLEIREDGTVGGAADQSPESLLQLKALKPGVIQILGVKTSRFLCQRPDGALYGSLHFDPEACSFRELLLEDGYNVYQSEAHGLPLHLPGCKSPHRDPAPRGPARFLPLPGLPPAPPEPPGILAPQPPDVGSSDPLSMVYPSQGRSPSYAS

SEQ ID NO: 1513 - protein, 471 aa, Artificial Sequence
  Fusion Protein
HGEGTFTSDLSILLEEEAVRLFIEWLLATGPVSGAPPPSGGGGGGGSGGGGSGGGGSADKTHTCPPCPAPEAAGGPSVFLFPPKPKDTLMISRTPEVTCVVVDVSHEDPEVKFNWYVDGVEVHNAKTKPREEQYNSTYRVVSVLTVLHQDWLNGKEYKCKVSNKALPAPIEKTISKAKGQPREPQVYTLPPSRDELTKNQVSLTCLVKGFYPSDIAVEWESNGQPENNYKTTPPVLDSDGSFFLYSKLTVDKSRWQQGNVFSCSVMHEALHNHYTQKSLSLSPGGGGSGSAHPIPDSSPLLQFGGQVRQRYLYTDDACQTEAHLEIREDGTVGGAADQSPESLLQLKALKPGVIQILGVKTSRFLCQRPDGALYGSLHFDPEACSFRELLLEDGYNVYQSEAHGLPLHLCGNKSPHRDPAPRGPARFLPLPGLPPAPPEPPGILAPQPPDVGSSDPLSMVGSQGRSPSYAS

SEQ ID NO: 1514 - protein, 472 aa, Artificial Sequence
  Fusion Protein
HGEGTFTSDLSILLEEEAVRLFIEWLLATGPVSGAPPPSGGGGGGGSGGGGSGGGGSADKTHTCPPCPAPEAAGGPSVFLFPPKPKDTLMISRTPEVTCVVVDVSHEDPEVKFNWYVDGVEVHNAKTKPREEQYNSTYRVVSVLTVLHQDWLNGKEYKCKVSNKALPAPIEKTISKAKGQPREPQVYTLPPSRDELTKNQVSLTCLVKGFYPSDIAVEWESNGQPENNYKTTPPVLDSDGSFFLYSKLTVDKSRWQQGNVFSCSVMHEALHNHYTQKSLSLSPGGGGSGSAHPIPDSSPLLQFGGQVRQRYLYTDDACQTEAHLEIREDGTVGGAADQSPESLLQLKALKPGVIQILGVKTSRFLCQRPDGALYGSLHFDPEACSFRELLLEDGYNVYQSEAHGLPLHLCGNKSPHRDPAPRGPARFLPLPGLPPAPPEPPGILAPQPPDVGSSDPLSMVYPSQGRSPSYAS

SEQ ID NO: 1515 - protein, 471 aa, Artificial Sequence
  Fusion Protein
HGEGTFTSDLSILLEEEAVRLFIEWLLATGPVSGAPPPSGGGGGGGSGGGGSGGGGSADKTHTCPPCPAPELLGGPSVFLFPPKPKDTLMISRTPEVTCVVVDVSHEDPEVKFNWYVDGVEVHNAKTKPREEQYNNASRVVSVLTVLHQDWLNGKEYKCKVSNKALPAPIEKTISKAKGQPREPQVYTLPPSRDELTKNQVSLTCLVKGFYPSDIAVEWESNGQPENNYKTTPPVLDSDGSFFLYSKLTVDKSRWQQGNVFSCSVMHEALHNHYTQKSLSLSPGGGGSGSAHPIPDSSPLLQFGGQVRQRYLYTDDACQTEAHLEIREDGTVGGAADQSPESLLQLKALKPGVIQILGVKTSRFLCQRPDGALYGSLHFDPEACSFRELLLEDGYNVYQSEAHGLPLHLPGCKSPHRDPAPRGPARFLPLPGLPPAPPEPPGILAPQPPDVGSSDPLSMVGSQGRSPSYAS

SEQ ID NO: 1516 - protein, 472 aa, Artificial Sequence
  Fusion Protein
HGEGTFTSDLSILLEEEAVRLFIEWLLATGPVSGAPPPSGGGGGGGSGGGGSGGGGSADKTHTCPPCPAPELLGGPSVFLFPPKPKDTLMISRTPEVTCVVVDVSHEDPEVKFNWYVDGVEVHNAKTKPREEQYNNASRVVSVLTVLHQDWLNGKEYKCKVSNKALPAPIEKTISKAKGQPREPQVYTLPPSRDELTKNQVSLTCLVKGFYPSDIAVEWESNGQPENNYKTTPPVLDSDGSFFLYSKLTVDKSRWQQGNVFSCSVMHEALHNHYTQKSLSLSPGGGGSGSAHPIPDSSPLLQFGGQVRQRYLYTDDACQTEAHLEIREDGTVGGAADQSPESLLQLKALKPGVIQILGVKTSRFLCQRPDGALYGSLHFDPEACSFRELLLEDGYNVYQSEAHGLPLHLPGCKSPHRDPAPRGPARFLPLPGLPPAPPEPPGILAPQPPDVGSSDPLSMVYPSQGRSPSYAS

SEQ ID NO: 1517 - protein, 471 aa, Artificial Sequence
  Fusion Protein
HGEGTFTSDLSILLEEEAVRLFIEWLLATGPVSGAPPPSGGGGGGGSGGGGSGGGGSADKTHTCPPCPAPELLGGPSVFLFPPKPKDTLMISRTPEVTCVVVDVSHEDPEVKFNWYVDGVEVHNAKTKPREEQYNNASRVVSVLTVLHQDWLNGKEYKCKVSNKALPAPIEKTISKAKGQPREPQVYTLPPSRDELTKNQVSLTCLVKGFYPSDIAVEWESNGQPENNYKTTPPVLDSDGSFFLYSKLTVDKSRWQQGNVFSCSVMHEALHNHYTQKSLSLSPGGGGSGSAHPIPDSSPLLQFGGQVRQRYLYTDDACQTEAHLEIREDGTVGGAADQSPESLLQLKALKPGVIQILGVKTSRFLCQRPDGALYGSLHFDPEACSFRELLLEDGYNVYQSEAHGLPLHLCGNKSPHRDPAPRGPARFLPLPGLPPAPPEPPGILAPQPPDVGSSDPLSMVGSQGRSPSYAS

SEQ ID NO: 1518 - protein, 472 aa, Artificial Sequence
  Fusion Protein
HGEGTFTSDLSILLEEEAVRLFIEWLLATGPVSGAPPPSGGGGGGGSGGGGSGGGGSADKTHTCPPCPAPELLGGPSVFLFPPKPKDTLMISRTPEVTCVVVDVSHEDPEVKFNWYVDGVEVHNAKTKPREEQYNNASRVVSVLTVLHQDWLNGKEYKCKVSNKALPAPIEKTISKAKGQPREPQVYTLPPSRDELTKNQVSLTCLVKGFYPSDIAVEWESNGQPENNYKTTPPVLDSDGSFFLYSKLTVDKSRWQQGNVFSCSVMHEALHNHYTQKSLSLSPGGGGSGSAHPIPDSSPLLQFGGQVRQRYLYTDDACQTEAHLEIREDGTVGGAADQSPESLLQLKALKPGVIQILGVKTSRFLCQRPDGALYGSLHFDPEACSFRELLLEDGYNVYQSEAHGLPLHLCGNKSPHRDPAPRGPARFLPLPGLPPAPPEPPGILAPQPPDVGSSDPLSMVYPSQGRSPSYAS

SEQ ID NO: 1519 - protein, 474 aa, Artificial Sequence
  Fusion Protein
HGEGTFTSDLSILLEEEAVRLFIEWLLATGPVSGAPPPSGGGGGGGSGGGGSGGGGSAESKYGPPCPPCPAPEFEGGPSVFLFPPKPKDTLMISRTPEVTCVVVDVSQEDPEVQFNWYVDGVEVHNAKTKPREEQFNSTYRVVSVLTVLHQDWLNGKEYKCKVSNKGLPSSIEKTISKAKGQPREPQVYTLPPSQEEMTKNQVSLTCLVKGFYPSDIAVEWESNGQPENNYKTTPPVLDSDGSFFLYSRLTVDKSRWQEGNVFSCSVMHEALHNHYTQKSLSLSLGGGGSGSAHPIPDSSPLLQFGGQVRQRYLYTDDACQTEAHLEIREDGTVGGAADQSPESLLQLKALKPGVIQILGVKTSRFLCQRPDGALYGSLHFDPEACSFRELLLEDGYNVYQSEAHGLPLHLPGCKSPHRDPAPRGPARFLPLPGLPPAPPEPPGILAPQPPDVGSSDPLSMVYPSQGRSPSYAS

SEQ ID NO: 1520 - protein, 473 aa, Artificial Sequence
  Fusion Protein
HGEGTFTSDLSILLEEEAVRLFIEWLLATGPVSGAPPPSGGGGGGGSGGGGSGGGGSAESKYGPPCPPCPAPEFEGGPSVFLFPPKPKDTLMISRTPEVTCVVVDVSQEDPEVQFNWYVDGVEVHNAKTKPREEQFNSTYRVVSVLTVLHQDWLNGKEYKCKVSNKGLPSSIEKTISKAKGQPREPQVYTLPPSQEEMTKNQVSLTCLVKGFYPSDIAVEWESNGQPENNYKTTPPVLDSDGSFFLYSRLTVDKSRWQEGNVFSCSVMHEALHNHYTQKSLSLSLGGGGSGSAHPIPDSSPLLQFGGQVRQRYLYTDDACQTEAHLEIREDGTVGGAADQSPESLLQLKALKPGVIQILGVKTSRFLCQRPDGALYGSLHFDPEACSFRELLLEDGYNVYQSEAHGLPLHLCGNKSPHRDPAPRGPARFLPLPGLPPAPPEPPGILAPQPPDVGSSDPLSMVGSQGRSPSYAS

SEQ ID NO: 1521 - protein, 474 aa, Artificial Sequence
  Fusion Protein
HGEGTFTSDLSILLEEEAVRLFIEWLLATGPVSGAPPPSGGGGGGGSGGGGSGGGGSAESKYGPPCPPCPAPEFEGGPSVFLFPPKPKDTLMISRTPEVTCVVVDVSQEDPEVQFNWYVDGVEVHNAKTKPREEQFNSTYRVVSVLTVLHQDWLNGKEYKCKVSNKGLPSSIEKTISKAKGQPREPQVYTLPPSQEEMTKNQVSLTCLVKGFYPSDIAVEWESNGQPENNYKTTPPVLDSDGSFFLYSRLTVDKSRWQEGNVFSCSVMHEALHNHYTQKSLSLSLGGGGSGSAHPIPDSSPLLQFGGQVRQRYLYTDDACQTEAHLEIREDGTVGGAADQSPESLLQLKALKPGVIQILGVKTSRFLCQRPDGALYGSLHFDPEACSFRELLLEDGYNVYQSEAHGLPLHLCGNKSPHRDPAPRGPARFLPLPGLPPAPPEPPGILAPQPPDVGSSDPLSMVYPSQGRSPSYAS

SEQ ID NO: 1522 - protein, 472 aa, Artificial Sequence
  Fusion Protein
GHGEGTFTSDLSIQLDEEAVREFIEWLLATGPSSGAPPPSGGGGGGGSGGGGSGGGGSADKTHTCPPCPAPEAAGGPSVFLFPPKPKDTLMISRTPEVTCVVVDVSHEDPEVKFNWYVDGVEVHNAKTKPREEQYNSTYRVVSVLTVLHQDWLNGKEYKCKVSNKALPAPIEKTISKAKGQPREPQVYTLPPSRDELTKNQVSLTCLVKGFYPSDIAVEWESNGQPENNYKTTPPVLDSDGSFFLYSKLTVDKSRWQQGNVFSCSVMHEALHNHYTQKSLSLSPGGGGSGSAHPIPDSSPLLQFGGQVRQRYLYTDDACQTEAHLEIREDGTVGGAADQSPESLLQLKALKPGVIQILGVKTSRFLCQRPDGALYGSLHFDPEACSFRELLLEDGYNVYQSEAHGLPLHLPGCKSPHRDPAPRGPARFLPLPGLPPAPPEPPGILAPQPPDVGSSDPLSMVGSQGRSPSYAS

SEQ ID NO: 1523 - protein, 473 aa, Artificial Sequence
  Fusion Protein
GHGEGTFTSDLSIQLDEEAVREFIEWLLATGPSSGAPPPSGGGGGGGSGGGGSGGGGSADKTHTCPPCPAPEAAGGPSVFLFPPKPKDTLMISRTPEVTCVVVDVSHEDPEVKFNWYVDGVEVHNAKTKPREEQYNSTYRVVSVLTVLHQDWLNGKEYKCKVSNKALPAPIEKTISKAKGQPREPQVYTLPPSRDELTKNQVSLTCLVKGFYPSDIAVEWESNGQPENNYKTTPPVLDSDGSFFLYSKLTVDKSRWQQGNVFSCSVMHEALHNHYTQKSLSLSPGGGGSGSAHPIPDSSPLLQFGGQVRQRYLYTDDACQTEAHLEIREDGTVGGAADQSPESLLQLKALKPGVIQILGVKTSRFLCQRPDGALYGSLHFDPEACSFRELLLEDGYNVYQSEAHGLPLHLPGCKSPHRDPAPRGPARFLPLPGLPPAPPEPPGILAPQPPDVGSSDPLSMVYPSQGRSPSYAS

SEQ ID NO: 1524 - protein, 472 aa, Artificial Sequence
  Fusion Protein
GHGEGTFTSDLSIQLDEEAVREFIEWLLATGPSSGAPPPSGGGGGGGSGGGGSGGGGSADKTHTCPPCPAPEAAGGPSVFLFPPKPKDTLMISRTPEVTCVVVDVSHEDPEVKFNWYVDGVEVHNAKTKPREEQYNSTYRVVSVLTVLHQDWLNGKEYKCKVSNKALPAPIEKTISKAKGQPREPQVYTLPPSRDELTKNQVSLTCLVKGFYPSDIAVEWESNGQPENNYKTTPPVLDSDGSFFLYSKLTVDKSRWQQGNVFSCSVMHEALHNHYTQKSLSLSPGGGGSGSAHPIPDSSPLLQFGGQVRQRYLYTDDACQTEAHLEIREDGTVGGAADQSPESLLQLKALKPGVIQILGVKTSRFLCQRPDGALYGSLHFDPEACSFRELLLEDGYNVYQSEAHGLPLHLCGNKSPHRDPAPRGPARFLPLPGLPPAPPEPPGILAPQPPDVGSSDPLSMVGSQGRSPSYAS

SEQ ID NO: 1525 - protein, 473 aa, Artificial Sequence
  Fusion Protein
GHGEGTFTSDLSIQLDEEAVREFIEWLLATGPSSGAPPPSGGGGGGGSGGGGSGGGGSADKTHTCPPCPAPEAAGGPSVFLFPPKPKDTLMISRTPEVTCVVVDVSHEDPEVKFNWYVDGVEVHNAKTKPREEQYNSTYRVVSVLTVLHQDWLNGKEYKCKVSNKALPAPIEKTISKAKGQPREPQVYTLPPSRDELTKNQVSLTCLVKGFYPSDIAVEWESNGQPENNYKTTPPVLDSDGSFFLYSKLTVDKSRWQQGNVFSCSVMHEALHNHYTQKSLSLSPGGGGSGSAHPIPDSSPLLQFGGQVRQRYLYTDDACQTEAHLEIREDGTVGGAADQSPESLLQLKALKPGVIQILGVKTSRFLCQRPDGALYGSLHFDPEACSFRELLLEDGYNVYQSEAHGLPLHLCGNKSPHRDPAPRGPARFLPLPGLPPAPPEPPGILAPQPPDVGSSDPLSMVYPSQGRSPSYAS

SEQ ID NO: 1526 - protein, 472 aa, Artificial Sequence
  Fusion Protein
GHGEGTFTSDLSIQLDEEAVREFIEWLLATGPSSGAPPPSGGGGGGGSGGGGSGGGGSADKTHTCPPCPAPELLGGPSVFLFPPKPKDTLMISRTPEVTCVVVDVSHEDPEVKFNWYVDGVEVHNAKTKPREEQYNNASRVVSVLTVLHQDWLNGKEYKCKVSNKALPAPIEKTISKAKGQPREPQVYTLPPSRDELTKNQVSLTCLVKGFYPSDIAVEWESNGQPENNYKTTPPVLDSDGSFFLYSKLTVDKSRWQQGNVFSCSVMHEALHNHYTQKSLSLSPGGGGSGSAHPIPDSSPLLQFGGQVRQRYLYTDDACQTEAHLEIREDGTVGGAADQSPESLLQLKALKPGVIQILGVKTSRFLCQRPDGALYGSLHFDPEACSFRELLLEDGYNVYQSEAHGLPLHLPGCKSPHRDPAPRGPARFLPLPGLPPAPPEPPGILAPQPPDVGSSDPLSMVGSQGRSPSYAS

SEQ ID NO: 1527 - protein, 473 aa, Artificial Sequence
  Fusion Protein
GHGEGTFTSDLSIQLDEEAVREFIEWLLATGPSSGAPPPSGGGGGGGSGGGGSGGGGSADKTHTCPPCPAPELLGGPSVFLFPPKPKDTLMISRTPEVTCVVVDVSHEDPEVKFNWYVDGVEVHNAKTKPREEQYNNASRVVSVLTVLHQDWLNGKEYKCKVSNKALPAPIEKTISKAKGQPREPQVYTLPPSRDELTKNQVSLTCLVKGFYPSDIAVEWESNGQPENNYKTTPPVLDSDGSFFLYSKLTVDKSRWQQGNVFSCSVMHEALHNHYTQKSLSLSPGGGGSGSAHPIPDSSPLLQFGGQVRQRYLYTDDACQTEAHLEIREDGTVGGAADQSPESLLQLKALKPGVIQILGVKTSRFLCQRPDGALYGSLHFDPEACSFRELLLEDGYNVYQSEAHGLPLHLPGCKSPHRDPAPRGPARFLPLPGLPPAPPEPPGILAPQPPDVGSSDPLSMVYPSQGRSPSYAS

SEQ ID NO: 1528 - protein, 472 aa, Artificial Sequence
  Fusion Protein
GHGEGTFTSDLSIQLDEEAVREFIEWLLATGPSSGAPPPSGGGGGGGSGGGGSGGGGSADKTHTCPPCPAPELLGGPSVFLFPPKPKDTLMISRTPEVTCVVVDVSHEDPEVKFNWYVDGVEVHNAKTKPREEQYNNASRVVSVLTVLHQDWLNGKEYKCKVSNKALPAPIEKTISKAKGQPREPQVYTLPPSRDELTKNQVSLTCLVKGFYPSDIAVEWESNGQPENNYKTTPPVLDSDGSFFLYSKLTVDKSRWQQGNVFSCSVMHEALHNHYTQKSLSLSPGGGGSGSAHPIPDSSPLLQFGGQVRQRYLYTDDACQTEAHLEIREDGTVGGAADQSPESLLQLKALKPGVIQILGVKTSRFLCQRPDGALYGSLHFDPEACSFRELLLEDGYNVYQSEAHGLPLHLCGNKSPHRDPAPRGPARFLPLPGLPPAPPEPPGILAPQPPDVGSSDPLSMVGSQGRSPSYAS

SEQ ID NO: 1529 - protein, 473 aa, Artificial Sequence
  Fusion Protein
GHGEGTFTSDLSIQLDEEAVREFIEWLLATGPSSGAPPPSGGGGGGGSGGGGSGGGGSADKTHTCPPCPAPELLGGPSVFLFPPKPKDTLMISRTPEVTCVVVDVSHEDPEVKFNWYVDGVEVHNAKTKPREEQYNNASRVVSVLTVLHQDWLNGKEYKCKVSNKALPAPIEKTISKAKGQPREPQVYTLPPSRDELTKNQVSLTCLVKGFYPSDIAVEWESNGQPENNYKTTPPVLDSDGSFFLYSKLTVDKSRWQQGNVFSCSVMHEALHNHYTQKSLSLSPGGGGSGSAHPIPDSSPLLQFGGQVRQRYLYTDDACQTEAHLEIREDGTVGGAADQSPESLLQLKALKPGVIQILGVKTSRFLCQRPDGALYGSLHFDPEACSFRELLLEDGYNVYQSEAHGLPLHLCGNKSPHRDPAPRGPARFLPLPGLPPAPPEPPGILAPQPPDVGSSDPLSMVYPSQGRSPSYAS

SEQ ID NO: 1530 - protein, 474 aa, Artificial Sequence
  Fusion Protein
GHGEGTFTSDLSIQLDEEAVREFIEWLLATGPSSGAPPPSGGGGGGGSGGGGSGGGGSAESKYGPPCPPCPAPEFEGGPSVFLFPPKPKDTLMISRTPEVTCVVVDVSQEDPEVQFNWYVDGVEVHNAKTKPREEQFNSTYRVVSVLTVLHQDWLNGKEYKCKVSNKGLPSSIEKTISKAKGQPREPQVYTLPPSQEEMTKNQVSLTCLVKGFYPSDIAVEWESNGQPENNYKTTPPVLDSDGSFFLYSRLTVDKSRWQEGNVFSCSVMHEALHNHYTQKSLSLSLGGGGSGSAHPIPDSSPLLQFGGQVRQRYLYTDDACQTEAHLEIREDGTVGGAADQSPESLLQLKALKPGVIQILGVKTSRFLCQRPDGALYGSLHFDPEACSFRELLLEDGYNVYQSEAHGLPLHLPGCKSPHRDPAPRGPARFLPLPGLPPAPPEPPGILAPQPPDVGSSDPLSMVGSQGRSPSYAS

SEQ ID NO: 1531 - protein, 475 aa, Artificial Sequence
  Fusion Protein
GHGEGTFTSDLSIQLDEEAVREFIEWLLATGPSSGAPPPSGGGGGGGSGGGGSGGGGSAESKYGPPCPPCPAPEFEGGPSVFLFPPKPKDTLMISRTPEVTCVVVDVSQEDPEVQFNWYVDGVEVHNAKTKPREEQFNSTYRVVSVLTVLHQDWLNGKEYKCKVSNKGLPSSIEKTISKAKGQPREPQVYTLPPSQEEMTKNQVSLTCLVKGFYPSDIAVEWESNGQPENNYKTTPPVLDSDGSFFLYSRLTVDKSRWQEGNVFSCSVMHEALHNHYTQKSLSLSLGGGGSGSAHPIPDSSPLLQFGGQVRQRYLYTDDACQTEAHLEIREDGTVGGAADQSPESLLQLKALKPGVIQILGVKTSRFLCQRPDGALYGSLHFDPEACSFRELLLEDGYNVYQSEAHGLPLHLPGCKSPHRDPAPRGPARFLPLPGLPPAPPEPPGILAPQPPDVGSSDPLSMVYPSQGRSPSYAS

SEQ ID NO: 1532 - protein, 474 aa, Artificial Sequence
  Fusion Protein
GHGEGTFTSDLSIQLDEEAVREFIEWLLATGPSSGAPPPSGGGGGGGSGGGGSGGGGSAESKYGPPCPPCPAPEFEGGPSVFLFPPKPKDTLMISRTPEVTCVVVDVSQEDPEVQFNWYVDGVEVHNAKTKPREEQFNSTYRVVSVLTVLHQDWLNGKEYKCKVSNKGLPSSIEKTISKAKGQPREPQVYTLPPSQEEMTKNQVSLTCLVKGFYPSDIAVEWESNGQPENNYKTTPPVLDSDGSFFLYSRLTVDKSRWQEGNVFSCSVMHEALHNHYTQKSLSLSLGGGGSGSAHPIPDSSPLLQFGGQVRQRYLYTDDACQTEAHLEIREDGTVGGAADQSPESLLQLKALKPGVIQILGVKTSRFLCQRPDGALYGSLHFDPEACSFRELLLEDGYNVYQSEAHGLPLHLCGNKSPHRDPAPRGPARFLPLPGLPPAPPEPPGILAPQPPDVGSSDPLSMVGSQGRSPSYAS

SEQ ID NO: 1533 - protein, 475 aa, Artificial Sequence
  Fusion Protein
GHGEGTFTSDLSIQLDEEAVREFIEWLLATGPSSGAPPPSGGGGGGGSGGGGSGGGGSAESKYGPPCPPCPAPEFEGGPSVFLFPPKPKDTLMISRTPEVTCVVVDVSQEDPEVQFNWYVDGVEVHNAKTKPREEQFNSTYRVVSVLTVLHQDWLNGKEYKCKVSNKGLPSSIEKTISKAKGQPREPQVYTLPPSQEEMTKNQVSLTCLVKGFYPSDIAVEWESNGQPENNYKTTPPVLDSDGSFFLYSRLTVDKSRWQEGNVFSCSVMHEALHNHYTQKSLSLSLGGGGSGSAHPIPDSSPLLQFGGQVRQRYLYTDDACQTEAHLEIREDGTVGGAADQSPESLLQLKALKPGVIQILGVKTSRFLCQRPDGALYGSLHFDPEACSFRELLLEDGYNVYQSEAHGLPLHLCGNKSPHRDPAPRGPARFLPLPGLPPAPPEPPGILAPQPPDVGSSDPLSMVYPSQGRSPSYAS

SEQ ID NO: 1534 - protein, 472 aa, Artificial Sequence
  Fusion Protein
GHGEGTFTSDLSIQLDEEAVQEFIEWLLATGPVSGAPPPSGGGGGGGSGGGGSGGGGSADKTHTCPPCPAPEAAGGPSVFLFPPKPKDTLMISRTPEVTCVVVDVSHEDPEVKFNWYVDGVEVHNAKTKPREEQYNSTYRVVSVLTVLHQDWLNGKEYKCKVSNKALPAPIEKTISKAKGQPREPQVYTLPPSRDELTKNQVSLTCLVKGFYPSDIAVEWESNGQPENNYKTTPPVLDSDGSFFLYSKLTVDKSRWQQGNVFSCSVMHEALHNHYTQKSLSLSPGGGGSGSAHPIPDSSPLLQFGGQVRQRYLYTDDACQTEAHLEIREDGTVGGAADQSPESLLQLKALKPGVIQILGVKTSRFLCQRPDGALYGSLHFDPEACSFRELLLEDGYNVYQSEAHGLPLHLPGCKSPHRDPAPRGPARFLPLPGLPPAPPEPPGILAPQPPDVGSSDPLSMVGSQGRSPSYAS

SEQ ID NO: 1535 - protein, 473 aa, Artificial Sequence
  Fusion Protein
GHGEGTFTSDLSIQLDEEAVQEFIEWLLATGPVSGAPPPSGGGGGGGSGGGGSGGGGSADKTHTCPPCPAPEAAGGPSVFLFPPKPKDTLMISRTPEVTCVVVDVSHEDPEVKFNWYVDGVEVHNAKTKPREEQYNSTYRVVSVLTVLHQDWLNGKEYKCKVSNKALPAPIEKTISKAKGQPREPQVYTLPPSRDELTKNQVSLTCLVKGFYPSDIAVEWESNGQPENNYKTTPPVLDSDGSFFLYSKLTVDKSRWQQGNVFSCSVMHEALHNHYTQKSLSLSPGGGGSGSAHPIPDSSPLLQFGGQVRQRYLYTDDACQTEAHLEIREDGTVGGAADQSPESLLQLKALKPGVIQILGVKTSRFLCQRPDGALYGSLHFDPEACSFRELLLEDGYNVYQSEAHGLPLHLPGCKSPHRDPAPRGPARFLPLPGLPPAPPEPPGILAPQPPDVGSSDPLSMVYPSQGRSPSYAS

SEQ ID NO: 1536 - protein, 472 aa, Artificial Sequence
  Fusion Protein
GHGEGTFTSDLSIQLDEEAVQEFIEWLLATGPVSGAPPPSGGGGGGGSGGGGSGGGGSADKTHTCPPCPAPEAAGGPSVFLFPPKPKDTLMISRTPEVTCVVVDVSHEDPEVKFNWYVDGVEVHNAKTKPREEQYNSTYRVVSVLTVLHQDWLNGKEYKCKVSNKALPAPIEKTISKAKGQPREPQVYTLPPSRDELTKNQVSLTCLVKGFYPSDIAVEWESNGQPENNYKTTPPVLDSDGSFFLYSKLTVDKSRWQQGNVFSCSVMHEALHNHYTQKSLSLSPGGGGSGSAHPIPDSSPLLQFGGQVRQRYLYTDDACQTEAHLEIREDGTVGGAADQSPESLLQLKALKPGVIQILGVKTSRFLCQRPDGALYGSLHFDPEACSFRELLLEDGYNVYQSEAHGLPLHLCGNKSPHRDPAPRGPARFLPLPGLPPAPPEPPGILAPQPPDVGSSDPLSMVGSQGRSPSYAS

SEQ ID NO: 1537 - protein, 473 aa, Artificial Sequence
  Fusion Protein
GHGEGTFTSDLSIQLDEEAVQEFIEWLLATGPVSGAPPPSGGGGGGGSGGGGSGGGGSADKTHTCPPCPAPEAAGGPSVFLFPPKPKDTLMISRTPEVTCVVVDVSHEDPEVKFNWYVDGVEVHNAKTKPREEQYNSTYRVVSVLTVLHQDWLNGKEYKCKVSNKALPAPIEKTISKAKGQPREPQVYTLPPSRDELTKNQVSLTCLVKGFYPSDIAVEWESNGQPENNYKTTPPVLDSDGSFFLYSKLTVDKSRWQQGNVFSCSVMHEALHNHYTQKSLSLSPGGGGSGSAHPIPDSSPLLQFGGQVRQRYLYTDDACQTEAHLEIREDGTVGGAADQSPESLLQLKALKPGVIQILGVKTSRFLCQRPDGALYGSLHFDPEACSFRELLLEDGYNVYQSEAHGLPLHLCGNKSPHRDPAPRGPARFLPLPGLPPAPPEPPGILAPQPPDVGSSDPLSMVYPSQGRSPSYAS

SEQ ID NO: 1538 - protein, 472 aa, Artificial Sequence
  Fusion Protein
GHGEGTFTSDLSIQLDEEAVQEFIEWLLATGPVSGAPPPSGGGGGGGSGGGGSGGGGSADKTHTCPPCPAPELLGGPSVFLFPPKPKDTLMISRTPEVTCVVVDVSHEDPEVKFNWYVDGVEVHNAKTKPREEQYNNASRVVSVLTVLHQDWLNGKEYKCKVSNKALPAPIEKTISKAKGQPREPQVYTLPPSRDELTKNQVSLTCLVKGFYPSDIAVEWESNGQPENNYKTTPPVLDSDGSFFLYSKLTVDKSRWQQGNVFSCSVMHEALHNHYTQKSLSLSPGGGGSGSAHPIPDSSPLLQFGGQVRQRYLYTDDACQTEAHLEIREDGTVGGAADQSPESLLQLKALKPGVIQILGVKTSRFLCQRPDGALYGSLHFDPEACSFRELLLEDGYNVYQSEAHGLPLHLPGCKSPHRDPAPRGPARFLPLPGLPPAPPEPPGILAPQPPDVGSSDPLSMVGSQGRSPSYAS

SEQ ID NO: 1539 - protein, 473 aa, Artificial Sequence
  Fusion Protein
GHGEGTFTSDLSIQLDEEAVQEFIEWLLATGPVSGAPPPSGGGGGGGSGGGGSGGGGSADKTHTCPPCPAPELLGGPSVFLFPPKPKDTLMISRTPEVTCVVVDVSHEDPEVKFNWYVDGVEVHNAKTKPREEQYNNASRVVSVLTVLHQDWLNGKEYKCKVSNKALPAPIEKTISKAKGQPREPQVYTLPPSRDELTKNQVSLTCLVKGFYPSDIAVEWESNGQPENNYKTTPPVLDSDGSFFLYSKLTVDKSRWQQGNVFSCSVMHEALHNHYTQKSLSLSPGGGGSGSAHPIPDSSPLLQFGGQVRQRYLYTDDACQTEAHLEIREDGTVGGAADQSPESLLQLKALKPGVIQILGVKTSRFLCQRPDGALYGSLHFDPEACSFRELLLEDGYNVYQSEAHGLPLHLPGCKSPHRDPAPRGPARFLPLPGLPPAPPEPPGILAPQPPDVGSSDPLSMVYPSQGRSPSYAS

SEQ ID NO: 1540 - protein, 472 aa, Artificial Sequence
  Fusion Protein
GHGEGTFTSDLSIQLDEEAVQEFIEWLLATGPVSGAPPPSGGGGGGGSGGGGSGGGGSADKTHTCPPCPAPELLGGPSVFLFPPKPKDTLMISRTPEVTCVVVDVSHEDPEVKFNWYVDGVEVHNAKTKPREEQYNNASRVVSVLTVLHQDWLNGKEYKCKVSNKALPAPIEKTISKAKGQPREPQVYTLPPSRDELTKNQVSLTCLVKGFYPSDIAVEWESNGQPENNYKTTPPVLDSDGSFFLYSKLTVDKSRWQQGNVFSCSVMHEALHNHYTQKSLSLSPGGGGSGSAHPIPDSSPLLQFGGQVRQRYLYTDDACQTEAHLEIREDGTVGGAADQSPESLLQLKALKPGVIQILGVKTSRFLCQRPDGALYGSLHFDPEACSFRELLLEDGYNVYQSEAHGLPLHLCGNKSPHRDPAPRGPARFLPLPGLPPAPPEPPGILAPQPPDVGSSDPLSMVGSQGRSPSYAS

SEQ ID NO: 1541 - protein, 473 aa, Artificial Sequence
  Fusion Protein
GHGEGTFTSDLSIQLDEEAVQEFIEWLLATGPVSGAPPPSGGGGGGGSGGGGSGGGGSADKTHTCPPCPAPELLGGPSVFLFPPKPKDTLMISRTPEVTCVVVDVSHEDPEVKFNWYVDGVEVHNAKTKPREEQYNNASRVVSVLTVLHQDWLNGKEYKCKVSNKALPAPIEKTISKAKGQPREPQVYTLPPSRDELTKNQVSLTCLVKGFYPSDIAVEWESNGQPENNYKTTPPVLDSDGSFFLYSKLTVDKSRWQQGNVFSCSVMHEALHNHYTQKSLSLSPGGGGSGSAHPIPDSSPLLQFGGQVRQRYLYTDDACQTEAHLEIREDGTVGGAADQSPESLLQLKALKPGVIQILGVKTSRFLCQRPDGALYGSLHFDPEACSFRELLLEDGYNVYQSEAHGLPLHLCGNKSPHRDPAPRGPARFLPLPGLPPAPPEPPGILAPQPPDVGSSDPLSMVYPSQGRSPSYAS

SEQ ID NO: 1542 - protein, 474 aa, Artificial Sequence
  Fusion Protein
GHGEGTFTSDLSIQLDEEAVQEFIEWLLATGPVSGAPPPSGGGGGGGSGGGGSGGGGSAESKYGPPCPPCPAPEFEGGPSVFLFPPKPKDTLMISRTPEVTCVVVDVSQEDPEVQFNWYVDGVEVHNAKTKPREEQFNSTYRVVSVLTVLHQDWLNGKEYKCKVSNKGLPSSIEKTISKAKGQPREPQVYTLPPSQEEMTKNQVSLTCLVKGFYPSDIAVEWESNGQPENNYKTTPPVLDSDGSFFLYSRLTVDKSRWQEGNVFSCSVMHEALHNHYTQKSLSLSLGGGGSGSAHPIPDSSPLLQFGGQVRQRYLYTDDACQTEAHLEIREDGTVGGAADQSPESLLQLKALKPGVIQILGVKTSRFLCQRPDGALYGSLHFDPEACSFRELLLEDGYNVYQSEAHGLPLHLPGCKSPHRDPAPRGPARFLPLPGLPPAPPEPPGILAPQPPDVGSSDPLSMVGSQGRSPSYAS

SEQ ID NO: 1543 - protein, 475 aa, Artificial Sequence
  Fusion Protein
GHGEGTFTSDLSIQLDEEAVQEFIEWLLATGPVSGAPPPSGGGGGGGSGGGGSGGGGSAESKYGPPCPPCPAPEFEGGPSVFLFPPKPKDTLMISRTPEVTCVVVDVSQEDPEVQFNWYVDGVEVHNAKTKPREEQFNSTYRVVSVLTVLHQDWLNGKEYKCKVSNKGLPSSIEKTISKAKGQPREPQVYTLPPSQEEMTKNQVSLTCLVKGFYPSDIAVEWESNGQPENNYKTTPPVLDSDGSFFLYSRLTVDKSRWQEGNVFSCSVMHEALHNHYTQKSLSLSLGGGGSGSAHPIPDSSPLLQFGGQVRQRYLYTDDACQTEAHLEIREDGTVGGAADQSPESLLQLKALKPGVIQILGVKTSRFLCQRPDGALYGSLHFDPEACSFRELLLEDGYNVYQSEAHGLPLHLPGCKSPHRDPAPRGPARFLPLPGLPPAPPEPPGILAPQPPDVGSSDPLSMVYPSQGRSPSYAS

SEQ ID NO: 1544 - protein, 474 aa, Artificial Sequence
  Fusion Protein
GHGEGTFTSDLSIQLDEEAVQEFIEWLLATGPVSGAPPPSGGGGGGGSGGGGSGGGGSAESKYGPPCPPCPAPEFEGGPSVFLFPPKPKDTLMISRTPEVTCVVVDVSQEDPEVQFNWYVDGVEVHNAKTKPREEQFNSTYRVVSVLTVLHQDWLNGKEYKCKVSNKGLPSSIEKTISKAKGQPREPQVYTLPPSQEEMTKNQVSLTCLVKGFYPSDIAVEWESNGQPENNYKTTPPVLDSDGSFFLYSRLTVDKSRWQEGNVFSCSVMHEALHNHYTQKSLSLSLGGGGSGSAHPIPDSSPLLQFGGQVRQRYLYTDDACQTEAHLEIREDGTVGGAADQSPESLLQLKALKPGVIQILGVKTSRFLCQRPDGALYGSLHFDPEACSFRELLLEDGYNVYQSEAHGLPLHLCGNKSPHRDPAPRGPARFLPLPGLPPAPPEPPGILAPQPPDVGSSDPLSMVGSQGRSPSYAS

SEQ ID NO: 1545 - protein, 475 aa, Artificial Sequence
  Fusion Protein
GHGEGTFTSDLSIQLDEEAVQEFIEWLLATGPVSGAPPPSGGGGGGGSGGGGSGGGGSAESKYGPPCPPCPAPEFEGGPSVFLFPPKPKDTLMISRTPEVTCVVVDVSQEDPEVQFNWYVDGVEVHNAKTKPREEQFNSTYRVVSVLTVLHQDWLNGKEYKCKVSNKGLPSSIEKTISKAKGQPREPQVYTLPPSQEEMTKNQVSLTCLVKGFYPSDIAVEWESNGQPENNYKTTPPVLDSDGSFFLYSRLTVDKSRWQEGNVFSCSVMHEALHNHYTQKSLSLSLGGGGSGSAHPIPDSSPLLQFGGQVRQRYLYTDDACQTEAHLEIREDGTVGGAADQSPESLLQLKALKPGVIQILGVKTSRFLCQRPDGALYGSLHFDPEACSFRELLLEDGYNVYQSEAHGLPLHLCGNKSPHRDPAPRGPARFLPLPGLPPAPPEPPGILAPQPPDVGSSDPLSMVYPSQGRSPSYAS

SEQ ID NO: 1546 - protein, 472 aa, Artificial Sequence
  Fusion Protein
GHGEGTFTSDLSIQLDEEAVQLFIEWLLATGPVSGAPPPSGGGGGGGSGGGGSGGGGSADKTHTCPPCPAPEAAGGPSVFLFPPKPKDTLMISRTPEVTCVVVDVSHEDPEVKFNWYVDGVEVHNAKTKPREEQYNSTYRVVSVLTVLHQDWLNGKEYKCKVSNKALPAPIEKTISKAKGQPREPQVYTLPPSRDELTKNQVSLTCLVKGFYPSDIAVEWESNGQPENNYKTTPPVLDSDGSFFLYSKLTVDKSRWQQGNVFSCSVMHEALHNHYTQKSLSLSPGGGGSGSAHPIPDSSPLLQFGGQVRQRYLYTDDACQTEAHLEIREDGTVGGAADQSPESLLQLKALKPGVIQILGVKTSRFLCQRPDGALYGSLHFDPEACSFRELLLEDGYNVYQSEAHGLPLHLPGCKSPHRDPAPRGPARFLPLPGLPPAPPEPPGILAPQPPDVGSSDPLSMVGSQGRSPSYAS

SEQ ID NO: 1547 - protein, 473 aa, Artificial Sequence
  Fusion Protein
GHGEGTFTSDLSIQLDEEAVQLFIEWLLATGPVSGAPPPSGGGGGGGSGGGGSGGGGSADKTHTCPPCPAPEAAGGPSVFLFPPKPKDTLMISRTPEVTCVVVDVSHEDPEVKFNWYVDGVEVHNAKTKPREEQYNSTYRVVSVLTVLHQDWLNGKEYKCKVSNKALPAPIEKTISKAKGQPREPQVYTLPPSRDELTKNQVSLTCLVKGFYPSDIAVEWESNGQPENNYKTTPPVLDSDGSFFLYSKLTVDKSRWQQGNVFSCSVMHEALHNHYTQKSLSLSPGGGGSGSAHPIPDSSPLLQFGGQVRQRYLYTDDACQTEAHLEIREDGTVGGAADQSPESLLQLKALKPGVIQILGVKTSRFLCQRPDGALYGSLHFDPEACSFRELLLEDGYNVYQSEAHGLPLHLPGCKSPHRDPAPRGPARFLPLPGLPPAPPEPPGILAPQPPDVGSSDPLSMVYPSQGRSPSYAS

SEQ ID NO: 1548 - protein, 472 aa, Artificial Sequence
  Fusion Protein
GHGEGTFTSDLSIQLDEEAVQLFIEWLLATGPVSGAPPPSGGGGGGGSGGGGSGGGGSADKTHTCPPCPAPEAAGGPSVFLFPPKPKDTLMISRTPEVTCVVVDVSHEDPEVKFNWYVDGVEVHNAKTKPREEQYNSTYRVVSVLTVLHQDWLNGKEYKCKVSNKALPAPIEKTISKAKGQPREPQVYTLPPSRDELTKNQVSLTCLVKGFYPSDIAVEWESNGQPENNYKTTPPVLDSDGSFFLYSKLTVDKSRWQQGNVFSCSVMHEALHNHYTQKSLSLSPGGGGSGSAHPIPDSSPLLQFGGQVRQRYLYTDDACQTEAHLEIREDGTVGGAADQSPESLLQLKALKPGVIQILGVKTSRFLCQRPDGALYGSLHFDPEACSFRELLLEDGYNVYQSEAHGLPLHLCGNKSPHRDPAPRGPARFLPLPGLPPAPPEPPGILAPQPPDVGSSDPLSMVGSQGRSPSYAS

SEQ ID NO: 1549 - protein, 473 aa, Artificial Sequence
  Fusion Protein
GHGEGTFTSDLSIQLDEEAVQLFIEWLLATGPVSGAPPPSGGGGGGGSGGGGSGGGGSADKTHTCPPCPAPEAAGGPSVFLFPPKPKDTLMISRTPEVTCVVVDVSHEDPEVKFNWYVDGVEVHNAKTKPREEQYNSTYRVVSVLTVLHQDWLNGKEYKCKVSNKALPAPIEKTISKAKGQPREPQVYTLPPSRDELTKNQVSLTCLVKGFYPSDIAVEWESNGQPENNYKTTPPVLDSDGSFFLYSKLTVDKSRWQQGNVFSCSVMHEALHNHYTQKSLSLSPGGGGSGSAHPIPDSSPLLQFGGQVRQRYLYTDDACQTEAHLEIREDGTVGGAADQSPESLLQLKALKPGVIQILGVKTSRFLCQRPDGALYGSLHFDPEACSFRELLLEDGYNVYQSEAHGLPLHLCGNKSPHRDPAPRGPARFLPLPGLPPAPPEPPGILAPQPPDVGSSDPLSMVYPSQGRSPSYAS

SEQ ID NO: 1550 - protein, 472 aa, Artificial Sequence
  Fusion Protein
GHGEGTFTSDLSIQLDEEAVQLFIEWLLATGPVSGAPPPSGGGGGGGSGGGGSGGGGSADKTHTCPPCPAPELLGGPSVFLFPPKPKDTLMISRTPEVTCVVVDVSHEDPEVKFNWYVDGVEVHNAKTKPREEQYNNASRVVSVLTVLHQDWLNGKEYKCKVSNKALPAPIEKTISKAKGQPREPQVYTLPPSRDELTKNQVSLTCLVKGFYPSDIAVEWESNGQPENNYKTTPPVLDSDGSFFLYSKLTVDKSRWQQGNVFSCSVMHEALHNHYTQKSLSLSPGGGGSGSAHPIPDSSPLLQFGGQVRQRYLYTDDACQTEAHLEIREDGTVGGAADQSPESLLQLKALKPGVIQILGVKTSRFLCQRPDGALYGSLHFDPEACSFRELLLEDGYNVYQSEAHGLPLHLPGCKSPHRDPAPRGPARFLPLPGLPPAPPEPPGILAPQPPDVGSSDPLSMVGSQGRSPSYAS

SEQ ID NO: 1551 - protein, 473 aa, Artificial Sequence
  Fusion Protein
GHGEGTFTSDLSIQLDEEAVQLFIEWLLATGPVSGAPPPSGGGGGGGSGGGGSGGGGSADKTHTCPPCPAPELLGGPSVFLFPPKPKDTLMISRTPEVTCVVVDVSHEDPEVKFNWYVDGVEVHNAKTKPREEQYNNASRVVSVLTVLHQDWLNGKEYKCKVSNKALPAPIEKTISKAKGQPREPQVYTLPPSRDELTKNQVSLTCLVKGFYPSDIAVEWESNGQPENNYKTTPPVLDSDGSFFLYSKLTVDKSRWQQGNVFSCSVMHEALHNHYTQKSLSLSPGGGGSGSAHPIPDSSPLLQFGGQVRQRYLYTDDACQTEAHLEIREDGTVGGAADQSPESLLQLKALKPGVIQILGVKTSRFLCQRPDGALYGSLHFDPEACSFRELLLEDGYNVYQSEAHGLPLHLPGCKSPHRDPAPRGPARFLPLPGLPPAPPEPPGILAPQPPDVGSSDPLSMVYPSQGRSPSYAS

SEQ ID NO: 1552 - protein, 472 aa, Artificial Sequence
  Fusion Protein
GHGEGTFTSDLSIQLDEEAVQLFIEWLLATGPVSGAPPPSGGGGGGGSGGGGSGGGGSADKTHTCPPCPAPELLGGPSVFLFPPKPKDTLMISRTPEVTCVVVDVSHEDPEVKFNWYVDGVEVHNAKTKPREEQYNNASRVVSVLTVLHQDWLNGKEYKCKVSNKALPAPIEKTISKAKGQPREPQVYTLPPSRDELTKNQVSLTCLVKGFYPSDIAVEWESNGQPENNYKTTPPVLDSDGSFFLYSKLTVDKSRWQQGNVFSCSVMHEALHNHYTQKSLSLSPGGGGSGSAHPIPDSSPLLQFGGQVRQRYLYTDDACQTEAHLEIREDGTVGGAADQSPESLLQLKALKPGVIQILGVKTSRFLCQRPDGALYGSLHFDPEACSFRELLLEDGYNVYQSEAHGLPLHLCGNKSPHRDPAPRGPARFLPLPGLPPAPPEPPGILAPQPPDVGSSDPLSMVGSQGRSPSYAS

SEQ ID NO: 1553 - protein, 473 aa, Artificial Sequence
  Fusion Protein
GHGEGTFTSDLSIQLDEEAVQLFIEWLLATGPVSGAPPPSGGGGGGGSGGGGSGGGGSADKTHTCPPCPAPELLGGPSVFLFPPKPKDTLMISRTPEVTCVVVDVSHEDPEVKFNWYVDGVEVHNAKTKPREEQYNNASRVVSVLTVLHQDWLNGKEYKCKVSNKALPAPIEKTISKAKGQPREPQVYTLPPSRDELTKNQVSLTCLVKGFYPSDIAVEWESNGQPENNYKTTPPVLDSDGSFFLYSKLTVDKSRWQQGNVFSCSVMHEALHNHYTQKSLSLSPGGGGSGSAHPIPDSSPLLQFGGQVRQRYLYTDDACQTEAHLEIREDGTVGGAADQSPESLLQLKALKPGVIQILGVKTSRFLCQRPDGALYGSLHFDPEACSFRELLLEDGYNVYQSEAHGLPLHLCGNKSPHRDPAPRGPARFLPLPGLPPAPPEPPGILAPQPPDVGSSDPLSMVYPSQGRSPSYAS

SEQ ID NO: 1554 - protein, 474 aa, Artificial Sequence
  Fusion Protein
GHGEGTFTSDLSIQLDEEAVQLFIEWLLATGPVSGAPPPSGGGGGGGSGGGGSGGGGSAESKYGPPCPPCPAPEFEGGPSVFLFPPKPKDTLMISRTPEVTCVVVDVSQEDPEVQFNWYVDGVEVHNAKTKPREEQFNSTYRVVSVLTVLHQDWLNGKEYKCKVSNKGLPSSIEKTISKAKGQPREPQVYTLPPSQEEMTKNQVSLTCLVKGFYPSDIAVEWESNGQPENNYKTTPPVLDSDGSFFLYSRLTVDKSRWQEGNVFSCSVMHEALHNHYTQKSLSLSLGGGGSGSAHPIPDSSPLLQFGGQVRQRYLYTDDACQTEAHLEIREDGTVGGAADQSPESLLQLKALKPGVIQILGVKTSRFLCQRPDGALYGSLHFDPEACSFRELLLEDGYNVYQSEAHGLPLHLPGCKSPHRDPAPRGPARFLPLPGLPPAPPEPPGILAPQPPDVGSSDPLSMVGSQGRSPSYAS

SEQ ID NO: 1555 - protein, 475 aa, Artificial Sequence
  Fusion Protein
GHGEGTFTSDLSIQLDEEAVQLFIEWLLATGPVSGAPPPSGGGGGGGSGGGGSGGGGSAESKYGPPCPPCPAPEFEGGPSVFLFPPKPKDTLMISRTPEVTCVVVDVSQEDPEVQFNWYVDGVEVHNAKTKPREEQFNSTYRVVSVLTVLHQDWLNGKEYKCKVSNKGLPSSIEKTISKAKGQPREPQVYTLPPSQEEMTKNQVSLTCLVKGFYPSDIAVEWESNGQPENNYKTTPPVLDSDGSFFLYSRLTVDKSRWQEGNVFSCSVMHEALHNHYTQKSLSLSLGGGGSGSAHPIPDSSPLLQFGGQVRQRYLYTDDACQTEAHLEIREDGTVGGAADQSPESLLQLKALKPGVIQILGVKTSRFLCQRPDGALYGSLHFDPEACSFRELLLEDGYNVYQSEAHGLPLHLPGCKSPHRDPAPRGPARFLPLPGLPPAPPEPPGILAPQPPDVGSSDPLSMVYPSQGRSPSYAS

SEQ ID NO: 1556 - protein, 474 aa, Artificial Sequence
  Fusion Protein
GHGEGTFTSDLSIQLDEEAVQLFIEWLLATGPVSGAPPPSGGGGGGGSGGGGSGGGGSAESKYGPPCPPCPAPEFEGGPSVFLFPPKPKDTLMISRTPEVTCVVVDVSQEDPEVQFNWYVDGVEVHNAKTKPREEQFNSTYRVVSVLTVLHQDWLNGKEYKCKVSNKGLPSSIEKTISKAKGQPREPQVYTLPPSQEEMTKNQVSLTCLVKGFYPSDIAVEWESNGQPENNYKTTPPVLDSDGSFFLYSRLTVDKSRWQEGNVFSCSVMHEALHNHYTQKSLSLSLGGGGSGSAHPIPDSSPLLQFGGQVRQRYLYTDDACQTEAHLEIREDGTVGGAADQSPESLLQLKALKPGVIQILGVKTSRFLCQRPDGALYGSLHFDPEACSFRELLLEDGYNVYQSEAHGLPLHLCGNKSPHRDPAPRGPARFLPLPGLPPAPPEPPGILAPQPPDVGSSDPLSMVGSQGRSPSYAS

SEQ ID NO: 1557 - protein, 475 aa, Artificial Sequence
  Fusion Protein
GHGEGTFTSDLSIQLDEEAVQLFIEWLLATGPVSGAPPPSGGGGGGGSGGGGSGGGGSAESKYGPPCPPCPAPEFEGGPSVFLFPPKPKDTLMISRTPEVTCVVVDVSQEDPEVQFNWYVDGVEVHNAKTKPREEQFNSTYRVVSVLTVLHQDWLNGKEYKCKVSNKGLPSSIEKTISKAKGQPREPQVYTLPPSQEEMTKNQVSLTCLVKGFYPSDIAVEWESNGQPENNYKTTPPVLDSDGSFFLYSRLTVDKSRWQEGNVFSCSVMHEALHNHYTQKSLSLSLGGGGSGSAHPIPDSSPLLQFGGQVRQRYLYTDDACQTEAHLEIREDGTVGGAADQSPESLLQLKALKPGVIQILGVKTSRFLCQRPDGALYGSLHFDPEACSFRELLLEDGYNVYQSEAHGLPLHLCGNKSPHRDPAPRGPARFLPLPGLPPAPPEPPGILAPQPPDVGSSDPLSMVYPSQGRSPSYAS

SEQ ID NO: 1558 - protein, 472 aa, Artificial Sequence
  Fusion Protein
GHGEGTFTSDLSIQLEEEAVQLFIEWLLATGPSSGAPPPSGGGGGGGSGGGGSGGGGSADKTHTCPPCPAPEAAGGPSVFLFPPKPKDTLMISRTPEVTCVVVDVSHEDPEVKFNWYVDGVEVHNAKTKPREEQYNSTYRVVSVLTVLHQDWLNGKEYKCKVSNKALPAPIEKTISKAKGQPREPQVYTLPPSRDELTKNQVSLTCLVKGFYPSDIAVEWESNGQPENNYKTTPPVLDSDGSFFLYSKLTVDKSRWQQGNVFSCSVMHEALHNHYTQKSLSLSPGGGGSGSAHPIPDSSPLLQFGGQVRQRYLYTDDACQTEAHLEIREDGTVGGAADQSPESLLQLKALKPGVIQILGVKTSRFLCQRPDGALYGSLHFDPEACSFRELLLEDGYNVYQSEAHGLPLHLPGCKSPHRDPAPRGPARFLPLPGLPPAPPEPPGILAPQPPDVGSSDPLSMVGSQGRSPSYAS

SEQ ID NO: 1559 - protein, 473 aa, Artificial Sequence
  Fusion Protein
GHGEGTFTSDLSIQLEEEAVQLFIEWLLATGPSSGAPPPSGGGGGGGSGGGGSGGGGSADKTHTCPPCPAPEAAGGPSVFLFPPKPKDTLMISRTPEVTCVVVDVSHEDPEVKFNWYVDGVEVHNAKTKPREEQYNSTYRVVSVLTVLHQDWLNGKEYKCKVSNKALPAPIEKTISKAKGQPREPQVYTLPPSRDELTKNQVSLTCLVKGFYPSDIAVEWESNGQPENNYKTTPPVLDSDGSFFLYSKLTVDKSRWQQGNVFSCSVMHEALHNHYTQKSLSLSPGGGGSGSAHPIPDSSPLLQFGGQVRQRYLYTDDACQTEAHLEIREDGTVGGAADQSPESLLQLKALKPGVIQILGVKTSRFLCQRPDGALYGSLHFDPEACSFRELLLEDGYNVYQSEAHGLPLHLPGCKSPHRDPAPRGPARFLPLPGLPPAPPEPPGILAPQPPDVGSSDPLSMVYPSQGRSPSYAS

SEQ ID NO: 1560 - protein, 472 aa, Artificial Sequence
  Fusion Protein
GHGEGTFTSDLSIQLEEEAVQLFIEWLLATGPSSGAPPPSGGGGGGGSGGGGSGGGGSADKTHTCPPCPAPEAAGGPSVFLFPPKPKDTLMISRTPEVTCVVVDVSHEDPEVKFNWYVDGVEVHNAKTKPREEQYNSTYRVVSVLTVLHQDWLNGKEYKCKVSNKALPAPIEKTISKAKGQPREPQVYTLPPSRDELTKNQVSLTCLVKGFYPSDIAVEWESNGQPENNYKTTPPVLDSDGSFFLYSKLTVDKSRWQQGNVFSCSVMHEALHNHYTQKSLSLSPGGGGSGSAHPIPDSSPLLQFGGQVRQRYLYTDDACQTEAHLEIREDGTVGGAADQSPESLLQLKALKPGVIQILGVKTSRFLCQRPDGALYGSLHFDPEACSFRELLLEDGYNVYQSEAHGLPLHLCGNKSPHRDPAPRGPARFLPLPGLPPAPPEPPGILAPQPPDVGSSDPLSMVGSQGRSPSYAS

SEQ ID NO: 1561 - protein, 473 aa, Artificial Sequence
  Fusion Protein
GHGEGTFTSDLSIQLEEEAVQLFIEWLLATGPSSGAPPPSGGGGGGGSGGGGSGGGGSADKTHTCPPCPAPEAAGGPSVFLFPPKPKDTLMISRTPEVTCVVVDVSHEDPEVKFNWYVDGVEVHNAKTKPREEQYNSTYRVVSVLTVLHQDWLNGKEYKCKVSNKALPAPIEKTISKAKGQPREPQVYTLPPSRDELTKNQVSLTCLVKGFYPSDIAVEWESNGQPENNYKTTPPVLDSDGSFFLYSKLTVDKSRWQQGNVFSCSVMHEALHNHYTQKSLSLSPGGGGSGSAHPIPDSSPLLQFGGQVRQRYLYTDDACQTEAHLEIREDGTVGGAADQSPESLLQLKALKPGVIQILGVKTSRFLCQRPDGALYGSLHFDPEACSFRELLLEDGYNVYQSEAHGLPLHLCGNKSPHRDPAPRGPARFLPLPGLPPAPPEPPGILAPQPPDVGSSDPLSMVYPSQGRSPSYAS

SEQ ID NO: 1562 - protein, 472 aa, Artificial Sequence
  Fusion Protein
GHGEGTFTSDLSIQLEEEAVQLFIEWLLATGPSSGAPPPSGGGGGGGSGGGGSGGGGSADKTHTCPPCPAPELLGGPSVFLFPPKPKDTLMISRTPEVTCVVVDVSHEDPEVKFNWYVDGVEVHNAKTKPREEQYNNASRVVSVLTVLHQDWLNGKEYKCKVSNKALPAPIEKTISKAKGQPREPQVYTLPPSRDELTKNQVSLTCLVKGFYPSDIAVEWESNGQPENNYKTTPPVLDSDGSFFLYSKLTVDKSRWQQGNVFSCSVMHEALHNHYTQKSLSLSPGGGGSGSAHPIPDSSPLLQFGGQVRQRYLYTDDACQTEAHLEIREDGTVGGAADQSPESLLQLKALKPGVIQILGVKTSRFLCQRPDGALYGSLHFDPEACSFRELLLEDGYNVYQSEAHGLPLHLPGCKSPHRDPAPRGPARFLPLPGLPPAPPEPPGILAPQPPDVGSSDPLSMVGSQGRSPSYAS

SEQ ID NO: 1563 - protein, 473 aa, Artificial Sequence
  Fusion Protein
GHGEGTFTSDLSIQLEEEAVQLFIEWLLATGPSSGAPPPSGGGGGGGSGGGGSGGGGSADKTHTCPPCPAPELLGGPSVFLFPPKPKDTLMISRTPEVTCVVVDVSHEDPEVKFNWYVDGVEVHNAKTKPREEQYNNASRVVSVLTVLHQDWLNGKEYKCKVSNKALPAPIEKTISKAKGQPREPQVYTLPPSRDELTKNQVSLTCLVKGFYPSDIAVEWESNGQPENNYKTTPPVLDSDGSFFLYSKLTVDKSRWQQGNVFSCSVMHEALHNHYTQKSLSLSPGGGGSGSAHPIPDSSPLLQFGGQVRQRYLYTDDACQTEAHLEIREDGTVGGAADQSPESLLQLKALKPGVIQILGVKTSRFLCQRPDGALYGSLHFDPEACSFRELLLEDGYNVYQSEAHGLPLHLPGCKSPHRDPAPRGPARFLPLPGLPPAPPEPPGILAPQPPDVGSSDPLSMVYPSQGRSPSYAS

SEQ ID NO: 1564 - protein, 472 aa, Artificial Sequence
  Fusion Protein
GHGEGTFTSDLSIQLEEEAVQLFIEWLLATGPSSGAPPPSGGGGGGGSGGGGSGGGGSADKTHTCPPCPAPELLGGPSVFLFPPKPKDTLMISRTPEVTCVVVDVSHEDPEVKFNWYVDGVEVHNAKTKPREEQYNNASRVVSVLTVLHQDWLNGKEYKCKVSNKALPAPIEKTISKAKGQPREPQVYTLPPSRDELTKNQVSLTCLVKGFYPSDIAVEWESNGQPENNYKTTPPVLDSDGSFFLYSKLTVDKSRWQQGNVFSCSVMHEALHNHYTQKSLSLSPGGGGSGSAHPIPDSSPLLQFGGQVRQRYLYTDDACQTEAHLEIREDGTVGGAADQSPESLLQLKALKPGVIQILGVKTSRFLCQRPDGALYGSLHFDPEACSFRELLLEDGYNVYQSEAHGLPLHLCGNKSPHRDPAPRGPARFLPLPGLPPAPPEPPGILAPQPPDVGSSDPLSMVGSQGRSPSYAS

SEQ ID NO: 1565 - protein, 473 aa, Artificial Sequence
  Fusion Protein
GHGEGTFTSDLSIQLEEEAVQLFIEWLLATGPSSGAPPPSGGGGGGGSGGGGSGGGGSADKTHTCPPCPAPELLGGPSVFLFPPKPKDTLMISRTPEVTCVVVDVSHEDPEVKFNWYVDGVEVHNAKTKPREEQYNNASRVVSVLTVLHQDWLNGKEYKCKVSNKALPAPIEKTISKAKGQPREPQVYTLPPSRDELTKNQVSLTCLVKGFYPSDIAVEWESNGQPENNYKTTPPVLDSDGSFFLYSKLTVDKSRWQQGNVFSCSVMHEALHNHYTQKSLSLSPGGGGSGSAHPIPDSSPLLQFGGQVRQRYLYTDDACQTEAHLEIREDGTVGGAADQSPESLLQLKALKPGVIQILGVKTSRFLCQRPDGALYGSLHFDPEACSFRELLLEDGYNVYQSEAHGLPLHLCGNKSPHRDPAPRGPARFLPLPGLPPAPPEPPGILAPQPPDVGSSDPLSMVYPSQGRSPSYAS

SEQ ID NO: 1566 - protein, 474 aa, Artificial Sequence
  Fusion Protein
GHGEGTFTSDLSIQLEEEAVQLFIEWLLATGPSSGAPPPSGGGGGGGSGGGGSGGGGSAESKYGPPCPPCPAPEFEGGPSVFLFPPKPKDTLMISRTPEVTCVVVDVSQEDPEVQFNWYVDGVEVHNAKTKPREEQFNSTYRVVSVLTVLHQDWLNGKEYKCKVSNKGLPSSIEKTISKAKGQPREPQVYTLPPSQEEMTKNQVSLTCLVKGFYPSDIAVEWESNGQPENNYKTTPPVLDSDGSFFLYSRLTVDKSRWQEGNVFSCSVMHEALHNHYTQKSLSLSLGGGGSGSAHPIPDSSPLLQFGGQVRQRYLYTDDACQTEAHLEIREDGTVGGAADQSPESLLQLKALKPGVIQILGVKTSRFLCQRPDGALYGSLHFDPEACSFRELLLEDGYNVYQSEAHGLPLHLPGCKSPHRDPAPRGPARFLPLPGLPPAPPEPPGILAPQPPDVGSSDPLSMVGSQGRSPSYAS

SEQ ID NO: 1567 - protein, 475 aa, Artificial Sequence
  Fusion Protein
GHGEGTFTSDLSIQLEEEAVQLFIEWLLATGPSSGAPPPSGGGGGGGSGGGGSGGGGSAESKYGPPCPPCPAPEFEGGPSVFLFPPKPKDTLMISRTPEVTCVVVDVSQEDPEVQFNWYVDGVEVHNAKTKPREEQFNSTYRVVSVLTVLHQDWLNGKEYKCKVSNKGLPSSIEKTISKAKGQPREPQVYTLPPSQEEMTKNQVSLTCLVKGFYPSDIAVEWESNGQPENNYKTTPPVLDSDGSFFLYSRLTVDKSRWQEGNVFSCSVMHEALHNHYTQKSLSLSLGGGGSGSAHPIPDSSPLLQFGGQVRQRYLYTDDACQTEAHLEIREDGTVGGAADQSPESLLQLKALKPGVIQILGVKTSRFLCQRPDGALYGSLHFDPEACSFRELLLEDGYNVYQSEAHGLPLHLPGCKSPHRDPAPRGPARFLPLPGLPPAPPEPPGILAPQPPDVGSSDPLSMVYPSQGRSPSYAS

SEQ ID NO: 1568 - protein, 474 aa, Artificial Sequence
  Fusion Protein
GHGEGTFTSDLSIQLEEEAVQLFIEWLLATGPSSGAPPPSGGGGGGGSGGGGSGGGGSAESKYGPPCPPCPAPEFEGGPSVFLFPPKPKDTLMISRTPEVTCVVVDVSQEDPEVQFNWYVDGVEVHNAKTKPREEQFNSTYRVVSVLTVLHQDWLNGKEYKCKVSNKGLPSSIEKTISKAKGQPREPQVYTLPPSQEEMTKNQVSLTCLVKGFYPSDIAVEWESNGQPENNYKTTPPVLDSDGSFFLYSRLTVDKSRWQEGNVFSCSVMHEALHNHYTQKSLSLSLGGGGSGSAHPIPDSSPLLQFGGQVRQRYLYTDDACQTEAHLEIREDGTVGGAADQSPESLLQLKALKPGVIQILGVKTSRFLCQRPDGALYGSLHFDPEACSFRELLLEDGYNVYQSEAHGLPLHLCGNKSPHRDPAPRGPARFLPLPGLPPAPPEPPGILAPQPPDVGSSDPLSMVGSQGRSPSYAS

SEQ ID NO: 1569 - protein, 475 aa, Artificial Sequence
  Fusion Protein
GHGEGTFTSDLSIQLEEEAVQLFIEWLLATGPSSGAPPPSGGGGGGGSGGGGSGGGGSAESKYGPPCPPCPAPEFEGGPSVFLFPPKPKDTLMISRTPEVTCVVVDVSQEDPEVQFNWYVDGVEVHNAKTKPREEQFNSTYRVVSVLTVLHQDWLNGKEYKCKVSNKGLPSSIEKTISKAKGQPREPQVYTLPPSQEEMTKNQVSLTCLVKGFYPSDIAVEWESNGQPENNYKTTPPVLDSDGSFFLYSRLTVDKSRWQEGNVFSCSVMHEALHNHYTQKSLSLSLGGGGSGSAHPIPDSSPLLQFGGQVRQRYLYTDDACQTEAHLEIREDGTVGGAADQSPESLLQLKALKPGVIQILGVKTSRFLCQRPDGALYGSLHFDPEACSFRELLLEDGYNVYQSEAHGLPLHLCGNKSPHRDPAPRGPARFLPLPGLPPAPPEPPGILAPQPPDVGSSDPLSMVYPSQGRSPSYAS

SEQ ID NO: 1570 - protein, 472 aa, Artificial Sequence
  Fusion Protein
AHGEGTFTSDLSIQLDEEAVQEFIEWLLATGPSSGAPPPSGGGGGGGSGGGGSGGGGSADKTHTCPPCPAPEAAGGPSVFLFPPKPKDTLMISRTPEVTCVVVDVSHEDPEVKFNWYVDGVEVHNAKTKPREEQYNSTYRVVSVLTVLHQDWLNGKEYKCKVSNKALPAPIEKTISKAKGQPREPQVYTLPPSRDELTKNQVSLTCLVKGFYPSDIAVEWESNGQPENNYKTTPPVLDSDGSFFLYSKLTVDKSRWQQGNVFSCSVMHEALHNHYTQKSLSLSPGGGGSGSAHPIPDSSPLLQFGGQVRQRYLYTDDACQTEAHLEIREDGTVGGAADQSPESLLQLKALKPGVIQILGVKTSRFLCQRPDGALYGSLHFDPEACSFRELLLEDGYNVYQSEAHGLPLHLPGCKSPHRDPAPRGPARFLPLPGLPPAPPEPPGILAPQPPDVGSSDPLSMVGSQGRSPSYAS

SEQ ID NO: 1571 - protein, 473 aa, Artificial Sequence
  Fusion Protein
AHGEGTFTSDLSIQLDEEAVQEFIEWLLATGPSSGAPPPSGGGGGGGSGGGGSGGGGSADKTHTCPPCPAPEAAGGPSVFLFPPKPKDTLMISRTPEVTCVVVDVSHEDPEVKFNWYVDGVEVHNAKTKPREEQYNSTYRVVSVLTVLHQDWLNGKEYKCKVSNKALPAPIEKTISKAKGQPREPQVYTLPPSRDELTKNQVSLTCLVKGFYPSDIAVEWESNGQPENNYKTTPPVLDSDGSFFLYSKLTVDKSRWQQGNVFSCSVMHEALHNHYTQKSLSLSPGGGGSGSAHPIPDSSPLLQFGGQVRQRYLYTDDACQTEAHLEIREDGTVGGAADQSPESLLQLKALKPGVIQILGVKTSRFLCQRPDGALYGSLHFDPEACSFRELLLEDGYNVYQSEAHGLPLHLPGCKSPHRDPAPRGPARFLPLPGLPPAPPEPPGILAPQPPDVGSSDPLSMVYPSQGRSPSYAS

SEQ ID NO: 1572 - protein, 472 aa, Artificial Sequence
  Fusion Protein
AHGEGTFTSDLSIQLDEEAVQEFIEWLLATGPSSGAPPPSGGGGGGGSGGGGSGGGGSADKTHTCPPCPAPEAAGGPSVFLFPPKPKDTLMISRTPEVTCVVVDVSHEDPEVKFNWYVDGVEVHNAKTKPREEQYNSTYRVVSVLTVLHQDWLNGKEYKCKVSNKALPAPIEKTISKAKGQPREPQVYTLPPSRDELTKNQVSLTCLVKGFYPSDIAVEWESNGQPENNYKTTPPVLDSDGSFFLYSKLTVDKSRWQQGNVFSCSVMHEALHNHYTQKSLSLSPGGGGSGSAHPIPDSSPLLQFGGQVRQRYLYTDDACQTEAHLEIREDGTVGGAADQSPESLLQLKALKPGVIQILGVKTSRFLCQRPDGALYGSLHFDPEACSFRELLLEDGYNVYQSEAHGLPLHLCGNKSPHRDPAPRGPARFLPLPGLPPAPPEPPGILAPQPPDVGSSDPLSMVGSQGRSPSYAS

SEQ ID NO: 1573 - protein, 473 aa, Artificial Sequence
  Fusion Protein
AHGEGTFTSDLSIQLDEEAVQEFIEWLLATGPSSGAPPPSGGGGGGGSGGGGSGGGGSADKTHTCPPCPAPEAAGGPSVFLFPPKPKDTLMISRTPEVTCVVVDVSHEDPEVKFNWYVDGVEVHNAKTKPREEQYNSTYRVVSVLTVLHQDWLNGKEYKCKVSNKALPAPIEKTISKAKGQPREPQVYTLPPSRDELTKNQVSLTCLVKGFYPSDIAVEWESNGQPENNYKTTPPVLDSDGSFFLYSKLTVDKSRWQQGNVFSCSVMHEALHNHYTQKSLSLSPGGGGSGSAHPIPDSSPLLQFGGQVRQRYLYTDDACQTEAHLEIREDGTVGGAADQSPESLLQLKALKPGVIQILGVKTSRFLCQRPDGALYGSLHFDPEACSFRELLLEDGYNVYQSEAHGLPLHLCGNKSPHRDPAPRGPARFLPLPGLPPAPPEPPGILAPQPPDVGSSDPLSMVYPSQGRSPSYAS

SEQ ID NO: 1574 - protein, 472 aa, Artificial Sequence
  Fusion Protein
AHGEGTFTSDLSIQLDEEAVQEFIEWLLATGPSSGAPPPSGGGGGGGSGGGGSGGGGSADKTHTCPPCPAPELLGGPSVFLFPPKPKDTLMISRTPEVTCVVVDVSHEDPEVKFNWYVDGVEVHNAKTKPREEQYNNASRVVSVLTVLHQDWLNGKEYKCKVSNKALPAPIEKTISKAKGQPREPQVYTLPPSRDELTKNQVSLTCLVKGFYPSDIAVEWESNGQPENNYKTTPPVLDSDGSFFLYSKLTVDKSRWQQGNVFSCSVMHEALHNHYTQKSLSLSPGGGGSGSAHPIPDSSPLLQFGGQVRQRYLYTDDACQTEAHLEIREDGTVGGAADQSPESLLQLKALKPGVIQILGVKTSRFLCQRPDGALYGSLHFDPEACSFRELLLEDGYNVYQSEAHGLPLHLPGCKSPHRDPAPRGPARFLPLPGLPPAPPEPPGILAPQPPDVGSSDPLSMVGSQGRSPSYAS

SEQ ID NO: 1575 - protein, 473 aa, Artificial Sequence
  Fusion Protein
AHGEGTFTSDLSIQLDEEAVQEFIEWLLATGPSSGAPPPSGGGGGGGSGGGGSGGGGSADKTHTCPPCPAPELLGGPSVFLFPPKPKDTLMISRTPEVTCVVVDVSHEDPEVKFNWYVDGVEVHNAKTKPREEQYNNASRVVSVLTVLHQDWLNGKEYKCKVSNKALPAPIEKTISKAKGQPREPQVYTLPPSRDELTKNQVSLTCLVKGFYPSDIAVEWESNGQPENNYKTTPPVLDSDGSFFLYSKLTVDKSRWQQGNVFSCSVMHEALHNHYTQKSLSLSPGGGGSGSAHPIPDSSPLLQFGGQVRQRYLYTDDACQTEAHLEIREDGTVGGAADQSPESLLQLKALKPGVIQILGVKTSRFLCQRPDGALYGSLHFDPEACSFRELLLEDGYNVYQSEAHGLPLHLPGCKSPHRDPAPRGPARFLPLPGLPPAPPEPPGILAPQPPDVGSSDPLSMVYPSQGRSPSYAS

SEQ ID NO: 1576 - protein, 472 aa, Artificial Sequence
  Fusion Protein
AHGEGTFTSDLSIQLDEEAVQEFIEWLLATGPSSGAPPPSGGGGGGGSGGGGSGGGGSADKTHTCPPCPAPELLGGPSVFLFPPKPKDTLMISRTPEVTCVVVDVSHEDPEVKFNWYVDGVEVHNAKTKPREEQYNNASRVVSVLTVLHQDWLNGKEYKCKVSNKALPAPIEKTISKAKGQPREPQVYTLPPSRDELTKNQVSLTCLVKGFYPSDIAVEWESNGQPENNYKTTPPVLDSDGSFFLYSKLTVDKSRWQQGNVFSCSVMHEALHNHYTQKSLSLSPGGGGSGSAHPIPDSSPLLQFGGQVRQRYLYTDDACQTEAHLEIREDGTVGGAADQSPESLLQLKALKPGVIQILGVKTSRFLCQRPDGALYGSLHFDPEACSFRELLLEDGYNVYQSEAHGLPLHLCGNKSPHRDPAPRGPARFLPLPGLPPAPPEPPGILAPQPPDVGSSDPLSMVGSQGRSPSYAS

SEQ ID NO: 1577 - protein, 473 aa, Artificial Sequence
  Fusion Protein
AHGEGTFTSDLSIQLDEEAVQEFIEWLLATGPSSGAPPPSGGGGGGGSGGGGSGGGGSADKTHTCPPCPAPELLGGPSVFLFPPKPKDTLMISRTPEVTCVVVDVSHEDPEVKFNWYVDGVEVHNAKTKPREEQYNNASRVVSVLTVLHQDWLNGKEYKCKVSNKALPAPIEKTISKAKGQPREPQVYTLPPSRDELTKNQVSLTCLVKGFYPSDIAVEWESNGQPENNYKTTPPVLDSDGSFFLYSKLTVDKSRWQQGNVFSCSVMHEALHNHYTQKSLSLSPGGGGSGSAHPIPDSSPLLQFGGQVRQRYLYTDDACQTEAHLEIREDGTVGGAADQSPESLLQLKALKPGVIQILGVKTSRFLCQRPDGALYGSLHFDPEACSFRELLLEDGYNVYQSEAHGLPLHLCGNKSPHRDPAPRGPARFLPLPGLPPAPPEPPGILAPQPPDVGSSDPLSMVYPSQGRSPSYAS

SEQ ID NO: 1578 - protein, 474 aa, Artificial Sequence
  Fusion Protein
AHGEGTFTSDLSIQLDEEAVQEFIEWLLATGPSSGAPPPSGGGGGGGSGGGGSGGGGSAESKYGPPCPPCPAPEFEGGPSVFLFPPKPKDTLMISRTPEVTCVVVDVSQEDPEVQFNWYVDGVEVHNAKTKPREEQFNSTYRVVSVLTVLHQDWLNGKEYKCKVSNKGLPSSIEKTISKAKGQPREPQVYTLPPSQEEMTKNQVSLTCLVKGFYPSDIAVEWESNGQPENNYKTTPPVLDSDGSFFLYSRLTVDKSRWQEGNVFSCSVMHEALHNHYTQKSLSLSLGGGGSGSAHPIPDSSPLLQFGGQVRQRYLYTDDACQTEAHLEIREDGTVGGAADQSPESLLQLKALKPGVIQILGVKTSRFLCQRPDGALYGSLHFDPEACSFRELLLEDGYNVYQSEAHGLPLHLPGCKSPHRDPAPRGPARFLPLPGLPPAPPEPPGILAPQPPDVGSSDPLSMVGSQGRSPSYAS

SEQ ID NO: 1579 - protein, 475 aa, Artificial Sequence
  Fusion Protein
AHGEGTFTSDLSIQLDEEAVQEFIEWLLATGPSSGAPPPSGGGGGGGSGGGGSGGGGSAESKYGPPCPPCPAPEFEGGPSVFLFPPKPKDTLMISRTPEVTCVVVDVSQEDPEVQFNWYVDGVEVHNAKTKPREEQFNSTYRVVSVLTVLHQDWLNGKEYKCKVSNKGLPSSIEKTISKAKGQPREPQVYTLPPSQEEMTKNQVSLTCLVKGFYPSDIAVEWESNGQPENNYKTTPPVLDSDGSFFLYSRLTVDKSRWQEGNVFSCSVMHEALHNHYTQKSLSLSLGGGGSGSAHPIPDSSPLLQFGGQVRQRYLYTDDACQTEAHLEIREDGTVGGAADQSPESLLQLKALKPGVIQILGVKTSRFLCQRPDGALYGSLHFDPEACSFRELLLEDGYNVYQSEAHGLPLHLPGCKSPHRDPAPRGPARFLPLPGLPPAPPEPPGILAPQPPDVGSSDPLSMVYPSQGRSPSYAS

SEQ ID NO: 1580 - protein, 474 aa, Artificial Sequence
  Fusion Protein
AHGEGTFTSDLSIQLDEEAVQEFIEWLLATGPSSGAPPPSGGGGGGGSGGGGSGGGGSAESKYGPPCPPCPAPEFEGGPSVFLFPPKPKDTLMISRTPEVTCVVVDVSQEDPEVQFNWYVDGVEVHNAKTKPREEQFNSTYRVVSVLTVLHQDWLNGKEYKCKVSNKGLPSSIEKTISKAKGQPREPQVYTLPPSQEEMTKNQVSLTCLVKGFYPSDIAVEWESNGQPENNYKTTPPVLDSDGSFFLYSRLTVDKSRWQEGNVFSCSVMHEALHNHYTQKSLSLSLGGGGSGSAHPIPDSSPLLQFGGQVRQRYLYTDDACQTEAHLEIREDGTVGGAADQSPESLLQLKALKPGVIQILGVKTSRFLCQRPDGALYGSLHFDPEACSFRELLLEDGYNVYQSEAHGLPLHLCGNKSPHRDPAPRGPARFLPLPGLPPAPPEPPGILAPQPPDVGSSDPLSMVGSQGRSPSYAS

SEQ ID NO: 1581 - protein, 475 aa, Artificial Sequence
  Fusion Protein
AHGEGTFTSDLSIQLDEEAVQEFIEWLLATGPSSGAPPPSGGGGGGGSGGGGSGGGGSAESKYGPPCPPCPAPEFEGGPSVFLFPPKPKDTLMISRTPEVTCVVVDVSQEDPEVQFNWYVDGVEVHNAKTKPREEQFNSTYRVVSVLTVLHQDWLNGKEYKCKVSNKGLPSSIEKTISKAKGQPREPQVYTLPPSQEEMTKNQVSLTCLVKGFYPSDIAVEWESNGQPENNYKTTPPVLDSDGSFFLYSRLTVDKSRWQEGNVFSCSVMHEALHNHYTQKSLSLSLGGGGSGSAHPIPDSSPLLQFGGQVRQRYLYTDDACQTEAHLEIREDGTVGGAADQSPESLLQLKALKPGVIQILGVKTSRFLCQRPDGALYGSLHFDPEACSFRELLLEDGYNVYQSEAHGLPLHLCGNKSPHRDPAPRGPARFLPLPGLPPAPPEPPGILAPQPPDVGSSDPLSMVYPSQGRSPSYAS

SEQ ID NO: 1582 - protein, 472 aa, Artificial Sequence
  Fusion Protein
AHGEGTFTSDLSIQLDEEAVQEFIEWLLATGPVSGAPPPSGGGGGGGSGGGGSGGGGSADKTHTCPPCPAPEAAGGPSVFLFPPKPKDTLMISRTPEVTCVVVDVSHEDPEVKFNWYVDGVEVHNAKTKPREEQYNSTYRVVSVLTVLHQDWLNGKEYKCKVSNKALPAPIEKTISKAKGQPREPQVYTLPPSRDELTKNQVSLTCLVKGFYPSDIAVEWESNGQPENNYKTTPPVLDSDGSFFLYSKLTVDKSRWQQGNVFSCSVMHEALHNHYTQKSLSLSPGGGGSGSAHPIPDSSPLLQFGGQVRQRYLYTDDACQTEAHLEIREDGTVGGAADQSPESLLQLKALKPGVIQILGVKTSRFLCQRPDGALYGSLHFDPEACSFRELLLEDGYNVYQSEAHGLPLHLPGCKSPHRDPAPRGPARFLPLPGLPPAPPEPPGILAPQPPDVGSSDPLSMVGSQGRSPSYAS

SEQ ID NO: 1583 - protein, 473 aa, Artificial Sequence
  Fusion Protein
AHGEGTFTSDLSIQLDEEAVQEFIEWLLATGPVSGAPPPSGGGGGGGSGGGGSGGGGSADKTHTCPPCPAPEAAGGPSVFLFPPKPKDTLMISRTPEVTCVVVDVSHEDPEVKFNWYVDGVEVHNAKTKPREEQYNSTYRVVSVLTVLHQDWLNGKEYKCKVSNKALPAPIEKTISKAKGQPREPQVYTLPPSRDELTKNQVSLTCLVKGFYPSDIAVEWESNGQPENNYKTTPPVLDSDGSFFLYSKLTVDKSRWQQGNVFSCSVMHEALHNHYTQKSLSLSPGGGGSGSAHPIPDSSPLLQFGGQVRQRYLYTDDACQTEAHLEIREDGTVGGAADQSPESLLQLKALKPGVIQILGVKTSRFLCQRPDGALYGSLHFDPEACSFRELLLEDGYNVYQSEAHGLPLHLPGCKSPHRDPAPRGPARFLPLPGLPPAPPEPPGILAPQPPDVGSSDPLSMVYPSQGRSPSYAS

SEQ ID NO: 1584 - protein, 472 aa, Artificial Sequence
  Fusion Protein
AHGEGTFTSDLSIQLDEEAVQEFIEWLLATGPVSGAPPPSGGGGGGGSGGGGSGGGGSADKTHTCPPCPAPEAAGGPSVFLFPPKPKDTLMISRTPEVTCVVVDVSHEDPEVKFNWYVDGVEVHNAKTKPREEQYNSTYRVVSVLTVLHQDWLNGKEYKCKVSNKALPAPIEKTISKAKGQPREPQVYTLPPSRDELTKNQVSLTCLVKGFYPSDIAVEWESNGQPENNYKTTPPVLDSDGSFFLYSKLTVDKSRWQQGNVFSCSVMHEALHNHYTQKSLSLSPGGGGSGSAHPIPDSSPLLQFGGQVRQRYLYTDDACQTEAHLEIREDGTVGGAADQSPESLLQLKALKPGVIQILGVKTSRFLCQRPDGALYGSLHFDPEACSFRELLLEDGYNVYQSEAHGLPLHLCGNKSPHRDPAPRGPARFLPLPGLPPAPPEPPGILAPQPPDVGSSDPLSMVGSQGRSPSYAS

SEQ ID NO: 1585 - protein, 473 aa, Artificial Sequence
  Fusion Protein
AHGEGTFTSDLSIQLDEEAVQEFIEWLLATGPVSGAPPPSGGGGGGGSGGGGSGGGGSADKTHTCPPCPAPEAAGGPSVFLFPPKPKDTLMISRTPEVTCVVVDVSHEDPEVKFNWYVDGVEVHNAKTKPREEQYNSTYRVVSVLTVLHQDWLNGKEYKCKVSNKALPAPIEKTISKAKGQPREPQVYTLPPSRDELTKNQVSLTCLVKGFYPSDIAVEWESNGQPENNYKTTPPVLDSDGSFFLYSKLTVDKSRWQQGNVFSCSVMHEALHNHYTQKSLSLSPGGGGSGSAHPIPDSSPLLQFGGQVRQRYLYTDDACQTEAHLEIREDGTVGGAADQSPESLLQLKALKPGVIQILGVKTSRFLCQRPDGALYGSLHFDPEACSFRELLLEDGYNVYQSEAHGLPLHLCGNKSPHRDPAPRGPARFLPLPGLPPAPPEPPGILAPQPPDVGSSDPLSMVYPSQGRSPSYAS

SEQ ID NO: 1586 - protein, 472 aa, Artificial Sequence
  Fusion Protein
AHGEGTFTSDLSIQLDEEAVQEFIEWLLATGPVSGAPPPSGGGGGGGSGGGGSGGGGSADKTHTCPPCPAPELLGGPSVFLFPPKPKDTLMISRTPEVTCVVVDVSHEDPEVKFNWYVDGVEVHNAKTKPREEQYNNASRVVSVLTVLHQDWLNGKEYKCKVSNKALPAPIEKTISKAKGQPREPQVYTLPPSRDELTKNQVSLTCLVKGFYPSDIAVEWESNGQPENNYKTTPPVLDSDGSFFLYSKLTVDKSRWQQGNVFSCSVMHEALHNHYTQKSLSLSPGGGGSGSAHPIPDSSPLLQFGGQVRQRYLYTDDACQTEAHLEIREDGTVGGAADQSPESLLQLKALKPGVIQILGVKTSRFLCQRPDGALYGSLHFDPEACSFRELLLEDGYNVYQSEAHGLPLHLPGCKSPHRDPAPRGPARFLPLPGLPPAPPEPPGILAPQPPDVGSSDPLSMVGSQGRSPSYAS

SEQ ID NO: 1587 - protein, 473 aa, Artificial Sequence
  Fusion Protein
AHGEGTFTSDLSIQLDEEAVQEFIEWLLATGPVSGAPPPSGGGGGGGSGGGGSGGGGSADKTHTCPPCPAPELLGGPSVFLFPPKPKDTLMISRTPEVTCVVVDVSHEDPEVKFNWYVDGVEVHNAKTKPREEQYNNASRVVSVLTVLHQDWLNGKEYKCKVSNKALPAPIEKTISKAKGQPREPQVYTLPPSRDELTKNQVSLTCLVKGFYPSDIAVEWESNGQPENNYKTTPPVLDSDGSFFLYSKLTVDKSRWQQGNVFSCSVMHEALHNHYTQKSLSLSPGGGGSGSAHPIPDSSPLLQFGGQVRQRYLYTDDACQTEAHLEIREDGTVGGAADQSPESLLQLKALKPGVIQILGVKTSRFLCQRPDGALYGSLHFDPEACSFRELLLEDGYNVYQSEAHGLPLHLPGCKSPHRDPAPRGPARFLPLPGLPPAPPEPPGILAPQPPDVGSSDPLSMVYPSQGRSPSYAS

SEQ ID NO: 1588 - protein, 472 aa, Artificial Sequence
  Fusion Protein
AHGEGTFTSDLSIQLDEEAVQEFIEWLLATGPVSGAPPPSGGGGGGGSGGGGSGGGGSADKTHTCPPCPAPELLGGPSVFLFPPKPKDTLMISRTPEVTCVVVDVSHEDPEVKFNWYVDGVEVHNAKTKPREEQYNNASRVVSVLTVLHQDWLNGKEYKCKVSNKALPAPIEKTISKAKGQPREPQVYTLPPSRDELTKNQVSLTCLVKGFYPSDIAVEWESNGQPENNYKTTPPVLDSDGSFFLYSKLTVDKSRWQQGNVFSCSVMHEALHNHYTQKSLSLSPGGGGSGSAHPIPDSSPLLQFGGQVRQRYLYTDDACQTEAHLEIREDGTVGGAADQSPESLLQLKALKPGVIQILGVKTSRFLCQRPDGALYGSLHFDPEACSFRELLLEDGYNVYQSEAHGLPLHLCGNKSPHRDPAPRGPARFLPLPGLPPAPPEPPGILAPQPPDVGSSDPLSMVGSQGRSPSYAS

SEQ ID NO: 1589 - protein, 473 aa, Artificial Sequence
  Fusion Protein
AHGEGTFTSDLSIQLDEEAVQEFIEWLLATGPVSGAPPPSGGGGGGGSGGGGSGGGGSADKTHTCPPCPAPELLGGPSVFLFPPKPKDTLMISRTPEVTCVVVDVSHEDPEVKFNWYVDGVEVHNAKTKPREEQYNNASRVVSVLTVLHQDWLNGKEYKCKVSNKALPAPIEKTISKAKGQPREPQVYTLPPSRDELTKNQVSLTCLVKGFYPSDIAVEWESNGQPENNYKTTPPVLDSDGSFFLYSKLTVDKSRWQQGNVFSCSVMHEALHNHYTQKSLSLSPGGGGSGSAHPIPDSSPLLQFGGQVRQRYLYTDDACQTEAHLEIREDGTVGGAADQSPESLLQLKALKPGVIQILGVKTSRFLCQRPDGALYGSLHFDPEACSFRELLLEDGYNVYQSEAHGLPLHLCGNKSPHRDPAPRGPARFLPLPGLPPAPPEPPGILAPQPPDVGSSDPLSMVYPSQGRSPSYAS

SEQ ID NO: 1590 - protein, 474 aa, Artificial Sequence
  Fusion Protein
AHGEGTFTSDLSIQLDEEAVQEFIEWLLATGPVSGAPPPSGGGGGGGSGGGGSGGGGSAESKYGPPCPPCPAPEFEGGPSVFLFPPKPKDTLMISRTPEVTCVVVDVSQEDPEVQFNWYVDGVEVHNAKTKPREEQFNSTYRVVSVLTVLHQDWLNGKEYKCKVSNKGLPSSIEKTISKAKGQPREPQVYTLPPSQEEMTKNQVSLTCLVKGFYPSDIAVEWESNGQPENNYKTTPPVLDSDGSFFLYSRLTVDKSRWQEGNVFSCSVMHEALHNHYTQKSLSLSLGGGGSGSAHPIPDSSPLLQFGGQVRQRYLYTDDACQTEAHLEIREDGTVGGAADQSPESLLQLKALKPGVIQILGVKTSRFLCQRPDGALYGSLHFDPEACSFRELLLEDGYNVYQSEAHGLPLHLPGCKSPHRDPAPRGPARFLPLPGLPPAPPEPPGILAPQPPDVGSSDPLSMVGSQGRSPSYAS

SEQ ID NO: 1591 - protein, 475 aa, Artificial Sequence
  Fusion Protein
AHGEGTFTSDLSIQLDEEAVQEFIEWLLATGPVSGAPPPSGGGGGGGSGGGGSGGGGSAESKYGPPCPPCPAPEFEGGPSVFLFPPKPKDTLMISRTPEVTCVVVDVSQEDPEVQFNWYVDGVEVHNAKTKPREEQFNSTYRVVSVLTVLHQDWLNGKEYKCKVSNKGLPSSIEKTISKAKGQPREPQVYTLPPSQEEMTKNQVSLTCLVKGFYPSDIAVEWESNGQPENNYKTTPPVLDSDGSFFLYSRLTVDKSRWQEGNVFSCSVMHEALHNHYTQKSLSLSLGGGGSGSAHPIPDSSPLLQFGGQVRQRYLYTDDACQTEAHLEIREDGTVGGAADQSPESLLQLKALKPGVIQILGVKTSRFLCQRPDGALYGSLHFDPEACSFRELLLEDGYNVYQSEAHGLPLHLPGCKSPHRDPAPRGPARFLPLPGLPPAPPEPPGILAPQPPDVGSSDPLSMVYPSQGRSPSYAS

SEQ ID NO: 1592 - protein, 474 aa, Artificial Sequence
  Fusion Protein
AHGEGTFTSDLSIQLDEEAVQEFIEWLLATGPVSGAPPPSGGGGGGGSGGGGSGGGGSAESKYGPPCPPCPAPEFEGGPSVFLFPPKPKDTLMISRTPEVTCVVVDVSQEDPEVQFNWYVDGVEVHNAKTKPREEQFNSTYRVVSVLTVLHQDWLNGKEYKCKVSNKGLPSSIEKTISKAKGQPREPQVYTLPPSQEEMTKNQVSLTCLVKGFYPSDIAVEWESNGQPENNYKTTPPVLDSDGSFFLYSRLTVDKSRWQEGNVFSCSVMHEALHNHYTQKSLSLSLGGGGSGSAHPIPDSSPLLQFGGQVRQRYLYTDDACQTEAHLEIREDGTVGGAADQSPESLLQLKALKPGVIQILGVKTSRFLCQRPDGALYGSLHFDPEACSFRELLLEDGYNVYQSEAHGLPLHLCGNKSPHRDPAPRGPARFLPLPGLPPAPPEPPGILAPQPPDVGSSDPLSMVGSQGRSPSYAS

SEQ ID NO: 1593 - protein, 475 aa, Artificial Sequence
  Fusion Protein
AHGEGTFTSDLSIQLDEEAVQEFIEWLLATGPVSGAPPPSGGGGGGGSGGGGSGGGGSAESKYGPPCPPCPAPEFEGGPSVFLFPPKPKDTLMISRTPEVTCVVVDVSQEDPEVQFNWYVDGVEVHNAKTKPREEQFNSTYRVVSVLTVLHQDWLNGKEYKCKVSNKGLPSSIEKTISKAKGQPREPQVYTLPPSQEEMTKNQVSLTCLVKGFYPSDIAVEWESNGQPENNYKTTPPVLDSDGSFFLYSRLTVDKSRWQEGNVFSCSVMHEALHNHYTQKSLSLSLGGGGSGSAHPIPDSSPLLQFGGQVRQRYLYTDDACQTEAHLEIREDGTVGGAADQSPESLLQLKALKPGVIQILGVKTSRFLCQRPDGALYGSLHFDPEACSFRELLLEDGYNVYQSEAHGLPLHLCGNKSPHRDPAPRGPARFLPLPGLPPAPPEPPGILAPQPPDVGSSDPLSMVYPSQGRSPSYAS

SEQ ID NO: 1594 - protein, 472 aa, Artificial Sequence
  Fusion Protein
AHGEGTFTSDLSIQLDEEAVQLFIEWLLATGPSSGAPPPSGGGGGGGSGGGGSGGGGSADKTHTCPPCPAPEAAGGPSVFLFPPKPKDTLMISRTPEVTCVVVDVSHEDPEVKFNWYVDGVEVHNAKTKPREEQYNSTYRVVSVLTVLHQDWLNGKEYKCKVSNKALPAPIEKTISKAKGQPREPQVYTLPPSRDELTKNQVSLTCLVKGFYPSDIAVEWESNGQPENNYKTTPPVLDSDGSFFLYSKLTVDKSRWQQGNVFSCSVMHEALHNHYTQKSLSLSPGGGGSGSAHPIPDSSPLLQFGGQVRQRYLYTDDACQTEAHLEIREDGTVGGAADQSPESLLQLKALKPGVIQILGVKTSRFLCQRPDGALYGSLHFDPEACSFRELLLEDGYNVYQSEAHGLPLHLPGCKSPHRDPAPRGPARFLPLPGLPPAPPEPPGILAPQPPDVGSSDPLSMVGSQGRSPSYAS

SEQ ID NO: 1595 - protein, 473 aa, Artificial Sequence
  Fusion Protein
AHGEGTFTSDLSIQLDEEAVQLFIEWLLATGPSSGAPPPSGGGGGGGSGGGGSGGGGSADKTHTCPPCPAPEAAGGPSVFLFPPKPKDTLMISRTPEVTCVVVDVSHEDPEVKFNWYVDGVEVHNAKTKPREEQYNSTYRVVSVLTVLHQDWLNGKEYKCKVSNKALPAPIEKTISKAKGQPREPQVYTLPPSRDELTKNQVSLTCLVKGFYPSDIAVEWESNGQPENNYKTTPPVLDSDGSFFLYSKLTVDKSRWQQGNVFSCSVMHEALHNHYTQKSLSLSPGGGGSGSAHPIPDSSPLLQFGGQVRQRYLYTDDACQTEAHLEIREDGTVGGAADQSPESLLQLKALKPGVIQILGVKTSRFLCQRPDGALYGSLHFDPEACSFRELLLEDGYNVYQSEAHGLPLHLPGCKSPHRDPAPRGPARFLPLPGLPPAPPEPPGILAPQPPDVGSSDPLSMVYPSQGRSPSYAS

SEQ ID NO: 1596 - protein, 472 aa, Artificial Sequence
  Fusion Protein
AHGEGTFTSDLSIQLDEEAVQLFIEWLLATGPSSGAPPPSGGGGGGGSGGGGSGGGGSADKTHTCPPCPAPEAAGGPSVFLFPPKPKDTLMISRTPEVTCVVVDVSHEDPEVKFNWYVDGVEVHNAKTKPREEQYNSTYRVVSVLTVLHQDWLNGKEYKCKVSNKALPAPIEKTISKAKGQPREPQVYTLPPSRDELTKNQVSLTCLVKGFYPSDIAVEWESNGQPENNYKTTPPVLDSDGSFFLYSKLTVDKSRWQQGNVFSCSVMHEALHNHYTQKSLSLSPGGGGSGSAHPIPDSSPLLQFGGQVRQRYLYTDDACQTEAHLEIREDGTVGGAADQSPESLLQLKALKPGVIQILGVKTSRFLCQRPDGALYGSLHFDPEACSFRELLLEDGYNVYQSEAHGLPLHLCGNKSPHRDPAPRGPARFLPLPGLPPAPPEPPGILAPQPPDVGSSDPLSMVGSQGRSPSYAS

SEQ ID NO: 1597 - protein, 473 aa, Artificial Sequence
  Fusion Protein
AHGEGTFTSDLSIQLDEEAVQLFIEWLLATGPSSGAPPPSGGGGGGGSGGGGSGGGGSADKTHTCPPCPAPEAAGGPSVFLFPPKPKDTLMISRTPEVTCVVVDVSHEDPEVKFNWYVDGVEVHNAKTKPREEQYNSTYRVVSVLTVLHQDWLNGKEYKCKVSNKALPAPIEKTISKAKGQPREPQVYTLPPSRDELTKNQVSLTCLVKGFYPSDIAVEWESNGQPENNYKTTPPVLDSDGSFFLYSKLTVDKSRWQQGNVFSCSVMHEALHNHYTQKSLSLSPGGGGSGSAHPIPDSSPLLQFGGQVRQRYLYTDDACQTEAHLEIREDGTVGGAADQSPESLLQLKALKPGVIQILGVKTSRFLCQRPDGALYGSLHFDPEACSFRELLLEDGYNVYQSEAHGLPLHLCGNKSPHRDPAPRGPARFLPLPGLPPAPPEPPGILAPQPPDVGSSDPLSMVYPSQGRSPSYAS

SEQ ID NO: 1598 - protein, 472 aa, Artificial Sequence
  Fusion Protein
AHGEGTFTSDLSIQLDEEAVQLFIEWLLATGPSSGAPPPSGGGGGGGSGGGGSGGGGSADKTHTCPPCPAPELLGGPSVFLFPPKPKDTLMISRTPEVTCVVVDVSHEDPEVKFNWYVDGVEVHNAKTKPREEQYNNASRVVSVLTVLHQDWLNGKEYKCKVSNKALPAPIEKTISKAKGQPREPQVYTLPPSRDELTKNQVSLTCLVKGFYPSDIAVEWESNGQPENNYKTTPPVLDSDGSFFLYSKLTVDKSRWQQGNVFSCSVMHEALHNHYTQKSLSLSPGGGGSGSAHPIPDSSPLLQFGGQVRQRYLYTDDACQTEAHLEIREDGTVGGAADQSPESLLQLKALKPGVIQILGVKTSRFLCQRPDGALYGSLHFDPEACSFRELLLEDGYNVYQSEAHGLPLHLPGCKSPHRDPAPRGPARFLPLPGLPPAPPEPPGILAPQPPDVGSSDPLSMVGSQGRSPSYAS

SEQ ID NO: 1599 - protein, 473 aa, Artificial Sequence
  Fusion Protein
AHGEGTFTSDLSIQLDEEAVQLFIEWLLATGPSSGAPPPSGGGGGGGSGGGGSGGGGSADKTHTCPPCPAPELLGGPSVFLFPPKPKDTLMISRTPEVTCVVVDVSHEDPEVKFNWYVDGVEVHNAKTKPREEQYNNASRVVSVLTVLHQDWLNGKEYKCKVSNKALPAPIEKTISKAKGQPREPQVYTLPPSRDELTKNQVSLTCLVKGFYPSDIAVEWESNGQPENNYKTTPPVLDSDGSFFLYSKLTVDKSRWQQGNVFSCSVMHEALHNHYTQKSLSLSPGGGGSGSAHPIPDSSPLLQFGGQVRQRYLYTDDACQTEAHLEIREDGTVGGAADQSPESLLQLKALKPGVIQILGVKTSRFLCQRPDGALYGSLHFDPEACSFRELLLEDGYNVYQSEAHGLPLHLPGCKSPHRDPAPRGPARFLPLPGLPPAPPEPPGILAPQPPDVGSSDPLSMVYPSQGRSPSYAS

SEQ ID NO: 1600 - protein, 472 aa, Artificial Sequence
  Fusion Protein
AHGEGTFTSDLSIQLDEEAVQLFIEWLLATGPSSGAPPPSGGGGGGGSGGGGSGGGGSADKTHTCPPCPAPELLGGPSVFLFPPKPKDTLMISRTPEVTCVVVDVSHEDPEVKFNWYVDGVEVHNAKTKPREEQYNNASRVVSVLTVLHQDWLNGKEYKCKVSNKALPAPIEKTISKAKGQPREPQVYTLPPSRDELTKNQVSLTCLVKGFYPSDIAVEWESNGQPENNYKTTPPVLDSDGSFFLYSKLTVDKSRWQQGNVFSCSVMHEALHNHYTQKSLSLSPGGGGSGSAHPIPDSSPLLQFGGQVRQRYLYTDDACQTEAHLEIREDGTVGGAADQSPESLLQLKALKPGVIQILGVKTSRFLCQRPDGALYGSLHFDPEACSFRELLLEDGYNVYQSEAHGLPLHLCGNKSPHRDPAPRGPARFLPLPGLPPAPPEPPGILAPQPPDVGSSDPLSMVGSQGRSPSYAS

SEQ ID NO: 1601 - protein, 473 aa, Artificial Sequence
  Fusion Protein
AHGEGTFTSDLSIQLDEEAVQLFIEWLLATGPSSGAPPPSGGGGGGGSGGGGSGGGGSADKTHTCPPCPAPELLGGPSVFLFPPKPKDTLMISRTPEVTCVVVDVSHEDPEVKFNWYVDGVEVHNAKTKPREEQYNNASRVVSVLTVLHQDWLNGKEYKCKVSNKALPAPIEKTISKAKGQPREPQVYTLPPSRDELTKNQVSLTCLVKGFYPSDIAVEWESNGQPENNYKTTPPVLDSDGSFFLYSKLTVDKSRWQQGNVFSCSVMHEALHNHYTQKSLSLSPGGGGSGSAHPIPDSSPLLQFGGQVRQRYLYTDDACQTEAHLEIREDGTVGGAADQSPESLLQLKALKPGVIQILGVKTSRFLCQRPDGALYGSLHFDPEACSFRELLLEDGYNVYQSEAHGLPLHLCGNKSPHRDPAPRGPARFLPLPGLPPAPPEPPGILAPQPPDVGSSDPLSMVYPSQGRSPSYAS

SEQ ID NO: 1602 - protein, 474 aa, Artificial Sequence
  Fusion Protein
AHGEGTFTSDLSIQLDEEAVQLFIEWLLATGPSSGAPPPSGGGGGGGSGGGGSGGGGSAESKYGPPCPPCPAPEFEGGPSVFLFPPKPKDTLMISRTPEVTCVVVDVSQEDPEVQFNWYVDGVEVHNAKTKPREEQFNSTYRVVSVLTVLHQDWLNGKEYKCKVSNKGLPSSIEKTISKAKGQPREPQVYTLPPSQEEMTKNQVSLTCLVKGFYPSDIAVEWESNGQPENNYKTTPPVLDSDGSFFLYSRLTVDKSRWQEGNVFSCSVMHEALHNHYTQKSLSLSLGGGGSGSAHPIPDSSPLLQFGGQVRQRYLYTDDACQTEAHLEIREDGTVGGAADQSPESLLQLKALKPGVIQILGVKTSRFLCQRPDGALYGSLHFDPEACSFRELLLEDGYNVYQSEAHGLPLHLPGCKSPHRDPAPRGPARFLPLPGLPPAPPEPPGILAPQPPDVGSSDPLSMVGSQGRSPSYAS

SEQ ID NO: 1603 - protein, 475 aa, Artificial Sequence
  Fusion Protein
AHGEGTFTSDLSIQLDEEAVQLFIEWLLATGPSSGAPPPSGGGGGGGSGGGGSGGGGSAESKYGPPCPPCPAPEFEGGPSVFLFPPKPKDTLMISRTPEVTCVVVDVSQEDPEVQFNWYVDGVEVHNAKTKPREEQFNSTYRVVSVLTVLHQDWLNGKEYKCKVSNKGLPSSIEKTISKAKGQPREPQVYTLPPSQEEMTKNQVSLTCLVKGFYPSDIAVEWESNGQPENNYKTTPPVLDSDGSFFLYSRLTVDKSRWQEGNVFSCSVMHEALHNHYTQKSLSLSLGGGGSGSAHPIPDSSPLLQFGGQVRQRYLYTDDACQTEAHLEIREDGTVGGAADQSPESLLQLKALKPGVIQILGVKTSRFLCQRPDGALYGSLHFDPEACSFRELLLEDGYNVYQSEAHGLPLHLPGCKSPHRDPAPRGPARFLPLPGLPPAPPEPPGILAPQPPDVGSSDPLSMVYPSQGRSPSYAS

SEQ ID NO: 1604 - protein, 474 aa, Artificial Sequence
  Fusion Protein
AHGEGTFTSDLSIQLDEEAVQLFIEWLLATGPSSGAPPPSGGGGGGGSGGGGSGGGGSAESKYGPPCPPCPAPEFEGGPSVFLFPPKPKDTLMISRTPEVTCVVVDVSQEDPEVQFNWYVDGVEVHNAKTKPREEQFNSTYRVVSVLTVLHQDWLNGKEYKCKVSNKGLPSSIEKTISKAKGQPREPQVYTLPPSQEEMTKNQVSLTCLVKGFYPSDIAVEWESNGQPENNYKTTPPVLDSDGSFFLYSRLTVDKSRWQEGNVFSCSVMHEALHNHYTQKSLSLSLGGGGSGSAHPIPDSSPLLQFGGQVRQRYLYTDDACQTEAHLEIREDGTVGGAADQSPESLLQLKALKPGVIQILGVKTSRFLCQRPDGALYGSLHFDPEACSFRELLLEDGYNVYQSEAHGLPLHLCGNKSPHRDPAPRGPARFLPLPGLPPAPPEPPGILAPQPPDVGSSDPLSMVGSQGRSPSYAS

SEQ ID NO: 1605 - protein, 475 aa, Artificial Sequence
  Fusion Protein
AHGEGTFTSDLSIQLDEEAVQLFIEWLLATGPSSGAPPPSGGGGGGGSGGGGSGGGGSAESKYGPPCPPCPAPEFEGGPSVFLFPPKPKDTLMISRTPEVTCVVVDVSQEDPEVQFNWYVDGVEVHNAKTKPREEQFNSTYRVVSVLTVLHQDWLNGKEYKCKVSNKGLPSSIEKTISKAKGQPREPQVYTLPPSQEEMTKNQVSLTCLVKGFYPSDIAVEWESNGQPENNYKTTPPVLDSDGSFFLYSRLTVDKSRWQEGNVFSCSVMHEALHNHYTQKSLSLSLGGGGSGSAHPIPDSSPLLQFGGQVRQRYLYTDDACQTEAHLEIREDGTVGGAADQSPESLLQLKALKPGVIQILGVKTSRFLCQRPDGALYGSLHFDPEACSFRELLLEDGYNVYQSEAHGLPLHLCGNKSPHRDPAPRGPARFLPLPGLPPAPPEPPGILAPQPPDVGSSDPLSMVYPSQGRSPSYAS

SEQ ID NO: 1606 - protein, 472 aa, Artificial Sequence
  Fusion Protein
AHGEGTFTSDLSIQLDEEAVQLFIEWLLATGPVSGAPPPSGGGGGGGSGGGGSGGGGSADKTHTCPPCPAPEAAGGPSVFLFPPKPKDTLMISRTPEVTCVVVDVSHEDPEVKFNWYVDGVEVHNAKTKPREEQYNSTYRVVSVLTVLHQDWLNGKEYKCKVSNKALPAPIEKTISKAKGQPREPQVYTLPPSRDELTKNQVSLTCLVKGFYPSDIAVEWESNGQPENNYKTTPPVLDSDGSFFLYSKLTVDKSRWQQGNVFSCSVMHEALHNHYTQKSLSLSPGGGGSGSAHPIPDSSPLLQFGGQVRQRYLYTDDACQTEAHLEIREDGTVGGAADQSPESLLQLKALKPGVIQILGVKTSRFLCQRPDGALYGSLHFDPEACSFRELLLEDGYNVYQSEAHGLPLHLPGCKSPHRDPAPRGPARFLPLPGLPPAPPEPPGILAPQPPDVGSSDPLSMVGSQGRSPSYAS

SEQ ID NO: 1607 - protein, 473 aa, Artificial Sequence
  Fusion Protein
AHGEGTFTSDLSIQLDEEAVQLFIEWLLATGPVSGAPPPSGGGGGGGSGGGGSGGGGSADKTHTCPPCPAPEAAGGPSVFLFPPKPKDTLMISRTPEVTCVVVDVSHEDPEVKFNWYVDGVEVHNAKTKPREEQYNSTYRVVSVLTVLHQDWLNGKEYKCKVSNKALPAPIEKTISKAKGQPREPQVYTLPPSRDELTKNQVSLTCLVKGFYPSDIAVEWESNGQPENNYKTTPPVLDSDGSFFLYSKLTVDKSRWQQGNVFSCSVMHEALHNHYTQKSLSLSPGGGGSGSAHPIPDSSPLLQFGGQVRQRYLYTDDACQTEAHLEIREDGTVGGAADQSPESLLQLKALKPGVIQILGVKTSRFLCQRPDGALYGSLHFDPEACSFRELLLEDGYNVYQSEAHGLPLHLPGCKSPHRDPAPRGPARFLPLPGLPPAPPEPPGILAPQPPDVGSSDPLSMVYPSQGRSPSYAS

SEQ ID NO: 1608 - protein, 472 aa, Artificial Sequence
  Fusion Protein
AHGEGTFTSDLSIQLDEEAVQLFIEWLLATGPVSGAPPPSGGGGGGGSGGGGSGGGGSADKTHTCPPCPAPEAAGGPSVFLFPPKPKDTLMISRTPEVTCVVVDVSHEDPEVKFNWYVDGVEVHNAKTKPREEQYNSTYRVVSVLTVLHQDWLNGKEYKCKVSNKALPAPIEKTISKAKGQPREPQVYTLPPSRDELTKNQVSLTCLVKGFYPSDIAVEWESNGQPENNYKTTPPVLDSDGSFFLYSKLTVDKSRWQQGNVFSCSVMHEALHNHYTQKSLSLSPGGGGSGSAHPIPDSSPLLQFGGQVRQRYLYTDDACQTEAHLEIREDGTVGGAADQSPESLLQLKALKPGVIQILGVKTSRFLCQRPDGALYGSLHFDPEACSFRELLLEDGYNVYQSEAHGLPLHLCGNKSPHRDPAPRGPARFLPLPGLPPAPPEPPGILAPQPPDVGSSDPLSMVGSQGRSPSYAS

SEQ ID NO: 1609 - protein, 473 aa, Artificial Sequence
  Fusion Protein
AHGEGTFTSDLSIQLDEEAVQLFIEWLLATGPVSGAPPPSGGGGGGGSGGGGSGGGGSADKTHTCPPCPAPEAAGGPSVFLFPPKPKDTLMISRTPEVTCVVVDVSHEDPEVKFNWYVDGVEVHNAKTKPREEQYNSTYRVVSVLTVLHQDWLNGKEYKCKVSNKALPAPIEKTISKAKGQPREPQVYTLPPSRDELTKNQVSLTCLVKGFYPSDIAVEWESNGQPENNYKTTPPVLDSDGSFFLYSKLTVDKSRWQQGNVFSCSVMHEALHNHYTQKSLSLSPGGGGSGSAHPIPDSSPLLQFGGQVRQRYLYTDDACQTEAHLEIREDGTVGGAADQSPESLLQLKALKPGVIQILGVKTSRFLCQRPDGALYGSLHFDPEACSFRELLLEDGYNVYQSEAHGLPLHLCGNKSPHRDPAPRGPARFLPLPGLPPAPPEPPGILAPQPPDVGSSDPLSMVYPSQGRSPSYAS

SEQ ID NO: 1610 - protein, 472 aa, Artificial Sequence
  Fusion Protein
AHGEGTFTSDLSIQLDEEAVQLFIEWLLATGPVSGAPPPSGGGGGGGSGGGGSGGGGSADKTHTCPPCPAPELLGGPSVFLFPPKPKDTLMISRTPEVTCVVVDVSHEDPEVKFNWYVDGVEVHNAKTKPREEQYNNASRVVSVLTVLHQDWLNGKEYKCKVSNKALPAPIEKTISKAKGQPREPQVYTLPPSRDELTKNQVSLTCLVKGFYPSDIAVEWESNGQPENNYKTTPPVLDSDGSFFLYSKLTVDKSRWQQGNVFSCSVMHEALHNHYTQKSLSLSPGGGGSGSAHPIPDSSPLLQFGGQVRQRYLYTDDACQTEAHLEIREDGTVGGAADQSPESLLQLKALKPGVIQILGVKTSRFLCQRPDGALYGSLHFDPEACSFRELLLEDGYNVYQSEAHGLPLHLPGCKSPHRDPAPRGPARFLPLPGLPPAPPEPPGILAPQPPDVGSSDPLSMVGSQGRSPSYAS

SEQ ID NO: 1611 - protein, 473 aa, Artificial Sequence
  Fusion Protein
AHGEGTFTSDLSIQLDEEAVQLFIEWLLATGPVSGAPPPSGGGGGGGSGGGGSGGGGSADKTHTCPPCPAPELLGGPSVFLFPPKPKDTLMISRTPEVTCVVVDVSHEDPEVKFNWYVDGVEVHNAKTKPREEQYNNASRVVSVLTVLHQDWLNGKEYKCKVSNKALPAPIEKTISKAKGQPREPQVYTLPPSRDELTKNQVSLTCLVKGFYPSDIAVEWESNGQPENNYKTTPPVLDSDGSFFLYSKLTVDKSRWQQGNVFSCSVMHEALHNHYTQKSLSLSPGGGGSGSAHPIPDSSPLLQFGGQVRQRYLYTDDACQTEAHLEIREDGTVGGAADQSPESLLQLKALKPGVIQILGVKTSRFLCQRPDGALYGSLHFDPEACSFRELLLEDGYNVYQSEAHGLPLHLPGCKSPHRDPAPRGPARFLPLPGLPPAPPEPPGILAPQPPDVGSSDPLSMVYPSQGRSPSYAS

SEQ ID NO: 1612 - protein, 472 aa, Artificial Sequence
  Fusion Protein
AHGEGTFTSDLSIQLDEEAVQLFIEWLLATGPVSGAPPPSGGGGGGGSGGGGSGGGGSADKTHTCPPCPAPELLGGPSVFLFPPKPKDTLMISRTPEVTCVVVDVSHEDPEVKFNWYVDGVEVHNAKTKPREEQYNNASRVVSVLTVLHQDWLNGKEYKCKVSNKALPAPIEKTISKAKGQPREPQVYTLPPSRDELTKNQVSLTCLVKGFYPSDIAVEWESNGQPENNYKTTPPVLDSDGSFFLYSKLTVDKSRWQQGNVFSCSVMHEALHNHYTQKSLSLSPGGGGSGSAHPIPDSSPLLQFGGQVRQRYLYTDDACQTEAHLEIREDGTVGGAADQSPESLLQLKALKPGVIQILGVKTSRFLCQRPDGALYGSLHFDPEACSFRELLLEDGYNVYQSEAHGLPLHLCGNKSPHRDPAPRGPARFLPLPGLPPAPPEPPGILAPQPPDVGSSDPLSMVGSQGRSPSYAS

SEQ ID NO: 1613 - protein, 473 aa, Artificial Sequence
  Fusion Protein
AHGEGTFTSDLSIQLDEEAVQLFIEWLLATGPVSGAPPPSGGGGGGGSGGGGSGGGGSADKTHTCPPCPAPELLGGPSVFLFPPKPKDTLMISRTPEVTCVVVDVSHEDPEVKFNWYVDGVEVHNAKTKPREEQYNNASRVVSVLTVLHQDWLNGKEYKCKVSNKALPAPIEKTISKAKGQPREPQVYTLPPSRDELTKNQVSLTCLVKGFYPSDIAVEWESNGQPENNYKTTPPVLDSDGSFFLYSKLTVDKSRWQQGNVFSCSVMHEALHNHYTQKSLSLSPGGGGSGSAHPIPDSSPLLQFGGQVRQRYLYTDDACQTEAHLEIREDGTVGGAADQSPESLLQLKALKPGVIQILGVKTSRFLCQRPDGALYGSLHFDPEACSFRELLLEDGYNVYQSEAHGLPLHLCGNKSPHRDPAPRGPARFLPLPGLPPAPPEPPGILAPQPPDVGSSDPLSMVYPSQGRSPSYAS

SEQ ID NO: 1614 - protein, 474 aa, Artificial Sequence
  Fusion Protein
AHGEGTFTSDLSIQLDEEAVQLFIEWLLATGPVSGAPPPSGGGGGGGSGGGGSGGGGSAESKYGPPCPPCPAPEFEGGPSVFLFPPKPKDTLMISRTPEVTCVVVDVSQEDPEVQFNWYVDGVEVHNAKTKPREEQFNSTYRVVSVLTVLHQDWLNGKEYKCKVSNKGLPSSIEKTISKAKGQPREPQVYTLPPSQEEMTKNQVSLTCLVKGFYPSDIAVEWESNGQPENNYKTTPPVLDSDGSFFLYSRLTVDKSRWQEGNVFSCSVMHEALHNHYTQKSLSLSLGGGGSGSAHPIPDSSPLLQFGGQVRQRYLYTDDACQTEAHLEIREDGTVGGAADQSPESLLQLKALKPGVIQILGVKTSRFLCQRPDGALYGSLHFDPEACSFRELLLEDGYNVYQSEAHGLPLHLPGCKSPHRDPAPRGPARFLPLPGLPPAPPEPPGILAPQPPDVGSSDPLSMVGSQGRSPSYAS

SEQ ID NO: 1615 - protein, 475 aa, Artificial Sequence
  Fusion Protein
AHGEGTFTSDLSIQLDEEAVQLFIEWLLATGPVSGAPPPSGGGGGGGSGGGGSGGGGSAESKYGPPCPPCPAPEFEGGPSVFLFPPKPKDTLMISRTPEVTCVVVDVSQEDPEVQFNWYVDGVEVHNAKTKPREEQFNSTYRVVSVLTVLHQDWLNGKEYKCKVSNKGLPSSIEKTISKAKGQPREPQVYTLPPSQEEMTKNQVSLTCLVKGFYPSDIAVEWESNGQPENNYKTTPPVLDSDGSFFLYSRLTVDKSRWQEGNVFSCSVMHEALHNHYTQKSLSLSLGGGGSGSAHPIPDSSPLLQFGGQVRQRYLYTDDACQTEAHLEIREDGTVGGAADQSPESLLQLKALKPGVIQILGVKTSRFLCQRPDGALYGSLHFDPEACSFRELLLEDGYNVYQSEAHGLPLHLPGCKSPHRDPAPRGPARFLPLPGLPPAPPEPPGILAPQPPDVGSSDPLSMVYPSQGRSPSYAS

SEQ ID NO: 1616 - protein, 474 aa, Artificial Sequence
  Fusion Protein
AHGEGTFTSDLSIQLDEEAVQLFIEWLLATGPVSGAPPPSGGGGGGGSGGGGSGGGGSAESKYGPPCPPCPAPEFEGGPSVFLFPPKPKDTLMISRTPEVTCVVVDVSQEDPEVQFNWYVDGVEVHNAKTKPREEQFNSTYRVVSVLTVLHQDWLNGKEYKCKVSNKGLPSSIEKTISKAKGQPREPQVYTLPPSQEEMTKNQVSLTCLVKGFYPSDIAVEWESNGQPENNYKTTPPVLDSDGSFFLYSRLTVDKSRWQEGNVFSCSVMHEALHNHYTQKSLSLSLGGGGSGSAHPIPDSSPLLQFGGQVRQRYLYTDDACQTEAHLEIREDGTVGGAADQSPESLLQLKALKPGVIQILGVKTSRFLCQRPDGALYGSLHFDPEACSFRELLLEDGYNVYQSEAHGLPLHLCGNKSPHRDPAPRGPARFLPLPGLPPAPPEPPGILAPQPPDVGSSDPLSMVGSQGRSPSYAS

SEQ ID NO: 1617 - protein, 475 aa, Artificial Sequence
  Fusion Protein
AHGEGTFTSDLSIQLDEEAVQLFIEWLLATGPVSGAPPPSGGGGGGGSGGGGSGGGGSAESKYGPPCPPCPAPEFEGGPSVFLFPPKPKDTLMISRTPEVTCVVVDVSQEDPEVQFNWYVDGVEVHNAKTKPREEQFNSTYRVVSVLTVLHQDWLNGKEYKCKVSNKGLPSSIEKTISKAKGQPREPQVYTLPPSQEEMTKNQVSLTCLVKGFYPSDIAVEWESNGQPENNYKTTPPVLDSDGSFFLYSRLTVDKSRWQEGNVFSCSVMHEALHNHYTQKSLSLSLGGGGSGSAHPIPDSSPLLQFGGQVRQRYLYTDDACQTEAHLEIREDGTVGGAADQSPESLLQLKALKPGVIQILGVKTSRFLCQRPDGALYGSLHFDPEACSFRELLLEDGYNVYQSEAHGLPLHLCGNKSPHRDPAPRGPARFLPLPGLPPAPPEPPGILAPQPPDVGSSDPLSMVYPSQGRSPSYAS

SEQ ID NO: 1618 - protein, 472 aa, Artificial Sequence
  Fusion Protein
AHGEGTFTSDLSILLDEEAVREFIEWLLATGPSSGAPPPSGGGGGGGSGGGGSGGGGSADKTHTCPPCPAPEAAGGPSVFLFPPKPKDTLMISRTPEVTCVVVDVSHEDPEVKFNWYVDGVEVHNAKTKPREEQYNSTYRVVSVLTVLHQDWLNGKEYKCKVSNKALPAPIEKTISKAKGQPREPQVYTLPPSRDELTKNQVSLTCLVKGFYPSDIAVEWESNGQPENNYKTTPPVLDSDGSFFLYSKLTVDKSRWQQGNVFSCSVMHEALHNHYTQKSLSLSPGGGGSGSAHPIPDSSPLLQFGGQVRQRYLYTDDACQTEAHLEIREDGTVGGAADQSPESLLQLKALKPGVIQILGVKTSRFLCQRPDGALYGSLHFDPEACSFRELLLEDGYNVYQSEAHGLPLHLPGCKSPHRDPAPRGPARFLPLPGLPPAPPEPPGILAPQPPDVGSSDPLSMVGSQGRSPSYAS

SEQ ID NO: 1619 - protein, 473 aa, Artificial Sequence
  Fusion Protein
AHGEGTFTSDLSILLDEEAVREFIEWLLATGPSSGAPPPSGGGGGGGSGGGGSGGGGSADKTHTCPPCPAPEAAGGPSVFLFPPKPKDTLMISRTPEVTCVVVDVSHEDPEVKFNWYVDGVEVHNAKTKPREEQYNSTYRVVSVLTVLHQDWLNGKEYKCKVSNKALPAPIEKTISKAKGQPREPQVYTLPPSRDELTKNQVSLTCLVKGFYPSDIAVEWESNGQPENNYKTTPPVLDSDGSFFLYSKLTVDKSRWQQGNVFSCSVMHEALHNHYTQKSLSLSPGGGGSGSAHPIPDSSPLLQFGGQVRQRYLYTDDACQTEAHLEIREDGTVGGAADQSPESLLQLKALKPGVIQILGVKTSRFLCQRPDGALYGSLHFDPEACSFRELLLEDGYNVYQSEAHGLPLHLPGCKSPHRDPAPRGPARFLPLPGLPPAPPEPPGILAPQPPDVGSSDPLSMVYPSQGRSPSYAS

SEQ ID NO: 1620 - protein, 472 aa, Artificial Sequence
  Fusion Protein
AHGEGTFTSDLSILLDEEAVREFIEWLLATGPSSGAPPPSGGGGGGGSGGGGSGGGGSADKTHTCPPCPAPEAAGGPSVFLFPPKPKDTLMISRTPEVTCVVVDVSHEDPEVKFNWYVDGVEVHNAKTKPREEQYNSTYRVVSVLTVLHQDWLNGKEYKCKVSNKALPAPIEKTISKAKGQPREPQVYTLPPSRDELTKNQVSLTCLVKGFYPSDIAVEWESNGQPENNYKTTPPVLDSDGSFFLYSKLTVDKSRWQQGNVFSCSVMHEALHNHYTQKSLSLSPGGGGSGSAHPIPDSSPLLQFGGQVRQRYLYTDDACQTEAHLEIREDGTVGGAADQSPESLLQLKALKPGVIQILGVKTSRFLCQRPDGALYGSLHFDPEACSFRELLLEDGYNVYQSEAHGLPLHLCGNKSPHRDPAPRGPARFLPLPGLPPAPPEPPGILAPQPPDVGSSDPLSMVGSQGRSPSYAS

SEQ ID NO: 1621 - protein, 473 aa, Artificial Sequence
  Fusion Protein
AHGEGTFTSDLSILLDEEAVREFIEWLLATGPSSGAPPPSGGGGGGGSGGGGSGGGGSADKTHTCPPCPAPEAAGGPSVFLFPPKPKDTLMISRTPEVTCVVVDVSHEDPEVKFNWYVDGVEVHNAKTKPREEQYNSTYRVVSVLTVLHQDWLNGKEYKCKVSNKALPAPIEKTISKAKGQPREPQVYTLPPSRDELTKNQVSLTCLVKGFYPSDIAVEWESNGQPENNYKTTPPVLDSDGSFFLYSKLTVDKSRWQQGNVFSCSVMHEALHNHYTQKSLSLSPGGGGSGSAHPIPDSSPLLQFGGQVRQRYLYTDDACQTEAHLEIREDGTVGGAADQSPESLLQLKALKPGVIQILGVKTSRFLCQRPDGALYGSLHFDPEACSFRELLLEDGYNVYQSEAHGLPLHLCGNKSPHRDPAPRGPARFLPLPGLPPAPPEPPGILAPQPPDVGSSDPLSMVYPSQGRSPSYAS

SEQ ID NO: 1622 - protein, 472 aa, Artificial Sequence
  Fusion Protein
AHGEGTFTSDLSILLDEEAVREFIEWLLATGPSSGAPPPSGGGGGGGSGGGGSGGGGSADKTHTCPPCPAPELLGGPSVFLFPPKPKDTLMISRTPEVTCVVVDVSHEDPEVKFNWYVDGVEVHNAKTKPREEQYNNASRVVSVLTVLHQDWLNGKEYKCKVSNKALPAPIEKTISKAKGQPREPQVYTLPPSRDELTKNQVSLTCLVKGFYPSDIAVEWESNGQPENNYKTTPPVLDSDGSFFLYSKLTVDKSRWQQGNVFSCSVMHEALHNHYTQKSLSLSPGGGGSGSAHPIPDSSPLLQFGGQVRQRYLYTDDACQTEAHLEIREDGTVGGAADQSPESLLQLKALKPGVIQILGVKTSRFLCQRPDGALYGSLHFDPEACSFRELLLEDGYNVYQSEAHGLPLHLPGCKSPHRDPAPRGPARFLPLPGLPPAPPEPPGILAPQPPDVGSSDPLSMVGSQGRSPSYAS

SEQ ID NO: 1623 - protein, 473 aa, Artificial Sequence
  Fusion Protein
AHGEGTFTSDLSILLDEEAVREFIEWLLATGPSSGAPPPSGGGGGGGSGGGGSGGGGSADKTHTCPPCPAPELLGGPSVFLFPPKPKDTLMISRTPEVTCVVVDVSHEDPEVKFNWYVDGVEVHNAKTKPREEQYNNASRVVSVLTVLHQDWLNGKEYKCKVSNKALPAPIEKTISKAKGQPREPQVYTLPPSRDELTKNQVSLTCLVKGFYPSDIAVEWESNGQPENNYKTTPPVLDSDGSFFLYSKLTVDKSRWQQGNVFSCSVMHEALHNHYTQKSLSLSPGGGGSGSAHPIPDSSPLLQFGGQVRQRYLYTDDACQTEAHLEIREDGTVGGAADQSPESLLQLKALKPGVIQILGVKTSRFLCQRPDGALYGSLHFDPEACSFRELLLEDGYNVYQSEAHGLPLHLPGCKSPHRDPAPRGPARFLPLPGLPPAPPEPPGILAPQPPDVGSSDPLSMVYPSQGRSPSYAS

SEQ ID NO: 1624 - protein, 472 aa, Artificial Sequence
  Fusion Protein
AHGEGTFTSDLSILLDEEAVREFIEWLLATGPSSGAPPPSGGGGGGGSGGGGSGGGGSADKTHTCPPCPAPELLGGPSVFLFPPKPKDTLMISRTPEVTCVVVDVSHEDPEVKFNWYVDGVEVHNAKTKPREEQYNNASRVVSVLTVLHQDWLNGKEYKCKVSNKALPAPIEKTISKAKGQPREPQVYTLPPSRDELTKNQVSLTCLVKGFYPSDIAVEWESNGQPENNYKTTPPVLDSDGSFFLYSKLTVDKSRWQQGNVFSCSVMHEALHNHYTQKSLSLSPGGGGSGSAHPIPDSSPLLQFGGQVRQRYLYTDDACQTEAHLEIREDGTVGGAADQSPESLLQLKALKPGVIQILGVKTSRFLCQRPDGALYGSLHFDPEACSFRELLLEDGYNVYQSEAHGLPLHLCGNKSPHRDPAPRGPARFLPLPGLPPAPPEPPGILAPQPPDVGSSDPLSMVGSQGRSPSYAS

SEQ ID NO: 1625 - protein, 473 aa, Artificial Sequence
  Fusion Protein
AHGEGTFTSDLSILLDEEAVREFIEWLLATGPSSGAPPPSGGGGGGGSGGGGSGGGGSADKTHTCPPCPAPELLGGPSVFLFPPKPKDTLMISRTPEVTCVVVDVSHEDPEVKFNWYVDGVEVHNAKTKPREEQYNNASRVVSVLTVLHQDWLNGKEYKCKVSNKALPAPIEKTISKAKGQPREPQVYTLPPSRDELTKNQVSLTCLVKGFYPSDIAVEWESNGQPENNYKTTPPVLDSDGSFFLYSKLTVDKSRWQQGNVFSCSVMHEALHNHYTQKSLSLSPGGGGSGSAHPIPDSSPLLQFGGQVRQRYLYTDDACQTEAHLEIREDGTVGGAADQSPESLLQLKALKPGVIQILGVKTSRFLCQRPDGALYGSLHFDPEACSFRELLLEDGYNVYQSEAHGLPLHLCGNKSPHRDPAPRGPARFLPLPGLPPAPPEPPGILAPQPPDVGSSDPLSMVYPSQGRSPSYAS

SEQ ID NO: 1626 - protein, 474 aa, Artificial Sequence
  Fusion Protein
AHGEGTFTSDLSILLDEEAVREFIEWLLATGPSSGAPPPSGGGGGGGSGGGGSGGGGSAESKYGPPCPPCPAPEFEGGPSVFLFPPKPKDTLMISRTPEVTCVVVDVSQEDPEVQFNWYVDGVEVHNAKTKPREEQFNSTYRVVSVLTVLHQDWLNGKEYKCKVSNKGLPSSIEKTISKAKGQPREPQVYTLPPSQEEMTKNQVSLTCLVKGFYPSDIAVEWESNGQPENNYKTTPPVLDSDGSFFLYSRLTVDKSRWQEGNVFSCSVMHEALHNHYTQKSLSLSLGGGGSGSAHPIPDSSPLLQFGGQVRQRYLYTDDACQTEAHLEIREDGTVGGAADQSPESLLQLKALKPGVIQILGVKTSRFLCQRPDGALYGSLHFDPEACSFRELLLEDGYNVYQSEAHGLPLHLPGCKSPHRDPAPRGPARFLPLPGLPPAPPEPPGILAPQPPDVGSSDPLSMVGSQGRSPSYAS

SEQ ID NO: 1627 - protein, 475 aa, Artificial Sequence
  Fusion Protein
AHGEGTFTSDLSILLDEEAVREFIEWLLATGPSSGAPPPSGGGGGGGSGGGGSGGGGSAESKYGPPCPPCPAPEFEGGPSVFLFPPKPKDTLMISRTPEVTCVVVDVSQEDPEVQFNWYVDGVEVHNAKTKPREEQFNSTYRVVSVLTVLHQDWLNGKEYKCKVSNKGLPSSIEKTISKAKGQPREPQVYTLPPSQEEMTKNQVSLTCLVKGFYPSDIAVEWESNGQPENNYKTTPPVLDSDGSFFLYSRLTVDKSRWQEGNVFSCSVMHEALHNHYTQKSLSLSLGGGGSGSAHPIPDSSPLLQFGGQVRQRYLYTDDACQTEAHLEIREDGTVGGAADQSPESLLQLKALKPGVIQILGVKTSRFLCQRPDGALYGSLHFDPEACSFRELLLEDGYNVYQSEAHGLPLHLPGCKSPHRDPAPRGPARFLPLPGLPPAPPEPPGILAPQPPDVGSSDPLSMVYPSQGRSPSYAS

SEQ ID NO: 1628 - protein, 474 aa, Artificial Sequence
  Fusion Protein
AHGEGTFTSDLSILLDEEAVREFIEWLLATGPSSGAPPPSGGGGGGGSGGGGSGGGGSAESKYGPPCPPCPAPEFEGGPSVFLFPPKPKDTLMISRTPEVTCVVVDVSQEDPEVQFNWYVDGVEVHNAKTKPREEQFNSTYRVVSVLTVLHQDWLNGKEYKCKVSNKGLPSSIEKTISKAKGQPREPQVYTLPPSQEEMTKNQVSLTCLVKGFYPSDIAVEWESNGQPENNYKTTPPVLDSDGSFFLYSRLTVDKSRWQEGNVFSCSVMHEALHNHYTQKSLSLSLGGGGSGSAHPIPDSSPLLQFGGQVRQRYLYTDDACQTEAHLEIREDGTVGGAADQSPESLLQLKALKPGVIQILGVKTSRFLCQRPDGALYGSLHFDPEACSFRELLLEDGYNVYQSEAHGLPLHLCGNKSPHRDPAPRGPARFLPLPGLPPAPPEPPGILAPQPPDVGSSDPLSMVGSQGRSPSYAS

SEQ ID NO: 1629 - protein, 475 aa, Artificial Sequence
  Fusion Protein
AHGEGTFTSDLSILLDEEAVREFIEWLLATGPSSGAPPPSGGGGGGGSGGGGSGGGGSAESKYGPPCPPCPAPEFEGGPSVFLFPPKPKDTLMISRTPEVTCVVVDVSQEDPEVQFNWYVDGVEVHNAKTKPREEQFNSTYRVVSVLTVLHQDWLNGKEYKCKVSNKGLPSSIEKTISKAKGQPREPQVYTLPPSQEEMTKNQVSLTCLVKGFYPSDIAVEWESNGQPENNYKTTPPVLDSDGSFFLYSRLTVDKSRWQEGNVFSCSVMHEALHNHYTQKSLSLSLGGGGSGSAHPIPDSSPLLQFGGQVRQRYLYTDDACQTEAHLEIREDGTVGGAADQSPESLLQLKALKPGVIQILGVKTSRFLCQRPDGALYGSLHFDPEACSFRELLLEDGYNVYQSEAHGLPLHLCGNKSPHRDPAPRGPARFLPLPGLPPAPPEPPGILAPQPPDVGSSDPLSMVYPSQGRSPSYAS

SEQ ID NO: 1630 - protein, 472 aa, Artificial Sequence
  Fusion Protein
AHGEGTFTSDLSILLDEEAVQEFIEWLLATGPSSGAPPPSGGGGGGGSGGGGSGGGGSADKTHTCPPCPAPEAAGGPSVFLFPPKPKDTLMISRTPEVTCVVVDVSHEDPEVKFNWYVDGVEVHNAKTKPREEQYNSTYRVVSVLTVLHQDWLNGKEYKCKVSNKALPAPIEKTISKAKGQPREPQVYTLPPSRDELTKNQVSLTCLVKGFYPSDIAVEWESNGQPENNYKTTPPVLDSDGSFFLYSKLTVDKSRWQQGNVFSCSVMHEALHNHYTQKSLSLSPGGGGSGSAHPIPDSSPLLQFGGQVRQRYLYTDDACQTEAHLEIREDGTVGGAADQSPESLLQLKALKPGVIQILGVKTSRFLCQRPDGALYGSLHFDPEACSFRELLLEDGYNVYQSEAHGLPLHLPGCKSPHRDPAPRGPARFLPLPGLPPAPPEPPGILAPQPPDVGSSDPLSMVGSQGRSPSYAS

SEQ ID NO: 1631 - protein, 473 aa, Artificial Sequence
  Fusion Protein
AHGEGTFTSDLSILLDEEAVQEFIEWLLATGPSSGAPPPSGGGGGGGSGGGGSGGGGSADKTHTCPPCPAPEAAGGPSVFLFPPKPKDTLMISRTPEVTCVVVDVSHEDPEVKFNWYVDGVEVHNAKTKPREEQYNSTYRVVSVLTVLHQDWLNGKEYKCKVSNKALPAPIEKTISKAKGQPREPQVYTLPPSRDELTKNQVSLTCLVKGFYPSDIAVEWESNGQPENNYKTTPPVLDSDGSFFLYSKLTVDKSRWQQGNVFSCSVMHEALHNHYTQKSLSLSPGGGGSGSAHPIPDSSPLLQFGGQVRQRYLYTDDACQTEAHLEIREDGTVGGAADQSPESLLQLKALKPGVIQILGVKTSRFLCQRPDGALYGSLHFDPEACSFRELLLEDGYNVYQSEAHGLPLHLPGCKSPHRDPAPRGPARFLPLPGLPPAPPEPPGILAPQPPDVGSSDPLSMVYPSQGRSPSYAS

SEQ ID NO: 1632 - protein, 472 aa, Artificial Sequence
  Fusion Protein
AHGEGTFTSDLSILLDEEAVQEFIEWLLATGPSSGAPPPSGGGGGGGSGGGGSGGGGSADKTHTCPPCPAPEAAGGPSVFLFPPKPKDTLMISRTPEVTCVVVDVSHEDPEVKFNWYVDGVEVHNAKTKPREEQYNSTYRVVSVLTVLHQDWLNGKEYKCKVSNKALPAPIEKTISKAKGQPREPQVYTLPPSRDELTKNQVSLTCLVKGFYPSDIAVEWESNGQPENNYKTTPPVLDSDGSFFLYSKLTVDKSRWQQGNVFSCSVMHEALHNHYTQKSLSLSPGGGGSGSAHPIPDSSPLLQFGGQVRQRYLYTDDACQTEAHLEIREDGTVGGAADQSPESLLQLKALKPGVIQILGVKTSRFLCQRPDGALYGSLHFDPEACSFRELLLEDGYNVYQSEAHGLPLHLCGNKSPHRDPAPRGPARFLPLPGLPPAPPEPPGILAPQPPDVGSSDPLSMVGSQGRSPSYAS

SEQ ID NO: 1633 - protein, 473 aa, Artificial Sequence
  Fusion Protein
AHGEGTFTSDLSILLDEEAVQEFIEWLLATGPSSGAPPPSGGGGGGGSGGGGSGGGGSADKTHTCPPCPAPEAAGGPSVFLFPPKPKDTLMISRTPEVTCVVVDVSHEDPEVKFNWYVDGVEVHNAKTKPREEQYNSTYRVVSVLTVLHQDWLNGKEYKCKVSNKALPAPIEKTISKAKGQPREPQVYTLPPSRDELTKNQVSLTCLVKGFYPSDIAVEWESNGQPENNYKTTPPVLDSDGSFFLYSKLTVDKSRWQQGNVFSCSVMHEALHNHYTQKSLSLSPGGGGSGSAHPIPDSSPLLQFGGQVRQRYLYTDDACQTEAHLEIREDGTVGGAADQSPESLLQLKALKPGVIQILGVKTSRFLCQRPDGALYGSLHFDPEACSFRELLLEDGYNVYQSEAHGLPLHLCGNKSPHRDPAPRGPARFLPLPGLPPAPPEPPGILAPQPPDVGSSDPLSMVYPSQGRSPSYAS

SEQ ID NO: 1634 - protein, 472 aa, Artificial Sequence
  Fusion Protein
AHGEGTFTSDLSILLDEEAVQEFIEWLLATGPSSGAPPPSGGGGGGGSGGGGSGGGGSADKTHTCPPCPAPELLGGPSVFLFPPKPKDTLMISRTPEVTCVVVDVSHEDPEVKFNWYVDGVEVHNAKTKPREEQYNNASRVVSVLTVLHQDWLNGKEYKCKVSNKALPAPIEKTISKAKGQPREPQVYTLPPSRDELTKNQVSLTCLVKGFYPSDIAVEWESNGQPENNYKTTPPVLDSDGSFFLYSKLTVDKSRWQQGNVFSCSVMHEALHNHYTQKSLSLSPGGGGSGSAHPIPDSSPLLQFGGQVRQRYLYTDDACQTEAHLEIREDGTVGGAADQSPESLLQLKALKPGVIQILGVKTSRFLCQRPDGALYGSLHFDPEACSFRELLLEDGYNVYQSEAHGLPLHLPGCKSPHRDPAPRGPARFLPLPGLPPAPPEPPGILAPQPPDVGSSDPLSMVGSQGRSPSYAS

SEQ ID NO: 1635 - protein, 473 aa, Artificial Sequence
  Fusion Protein
AHGEGTFTSDLSILLDEEAVQEFIEWLLATGPSSGAPPPSGGGGGGGSGGGGSGGGGSADKTHTCPPCPAPELLGGPSVFLFPPKPKDTLMISRTPEVTCVVVDVSHEDPEVKFNWYVDGVEVHNAKTKPREEQYNNASRVVSVLTVLHQDWLNGKEYKCKVSNKALPAPIEKTISKAKGQPREPQVYTLPPSRDELTKNQVSLTCLVKGFYPSDIAVEWESNGQPENNYKTTPPVLDSDGSFFLYSKLTVDKSRWQQGNVFSCSVMHEALHNHYTQKSLSLSPGGGGSGSAHPIPDSSPLLQFGGQVRQRYLYTDDACQTEAHLEIREDGTVGGAADQSPESLLQLKALKPGVIQILGVKTSRFLCQRPDGALYGSLHFDPEACSFRELLLEDGYNVYQSEAHGLPLHLPGCKSPHRDPAPRGPARFLPLPGLPPAPPEPPGILAPQPPDVGSSDPLSMVYPSQGRSPSYAS

SEQ ID NO: 1636 - protein, 472 aa, Artificial Sequence
  Fusion Protein
AHGEGTFTSDLSILLDEEAVQEFIEWLLATGPSSGAPPPSGGGGGGGSGGGGSGGGGSADKTHTCPPCPAPELLGGPSVFLFPPKPKDTLMISRTPEVTCVVVDVSHEDPEVKFNWYVDGVEVHNAKTKPREEQYNNASRVVSVLTVLHQDWLNGKEYKCKVSNKALPAPIEKTISKAKGQPREPQVYTLPPSRDELTKNQVSLTCLVKGFYPSDIAVEWESNGQPENNYKTTPPVLDSDGSFFLYSKLTVDKSRWQQGNVFSCSVMHEALHNHYTQKSLSLSPGGGGSGSAHPIPDSSPLLQFGGQVRQRYLYTDDACQTEAHLEIREDGTVGGAADQSPESLLQLKALKPGVIQILGVKTSRFLCQRPDGALYGSLHFDPEACSFRELLLEDGYNVYQSEAHGLPLHLCGNKSPHRDPAPRGPARFLPLPGLPPAPPEPPGILAPQPPDVGSSDPLSMVGSQGRSPSYAS

SEQ ID NO: 1637 - protein, 473 aa, Artificial Sequence
  Fusion Protein
AHGEGTFTSDLSILLDEEAVQEFIEWLLATGPSSGAPPPSGGGGGGGSGGGGSGGGGSADKTHTCPPCPAPELLGGPSVFLFPPKPKDTLMISRTPEVTCVVVDVSHEDPEVKFNWYVDGVEVHNAKTKPREEQYNNASRVVSVLTVLHQDWLNGKEYKCKVSNKALPAPIEKTISKAKGQPREPQVYTLPPSRDELTKNQVSLTCLVKGFYPSDIAVEWESNGQPENNYKTTPPVLDSDGSFFLYSKLTVDKSRWQQGNVFSCSVMHEALHNHYTQKSLSLSPGGGGSGSAHPIPDSSPLLQFGGQVRQRYLYTDDACQTEAHLEIREDGTVGGAADQSPESLLQLKALKPGVIQILGVKTSRFLCQRPDGALYGSLHFDPEACSFRELLLEDGYNVYQSEAHGLPLHLCGNKSPHRDPAPRGPARFLPLPGLPPAPPEPPGILAPQPPDVGSSDPLSMVYPSQGRSPSYAS

SEQ ID NO: 1638 - protein, 474 aa, Artificial Sequence
  Fusion Protein
AHGEGTFTSDLSILLDEEAVQEFIEWLLATGPSSGAPPPSGGGGGGGSGGGGSGGGGSAESKYGPPCPPCPAPEFEGGPSVFLFPPKPKDTLMISRTPEVTCVVVDVSQEDPEVQFNWYVDGVEVHNAKTKPREEQFNSTYRVVSVLTVLHQDWLNGKEYKCKVSNKGLPSSIEKTISKAKGQPREPQVYTLPPSQEEMTKNQVSLTCLVKGFYPSDIAVEWESNGQPENNYKTTPPVLDSDGSFFLYSRLTVDKSRWQEGNVFSCSVMHEALHNHYTQKSLSLSLGGGGSGSAHPIPDSSPLLQFGGQVRQRYLYTDDACQTEAHLEIREDGTVGGAADQSPESLLQLKALKPGVIQILGVKTSRFLCQRPDGALYGSLHFDPEACSFRELLLEDGYNVYQSEAHGLPLHLPGCKSPHRDPAPRGPARFLPLPGLPPAPPEPPGILAPQPPDVGSSDPLSMVGSQGRSPSYAS

SEQ ID NO: 1639 - protein, 475 aa, Artificial Sequence
  Fusion Protein
AHGEGTFTSDLSILLDEEAVQEFIEWLLATGPSSGAPPPSGGGGGGGSGGGGSGGGGSAESKYGPPCPPCPAPEFEGGPSVFLFPPKPKDTLMISRTPEVTCVVVDVSQEDPEVQFNWYVDGVEVHNAKTKPREEQFNSTYRVVSVLTVLHQDWLNGKEYKCKVSNKGLPSSIEKTISKAKGQPREPQVYTLPPSQEEMTKNQVSLTCLVKGFYPSDIAVEWESNGQPENNYKTTPPVLDSDGSFFLYSRLTVDKSRWQEGNVFSCSVMHEALHNHYTQKSLSLSLGGGGSGSAHPIPDSSPLLQFGGQVRQRYLYTDDACQTEAHLEIREDGTVGGAADQSPESLLQLKALKPGVIQILGVKTSRFLCQRPDGALYGSLHFDPEACSFRELLLEDGYNVYQSEAHGLPLHLPGCKSPHRDPAPRGPARFLPLPGLPPAPPEPPGILAPQPPDVGSSDPLSMVYPSQGRSPSYAS

SEQ ID NO: 1640 - protein, 474 aa, Artificial Sequence
  Fusion Protein
AHGEGTFTSDLSILLDEEAVQEFIEWLLATGPSSGAPPPSGGGGGGGSGGGGSGGGGSAESKYGPPCPPCPAPEFEGGPSVFLFPPKPKDTLMISRTPEVTCVVVDVSQEDPEVQFNWYVDGVEVHNAKTKPREEQFNSTYRVVSVLTVLHQDWLNGKEYKCKVSNKGLPSSIEKTISKAKGQPREPQVYTLPPSQEEMTKNQVSLTCLVKGFYPSDIAVEWESNGQPENNYKTTPPVLDSDGSFFLYSRLTVDKSRWQEGNVFSCSVMHEALHNHYTQKSLSLSLGGGGSGSAHPIPDSSPLLQFGGQVRQRYLYTDDACQTEAHLEIREDGTVGGAADQSPESLLQLKALKPGVIQILGVKTSRFLCQRPDGALYGSLHFDPEACSFRELLLEDGYNVYQSEAHGLPLHLCGNKSPHRDPAPRGPARFLPLPGLPPAPPEPPGILAPQPPDVGSSDPLSMVGSQGRSPSYAS

SEQ ID NO: 1641 - protein, 475 aa, Artificial Sequence
  Fusion Protein
AHGEGTFTSDLSILLDEEAVQEFIEWLLATGPSSGAPPPSGGGGGGGSGGGGSGGGGSAESKYGPPCPPCPAPEFEGGPSVFLFPPKPKDTLMISRTPEVTCVVVDVSQEDPEVQFNWYVDGVEVHNAKTKPREEQFNSTYRVVSVLTVLHQDWLNGKEYKCKVSNKGLPSSIEKTISKAKGQPREPQVYTLPPSQEEMTKNQVSLTCLVKGFYPSDIAVEWESNGQPENNYKTTPPVLDSDGSFFLYSRLTVDKSRWQEGNVFSCSVMHEALHNHYTQKSLSLSLGGGGSGSAHPIPDSSPLLQFGGQVRQRYLYTDDACQTEAHLEIREDGTVGGAADQSPESLLQLKALKPGVIQILGVKTSRFLCQRPDGALYGSLHFDPEACSFRELLLEDGYNVYQSEAHGLPLHLCGNKSPHRDPAPRGPARFLPLPGLPPAPPEPPGILAPQPPDVGSSDPLSMVYPSQGRSPSYAS

SEQ ID NO: 1642 - protein, 472 aa, Artificial Sequence
  Fusion Protein
AHGEGTFTSDKSIQLEKEAVRLFIEWLLAGGHPSGKPPPKGGGGGGGSGGGGSGGGGSADKTHTCPPCPAPEAAGGPSVFLFPPKPKDTLMISRTPEVTCVVVDVSHEDPEVKFNWYVDGVEVHNAKTKPREEQYNSTYRVVSVLTVLHQDWLNGKEYKCKVSNKALPAPIEKTISKAKGQPREPQVYTLPPSRDELTKNQVSLTCLVKGFYPSDIAVEWESNGQPENNYKTTPPVLDSDGSFFLYSKLTVDKSRWQQGNVFSCSVMHEALHNHYTQKSLSLSPGGGGSGSAHPIPDSSPLLQFGGQVRQRYLYTDDACQTEAHLEIREDGTVGGAADQSPESLLQLKALKPGVIQILGVKTSRFLCQRPDGALYGSLHFDPEACSFRELLLEDGYNVYQSEAHGLPLHLPGCKSPHRDPAPRGPARFLPLPGLPPAPPEPPGILAPQPPDVGSSDPLSMVGSQGRSPSYAS

SEQ ID NO: 1643 - protein, 473 aa, Artificial Sequence
  Fusion Protein
AHGEGTFTSDKSIQLEKEAVRLFIEWLLAGGHPSGKPPPKGGGGGGGSGGGGSGGGGSADKTHTCPPCPAPEAAGGPSVFLFPPKPKDTLMISRTPEVTCVVVDVSHEDPEVKFNWYVDGVEVHNAKTKPREEQYNSTYRVVSVLTVLHQDWLNGKEYKCKVSNKALPAPIEKTISKAKGQPREPQVYTLPPSRDELTKNQVSLTCLVKGFYPSDIAVEWESNGQPENNYKTTPPVLDSDGSFFLYSKLTVDKSRWQQGNVFSCSVMHEALHNHYTQKSLSLSPGGGGSGSAHPIPDSSPLLQFGGQVRQRYLYTDDACQTEAHLEIREDGTVGGAADQSPESLLQLKALKPGVIQILGVKTSRFLCQRPDGALYGSLHFDPEACSFRELLLEDGYNVYQSEAHGLPLHLPGCKSPHRDPAPRGPARFLPLPGLPPAPPEPPGILAPQPPDVGSSDPLSMVYPSQGRSPSYAS

SEQ ID NO: 1644 - protein, 472 aa, Artificial Sequence
  Fusion Protein
AHGEGTFTSDKSIQLEKEAVRLFIEWLLAGGHPSGKPPPKGGGGGGGSGGGGSGGGGSADKTHTCPPCPAPEAAGGPSVFLFPPKPKDTLMISRTPEVTCVVVDVSHEDPEVKFNWYVDGVEVHNAKTKPREEQYNSTYRVVSVLTVLHQDWLNGKEYKCKVSNKALPAPIEKTISKAKGQPREPQVYTLPPSRDELTKNQVSLTCLVKGFYPSDIAVEWESNGQPENNYKTTPPVLDSDGSFFLYSKLTVDKSRWQQGNVFSCSVMHEALHNHYTQKSLSLSPGGGGSGSAHPIPDSSPLLQFGGQVRQRYLYTDDACQTEAHLEIREDGTVGGAADQSPESLLQLKALKPGVIQILGVKTSRFLCQRPDGALYGSLHFDPEACSFRELLLEDGYNVYQSEAHGLPLHLCGNKSPHRDPAPRGPARFLPLPGLPPAPPEPPGILAPQPPDVGSSDPLSMVGSQGRSPSYAS

SEQ ID NO: 1645 - protein, 473 aa, Artificial Sequence
  Fusion Protein
AHGEGTFTSDKSIQLEKEAVRLFIEWLLAGGHPSGKPPPKGGGGGGGSGGGGSGGGGSADKTHTCPPCPAPEAAGGPSVFLFPPKPKDTLMISRTPEVTCVVVDVSHEDPEVKFNWYVDGVEVHNAKTKPREEQYNSTYRVVSVLTVLHQDWLNGKEYKCKVSNKALPAPIEKTISKAKGQPREPQVYTLPPSRDELTKNQVSLTCLVKGFYPSDIAVEWESNGQPENNYKTTPPVLDSDGSFFLYSKLTVDKSRWQQGNVFSCSVMHEALHNHYTQKSLSLSPGGGGSGSAHPIPDSSPLLQFGGQVRQRYLYTDDACQTEAHLEIREDGTVGGAADQSPESLLQLKALKPGVIQILGVKTSRFLCQRPDGALYGSLHFDPEACSFRELLLEDGYNVYQSEAHGLPLHLCGNKSPHRDPAPRGPARFLPLPGLPPAPPEPPGILAPQPPDVGSSDPLSMVYPSQGRSPSYAS

SEQ ID NO: 1646 - protein, 472 aa, Artificial Sequence
  Fusion Protein
AHGEGTFTSDKSIQLEKEAVRLFIEWLLAGGHPSGKPPPKGGGGGGGSGGGGSGGGGSADKTHTCPPCPAPELLGGPSVFLFPPKPKDTLMISRTPEVTCVVVDVSHEDPEVKFNWYVDGVEVHNAKTKPREEQYNNASRVVSVLTVLHQDWLNGKEYKCKVSNKALPAPIEKTISKAKGQPREPQVYTLPPSRDELTKNQVSLTCLVKGFYPSDIAVEWESNGQPENNYKTTPPVLDSDGSFFLYSKLTVDKSRWQQGNVFSCSVMHEALHNHYTQKSLSLSPGGGGSGSAHPIPDSSPLLQFGGQVRQRYLYTDDACQTEAHLEIREDGTVGGAADQSPESLLQLKALKPGVIQILGVKTSRFLCQRPDGALYGSLHFDPEACSFRELLLEDGYNVYQSEAHGLPLHLPGCKSPHRDPAPRGPARFLPLPGLPPAPPEPPGILAPQPPDVGSSDPLSMVGSQGRSPSYAS

SEQ ID NO: 1647 - protein, 473 aa, Artificial Sequence
  Fusion Protein
AHGEGTFTSDKSIQLEKEAVRLFIEWLLAGGHPSGKPPPKGGGGGGGSGGGGSGGGGSADKTHTCPPCPAPELLGGPSVFLFPPKPKDTLMISRTPEVTCVVVDVSHEDPEVKFNWYVDGVEVHNAKTKPREEQYNNASRVVSVLTVLHQDWLNGKEYKCKVSNKALPAPIEKTISKAKGQPREPQVYTLPPSRDELTKNQVSLTCLVKGFYPSDIAVEWESNGQPENNYKTTPPVLDSDGSFFLYSKLTVDKSRWQQGNVFSCSVMHEALHNHYTQKSLSLSPGGGGSGSAHPIPDSSPLLQFGGQVRQRYLYTDDACQTEAHLEIREDGTVGGAADQSPESLLQLKALKPGVIQILGVKTSRFLCQRPDGALYGSLHFDPEACSFRELLLEDGYNVYQSEAHGLPLHLPGCKSPHRDPAPRGPARFLPLPGLPPAPPEPPGILAPQPPDVGSSDPLSMVYPSQGRSPSYAS

SEQ ID NO: 1648 - protein, 472 aa, Artificial Sequence
  Fusion Protein
AHGEGTFTSDKSIQLEKEAVRLFIEWLLAGGHPSGKPPPKGGGGGGGSGGGGSGGGGSADKTHTCPPCPAPELLGGPSVFLFPPKPKDTLMISRTPEVTCVVVDVSHEDPEVKFNWYVDGVEVHNAKTKPREEQYNNASRVVSVLTVLHQDWLNGKEYKCKVSNKALPAPIEKTISKAKGQPREPQVYTLPPSRDELTKNQVSLTCLVKGFYPSDIAVEWESNGQPENNYKTTPPVLDSDGSFFLYSKLTVDKSRWQQGNVFSCSVMHEALHNHYTQKSLSLSPGGGGSGSAHPIPDSSPLLQFGGQVRQRYLYTDDACQTEAHLEIREDGTVGGAADQSPESLLQLKALKPGVIQILGVKTSRFLCQRPDGALYGSLHFDPEACSFRELLLEDGYNVYQSEAHGLPLHLCGNKSPHRDPAPRGPARFLPLPGLPPAPPEPPGILAPQPPDVGSSDPLSMVGSQGRSPSYAS

SEQ ID NO: 1649 - protein, 473 aa, Artificial Sequence
  Fusion Protein
AHGEGTFTSDKSIQLEKEAVRLFIEWLLAGGHPSGKPPPKGGGGGGGSGGGGSGGGGSADKTHTCPPCPAPELLGGPSVFLFPPKPKDTLMISRTPEVTCVVVDVSHEDPEVKFNWYVDGVEVHNAKTKPREEQYNNASRVVSVLTVLHQDWLNGKEYKCKVSNKALPAPIEKTISKAKGQPREPQVYTLPPSRDELTKNQVSLTCLVKGFYPSDIAVEWESNGQPENNYKTTPPVLDSDGSFFLYSKLTVDKSRWQQGNVFSCSVMHEALHNHYTQKSLSLSPGGGGSGSAHPIPDSSPLLQFGGQVRQRYLYTDDACQTEAHLEIREDGTVGGAADQSPESLLQLKALKPGVIQILGVKTSRFLCQRPDGALYGSLHFDPEACSFRELLLEDGYNVYQSEAHGLPLHLCGNKSPHRDPAPRGPARFLPLPGLPPAPPEPPGILAPQPPDVGSSDPLSMVYPSQGRSPSYAS

SEQ ID NO: 1650 - protein, 475 aa, Artificial Sequence
  Fusion Protein
AHGEGTFTSDKSIQLEKEAVRLFIEWLLAGGHPSGKPPPKGGGGGGGSGGGGSGGGGSAESKYGPPCPPCPAPEFEGGPSVFLFPPKPKDTLMISRTPEVTCVVVDVSQEDPEVQFNWYVDGVEVHNAKTKPREEQFNSTYRVVSVLTVLHQDWLNGKEYKCKVSNKGLPSSIEKTISKAKGQPREPQVYTLPPSQEEMTKNQVSLTCLVKGFYPSDIAVEWESNGQPENNYKTTPPVLDSDGSFFLYSRLTVDKSRWQEGNVFSCSVMHEALHNHYTQKSLSLSLGGGGSGSAHPIPDSSPLLQFGGQVRQRYLYTDDACQTEAHLEIREDGTVGGAADQSPESLLQLKALKPGVIQILGVKTSRFLCQRPDGALYGSLHFDPEACSFRELLLEDGYNVYQSEAHGLPLHLPGCKSPHRDPAPRGPARFLPLPGLPPAPPEPPGILAPQPPDVGSSDPLSMVYPSQGRSPSYAS

SEQ ID NO: 1651 - protein, 474 aa, Artificial Sequence
  Fusion Protein
AHGEGTFTSDKSIQLEKEAVRLFIEWLLAGGHPSGKPPPKGGGGGGGSGGGGSGGGGSAESKYGPPCPPCPAPEFEGGPSVFLFPPKPKDTLMISRTPEVTCVVVDVSQEDPEVQFNWYVDGVEVHNAKTKPREEQFNSTYRVVSVLTVLHQDWLNGKEYKCKVSNKGLPSSIEKTISKAKGQPREPQVYTLPPSQEEMTKNQVSLTCLVKGFYPSDIAVEWESNGQPENNYKTTPPVLDSDGSFFLYSRLTVDKSRWQEGNVFSCSVMHEALHNHYTQKSLSLSLGGGGSGSAHPIPDSSPLLQFGGQVRQRYLYTDDACQTEAHLEIREDGTVGGAADQSPESLLQLKALKPGVIQILGVKTSRFLCQRPDGALYGSLHFDPEACSFRELLLEDGYNVYQSEAHGLPLHLCGNKSPHRDPAPRGPARFLPLPGLPPAPPEPPGILAPQPPDVGSSDPLSMVGSQGRSPSYAS

SEQ ID NO: 1652 - protein, 475 aa, Artificial Sequence
  Fusion Protein
AHGEGTFTSDKSIQLEKEAVRLFIEWLLAGGHPSGKPPPKGGGGGGGSGGGGSGGGGSAESKYGPPCPPCPAPEFEGGPSVFLFPPKPKDTLMISRTPEVTCVVVDVSQEDPEVQFNWYVDGVEVHNAKTKPREEQFNSTYRVVSVLTVLHQDWLNGKEYKCKVSNKGLPSSIEKTISKAKGQPREPQVYTLPPSQEEMTKNQVSLTCLVKGFYPSDIAVEWESNGQPENNYKTTPPVLDSDGSFFLYSRLTVDKSRWQEGNVFSCSVMHEALHNHYTQKSLSLSLGGGGSGSAHPIPDSSPLLQFGGQVRQRYLYTDDACQTEAHLEIREDGTVGGAADQSPESLLQLKALKPGVIQILGVKTSRFLCQRPDGALYGSLHFDPEACSFRELLLEDGYNVYQSEAHGLPLHLCGNKSPHRDPAPRGPARFLPLPGLPPAPPEPPGILAPQPPDVGSSDPLSMVYPSQGRSPSYAS

SEQ ID NO: 1653 - protein, 472 aa, Artificial Sequence
  Fusion Protein
AHGEGTFTSDLSILLDEEAVQEFIEWLLATGPVSGAPPPSGGGGGGGSGGGGSGGGGSADKTHTCPPCPAPEAAGGPSVFLFPPKPKDTLMISRTPEVTCVVVDVSHEDPEVKFNWYVDGVEVHNAKTKPREEQYNSTYRVVSVLTVLHQDWLNGKEYKCKVSNKALPAPIEKTISKAKGQPREPQVYTLPPSRDELTKNQVSLTCLVKGFYPSDIAVEWESNGQPENNYKTTPPVLDSDGSFFLYSKLTVDKSRWQQGNVFSCSVMHEALHNHYTQKSLSLSPGGGGSGSAHPIPDSSPLLQFGGQVRQRYLYTDDACQTEAHLEIREDGTVGGAADQSPESLLQLKALKPGVIQILGVKTSRFLCQRPDGALYGSLHFDPEACSFRELLLEDGYNVYQSEAHGLPLHLPGCKSPHRDPAPRGPARFLPLPGLPPAPPEPPGILAPQPPDVGSSDPLSMVGSQGRSPSYAS

SEQ ID NO: 1654 - protein, 473 aa, Artificial Sequence
  Fusion Protein
AHGEGTFTSDLSILLDEEAVQEFIEWLLATGPVSGAPPPSGGGGGGGSGGGGSGGGGSADKTHTCPPCPAPEAAGGPSVFLFPPKPKDTLMISRTPEVTCVVVDVSHEDPEVKFNWYVDGVEVHNAKTKPREEQYNSTYRVVSVLTVLHQDWLNGKEYKCKVSNKALPAPIEKTISKAKGQPREPQVYTLPPSRDELTKNQVSLTCLVKGFYPSDIAVEWESNGQPENNYKTTPPVLDSDGSFFLYSKLTVDKSRWQQGNVFSCSVMHEALHNHYTQKSLSLSPGGGGSGSAHPIPDSSPLLQFGGQVRQRYLYTDDACQTEAHLEIREDGTVGGAADQSPESLLQLKALKPGVIQILGVKTSRFLCQRPDGALYGSLHFDPEACSFRELLLEDGYNVYQSEAHGLPLHLPGCKSPHRDPAPRGPARFLPLPGLPPAPPEPPGILAPQPPDVGSSDPLSMVYPSQGRSPSYAS

SEQ ID NO: 1655 - protein, 472 aa, Artificial Sequence
  Fusion Protein
AHGEGTFTSDLSILLDEEAVQEFIEWLLATGPVSGAPPPSGGGGGGGSGGGGSGGGGSADKTHTCPPCPAPEAAGGPSVFLFPPKPKDTLMISRTPEVTCVVVDVSHEDPEVKFNWYVDGVEVHNAKTKPREEQYNSTYRVVSVLTVLHQDWLNGKEYKCKVSNKALPAPIEKTISKAKGQPREPQVYTLPPSRDELTKNQVSLTCLVKGFYPSDIAVEWESNGQPENNYKTTPPVLDSDGSFFLYSKLTVDKSRWQQGNVFSCSVMHEALHNHYTQKSLSLSPGGGGSGSAHPIPDSSPLLQFGGQVRQRYLYTDDACQTEAHLEIREDGTVGGAADQSPESLLQLKALKPGVIQILGVKTSRFLCQRPDGALYGSLHFDPEACSFRELLLEDGYNVYQSEAHGLPLHLCGNKSPHRDPAPRGPARFLPLPGLPPAPPEPPGILAPQPPDVGSSDPLSMVGSQGRSPSYAS

SEQ ID NO: 1656 - protein, 473 aa, Artificial Sequence
  Fusion Protein
AHGEGTFTSDLSILLDEEAVQEFIEWLLATGPVSGAPPPSGGGGGGGSGGGGSGGGGSADKTHTCPPCPAPEAAGGPSVFLFPPKPKDTLMISRTPEVTCVVVDVSHEDPEVKFNWYVDGVEVHNAKTKPREEQYNSTYRVVSVLTVLHQDWLNGKEYKCKVSNKALPAPIEKTISKAKGQPREPQVYTLPPSRDELTKNQVSLTCLVKGFYPSDIAVEWESNGQPENNYKTTPPVLDSDGSFFLYSKLTVDKSRWQQGNVFSCSVMHEALHNHYTQKSLSLSPGGGGSGSAHPIPDSSPLLQFGGQVRQRYLYTDDACQTEAHLEIREDGTVGGAADQSPESLLQLKALKPGVIQILGVKTSRFLCQRPDGALYGSLHFDPEACSFRELLLEDGYNVYQSEAHGLPLHLCGNKSPHRDPAPRGPARFLPLPGLPPAPPEPPGILAPQPPDVGSSDPLSMVYPSQGRSPSYAS

SEQ ID NO: 1657 - protein, 472 aa, Artificial Sequence
  Fusion Protein
AHGEGTFTSDLSILLDEEAVQEFIEWLLATGPVSGAPPPSGGGGGGGSGGGGSGGGGSADKTHTCPPCPAPELLGGPSVFLFPPKPKDTLMISRTPEVTCVVVDVSHEDPEVKFNWYVDGVEVHNAKTKPREEQYNNASRVVSVLTVLHQDWLNGKEYKCKVSNKALPAPIEKTISKAKGQPREPQVYTLPPSRDELTKNQVSLTCLVKGFYPSDIAVEWESNGQPENNYKTTPPVLDSDGSFFLYSKLTVDKSRWQQGNVFSCSVMHEALHNHYTQKSLSLSPGGGGSGSAHPIPDSSPLLQFGGQVRQRYLYTDDACQTEAHLEIREDGTVGGAADQSPESLLQLKALKPGVIQILGVKTSRFLCQRPDGALYGSLHFDPEACSFRELLLEDGYNVYQSEAHGLPLHLPGCKSPHRDPAPRGPARFLPLPGLPPAPPEPPGILAPQPPDVGSSDPLSMVGSQGRSPSYAS

SEQ ID NO: 1658 - protein, 473 aa, Artificial Sequence
  Fusion Protein
AHGEGTFTSDLSILLDEEAVQEFIEWLLATGPVSGAPPPSGGGGGGGSGGGGSGGGGSADKTHTCPPCPAPELLGGPSVFLFPPKPKDTLMISRTPEVTCVVVDVSHEDPEVKFNWYVDGVEVHNAKTKPREEQYNNASRVVSVLTVLHQDWLNGKEYKCKVSNKALPAPIEKTISKAKGQPREPQVYTLPPSRDELTKNQVSLTCLVKGFYPSDIAVEWESNGQPENNYKTTPPVLDSDGSFFLYSKLTVDKSRWQQGNVFSCSVMHEALHNHYTQKSLSLSPGGGGSGSAHPIPDSSPLLQFGGQVRQRYLYTDDACQTEAHLEIREDGTVGGAADQSPESLLQLKALKPGVIQILGVKTSRFLCQRPDGALYGSLHFDPEACSFRELLLEDGYNVYQSEAHGLPLHLPGCKSPHRDPAPRGPARFLPLPGLPPAPPEPPGILAPQPPDVGSSDPLSMVYPSQGRSPSYAS

SEQ ID NO: 1659 - protein, 472 aa, Artificial Sequence
  Fusion Protein
AHGEGTFTSDLSILLDEEAVQEFIEWLLATGPVSGAPPPSGGGGGGGSGGGGSGGGGSADKTHTCPPCPAPELLGGPSVFLFPPKPKDTLMISRTPEVTCVVVDVSHEDPEVKFNWYVDGVEVHNAKTKPREEQYNNASRVVSVLTVLHQDWLNGKEYKCKVSNKALPAPIEKTISKAKGQPREPQVYTLPPSRDELTKNQVSLTCLVKGFYPSDIAVEWESNGQPENNYKTTPPVLDSDGSFFLYSKLTVDKSRWQQGNVFSCSVMHEALHNHYTQKSLSLSPGGGGSGSAHPIPDSSPLLQFGGQVRQRYLYTDDACQTEAHLEIREDGTVGGAADQSPESLLQLKALKPGVIQILGVKTSRFLCQRPDGALYGSLHFDPEACSFRELLLEDGYNVYQSEAHGLPLHLCGNKSPHRDPAPRGPARFLPLPGLPPAPPEPPGILAPQPPDVGSSDPLSMVGSQGRSPSYAS

SEQ ID NO: 1660 - protein, 473 aa, Artificial Sequence
  Fusion Protein
AHGEGTFTSDLSILLDEEAVQEFIEWLLATGPVSGAPPPSGGGGGGGSGGGGSGGGGSADKTHTCPPCPAPELLGGPSVFLFPPKPKDTLMISRTPEVTCVVVDVSHEDPEVKFNWYVDGVEVHNAKTKPREEQYNNASRVVSVLTVLHQDWLNGKEYKCKVSNKALPAPIEKTISKAKGQPREPQVYTLPPSRDELTKNQVSLTCLVKGFYPSDIAVEWESNGQPENNYKTTPPVLDSDGSFFLYSKLTVDKSRWQQGNVFSCSVMHEALHNHYTQKSLSLSPGGGGSGSAHPIPDSSPLLQFGGQVRQRYLYTDDACQTEAHLEIREDGTVGGAADQSPESLLQLKALKPGVIQILGVKTSRFLCQRPDGALYGSLHFDPEACSFRELLLEDGYNVYQSEAHGLPLHLCGNKSPHRDPAPRGPARFLPLPGLPPAPPEPPGILAPQPPDVGSSDPLSMVYPSQGRSPSYAS

SEQ ID NO: 1661 - protein, 474 aa, Artificial Sequence
  Fusion Protein
AHGEGTFTSDLSILLDEEAVQEFIEWLLATGPVSGAPPPSGGGGGGGSGGGGSGGGGSAESKYGPPCPPCPAPEFEGGPSVFLFPPKPKDTLMISRTPEVTCVVVDVSQEDPEVQFNWYVDGVEVHNAKTKPREEQFNSTYRVVSVLTVLHQDWLNGKEYKCKVSNKGLPSSIEKTISKAKGQPREPQVYTLPPSQEEMTKNQVSLTCLVKGFYPSDIAVEWESNGQPENNYKTTPPVLDSDGSFFLYSRLTVDKSRWQEGNVFSCSVMHEALHNHYTQKSLSLSLGGGGSGSAHPIPDSSPLLQFGGQVRQRYLYTDDACQTEAHLEIREDGTVGGAADQSPESLLQLKALKPGVIQILGVKTSRFLCQRPDGALYGSLHFDPEACSFRELLLEDGYNVYQSEAHGLPLHLPGCKSPHRDPAPRGPARFLPLPGLPPAPPEPPGILAPQPPDVGSSDPLSMVGSQGRSPSYAS

SEQ ID NO: 1662 - protein, 475 aa, Artificial Sequence
  Fusion Protein
AHGEGTFTSDLSILLDEEAVQEFIEWLLATGPVSGAPPPSGGGGGGGSGGGGSGGGGSAESKYGPPCPPCPAPEFEGGPSVFLFPPKPKDTLMISRTPEVTCVVVDVSQEDPEVQFNWYVDGVEVHNAKTKPREEQFNSTYRVVSVLTVLHQDWLNGKEYKCKVSNKGLPSSIEKTISKAKGQPREPQVYTLPPSQEEMTKNQVSLTCLVKGFYPSDIAVEWESNGQPENNYKTTPPVLDSDGSFFLYSRLTVDKSRWQEGNVFSCSVMHEALHNHYTQKSLSLSLGGGGSGSAHPIPDSSPLLQFGGQVRQRYLYTDDACQTEAHLEIREDGTVGGAADQSPESLLQLKALKPGVIQILGVKTSRFLCQRPDGALYGSLHFDPEACSFRELLLEDGYNVYQSEAHGLPLHLPGCKSPHRDPAPRGPARFLPLPGLPPAPPEPPGILAPQPPDVGSSDPLSMVYPSQGRSPSYAS

SEQ ID NO: 1663 - protein, 474 aa, Artificial Sequence
  Fusion Protein
AHGEGTFTSDLSILLDEEAVQEFIEWLLATGPVSGAPPPSGGGGGGGSGGGGSGGGGSAESKYGPPCPPCPAPEFEGGPSVFLFPPKPKDTLMISRTPEVTCVVVDVSQEDPEVQFNWYVDGVEVHNAKTKPREEQFNSTYRVVSVLTVLHQDWLNGKEYKCKVSNKGLPSSIEKTISKAKGQPREPQVYTLPPSQEEMTKNQVSLTCLVKGFYPSDIAVEWESNGQPENNYKTTPPVLDSDGSFFLYSRLTVDKSRWQEGNVFSCSVMHEALHNHYTQKSLSLSLGGGGSGSAHPIPDSSPLLQFGGQVRQRYLYTDDACQTEAHLEIREDGTVGGAADQSPESLLQLKALKPGVIQILGVKTSRFLCQRPDGALYGSLHFDPEACSFRELLLEDGYNVYQSEAHGLPLHLCGNKSPHRDPAPRGPARFLPLPGLPPAPPEPPGILAPQPPDVGSSDPLSMVGSQGRSPSYAS

SEQ ID NO: 1664 - protein, 475 aa, Artificial Sequence
  Fusion Protein
AHGEGTFTSDLSILLDEEAVQEFIEWLLATGPVSGAPPPSGGGGGGGSGGGGSGGGGSAESKYGPPCPPCPAPEFEGGPSVFLFPPKPKDTLMISRTPEVTCVVVDVSQEDPEVQFNWYVDGVEVHNAKTKPREEQFNSTYRVVSVLTVLHQDWLNGKEYKCKVSNKGLPSSIEKTISKAKGQPREPQVYTLPPSQEEMTKNQVSLTCLVKGFYPSDIAVEWESNGQPENNYKTTPPVLDSDGSFFLYSRLTVDKSRWQEGNVFSCSVMHEALHNHYTQKSLSLSLGGGGSGSAHPIPDSSPLLQFGGQVRQRYLYTDDACQTEAHLEIREDGTVGGAADQSPESLLQLKALKPGVIQILGVKTSRFLCQRPDGALYGSLHFDPEACSFRELLLEDGYNVYQSEAHGLPLHLCGNKSPHRDPAPRGPARFLPLPGLPPAPPEPPGILAPQPPDVGSSDPLSMVYPSQGRSPSYAS

SEQ ID NO: 1665 - protein, 472 aa, Artificial Sequence
  Fusion Protein
AHGEGTFTSDLSILLDEEAVQLFIEWLLATGPSSGAPPPSGGGGGGGSGGGGSGGGGSADKTHTCPPCPAPEAAGGPSVFLFPPKPKDTLMISRTPEVTCVVVDVSHEDPEVKFNWYVDGVEVHNAKTKPREEQYNSTYRVVSVLTVLHQDWLNGKEYKCKVSNKALPAPIEKTISKAKGQPREPQVYTLPPSRDELTKNQVSLTCLVKGFYPSDIAVEWESNGQPENNYKTTPPVLDSDGSFFLYSKLTVDKSRWQQGNVFSCSVMHEALHNHYTQKSLSLSPGGGGSGSAHPIPDSSPLLQFGGQVRQRYLYTDDACQTEAHLEIREDGTVGGAADQSPESLLQLKALKPGVIQILGVKTSRFLCQRPDGALYGSLHFDPEACSFRELLLEDGYNVYQSEAHGLPLHLPGCKSPHRDPAPRGPARFLPLPGLPPAPPEPPGILAPQPPDVGSSDPLSMVGSQGRSPSYAS

SEQ ID NO: 1666 - protein, 473 aa, Artificial Sequence
  Fusion Protein
AHGEGTFTSDLSILLDEEAVQLFIEWLLATGPSSGAPPPSGGGGGGGSGGGGSGGGGSADKTHTCPPCPAPEAAGGPSVFLFPPKPKDTLMISRTPEVTCVVVDVSHEDPEVKFNWYVDGVEVHNAKTKPREEQYNSTYRVVSVLTVLHQDWLNGKEYKCKVSNKALPAPIEKTISKAKGQPREPQVYTLPPSRDELTKNQVSLTCLVKGFYPSDIAVEWESNGQPENNYKTTPPVLDSDGSFFLYSKLTVDKSRWQQGNVFSCSVMHEALHNHYTQKSLSLSPGGGGSGSAHPIPDSSPLLQFGGQVRQRYLYTDDACQTEAHLEIREDGTVGGAADQSPESLLQLKALKPGVIQILGVKTSRFLCQRPDGALYGSLHFDPEACSFRELLLEDGYNVYQSEAHGLPLHLPGCKSPHRDPAPRGPARFLPLPGLPPAPPEPPGILAPQPPDVGSSDPLSMVYPSQGRSPSYAS

SEQ ID NO: 1667 - protein, 472 aa, Artificial Sequence
  Fusion Protein
AHGEGTFTSDLSILLDEEAVQLFIEWLLATGPSSGAPPPSGGGGGGGSGGGGSGGGGSADKTHTCPPCPAPEAAGGPSVFLFPPKPKDTLMISRTPEVTCVVVDVSHEDPEVKFNWYVDGVEVHNAKTKPREEQYNSTYRVVSVLTVLHQDWLNGKEYKCKVSNKALPAPIEKTISKAKGQPREPQVYTLPPSRDELTKNQVSLTCLVKGFYPSDIAVEWESNGQPENNYKTTPPVLDSDGSFFLYSKLTVDKSRWQQGNVFSCSVMHEALHNHYTQKSLSLSPGGGGSGSAHPIPDSSPLLQFGGQVRQRYLYTDDACQTEAHLEIREDGTVGGAADQSPESLLQLKALKPGVIQILGVKTSRFLCQRPDGALYGSLHFDPEACSFRELLLEDGYNVYQSEAHGLPLHLCGNKSPHRDPAPRGPARFLPLPGLPPAPPEPPGILAPQPPDVGSSDPLSMVGSQGRSPSYAS

SEQ ID NO: 1668 - protein, 473 aa, Artificial Sequence
  Fusion Protein
AHGEGTFTSDLSILLDEEAVQLFIEWLLATGPSSGAPPPSGGGGGGGSGGGGSGGGGSADKTHTCPPCPAPEAAGGPSVFLFPPKPKDTLMISRTPEVTCVVVDVSHEDPEVKFNWYVDGVEVHNAKTKPREEQYNSTYRVVSVLTVLHQDWLNGKEYKCKVSNKALPAPIEKTISKAKGQPREPQVYTLPPSRDELTKNQVSLTCLVKGFYPSDIAVEWESNGQPENNYKTTPPVLDSDGSFFLYSKLTVDKSRWQQGNVFSCSVMHEALHNHYTQKSLSLSPGGGGSGSAHPIPDSSPLLQFGGQVRQRYLYTDDACQTEAHLEIREDGTVGGAADQSPESLLQLKALKPGVIQILGVKTSRFLCQRPDGALYGSLHFDPEACSFRELLLEDGYNVYQSEAHGLPLHLCGNKSPHRDPAPRGPARFLPLPGLPPAPPEPPGILAPQPPDVGSSDPLSMVYPSQGRSPSYAS

SEQ ID NO: 1669 - protein, 472 aa, Artificial Sequence
  Fusion Protein
AHGEGTFTSDLSILLDEEAVQLFIEWLLATGPSSGAPPPSGGGGGGGSGGGGSGGGGSADKTHTCPPCPAPELLGGPSVFLFPPKPKDTLMISRTPEVTCVVVDVSHEDPEVKFNWYVDGVEVHNAKTKPREEQYNNASRVVSVLTVLHQDWLNGKEYKCKVSNKALPAPIEKTISKAKGQPREPQVYTLPPSRDELTKNQVSLTCLVKGFYPSDIAVEWESNGQPENNYKTTPPVLDSDGSFFLYSKLTVDKSRWQQGNVFSCSVMHEALHNHYTQKSLSLSPGGGGSGSAHPIPDSSPLLQFGGQVRQRYLYTDDACQTEAHLEIREDGTVGGAADQSPESLLQLKALKPGVIQILGVKTSRFLCQRPDGALYGSLHFDPEACSFRELLLEDGYNVYQSEAHGLPLHLPGCKSPHRDPAPRGPARFLPLPGLPPAPPEPPGILAPQPPDVGSSDPLSMVGSQGRSPSYAS

SEQ ID NO: 1670 - protein, 473 aa, Artificial Sequence
  Fusion Protein
AHGEGTFTSDLSILLDEEAVQLFIEWLLATGPSSGAPPPSGGGGGGGSGGGGSGGGGSADKTHTCPPCPAPELLGGPSVFLFPPKPKDTLMISRTPEVTCVVVDVSHEDPEVKFNWYVDGVEVHNAKTKPREEQYNNASRVVSVLTVLHQDWLNGKEYKCKVSNKALPAPIEKTISKAKGQPREPQVYTLPPSRDELTKNQVSLTCLVKGFYPSDIAVEWESNGQPENNYKTTPPVLDSDGSFFLYSKLTVDKSRWQQGNVFSCSVMHEALHNHYTQKSLSLSPGGGGSGSAHPIPDSSPLLQFGGQVRQRYLYTDDACQTEAHLEIREDGTVGGAADQSPESLLQLKALKPGVIQILGVKTSRFLCQRPDGALYGSLHFDPEACSFRELLLEDGYNVYQSEAHGLPLHLPGCKSPHRDPAPRGPARFLPLPGLPPAPPEPPGILAPQPPDVGSSDPLSMVYPSQGRSPSYAS

SEQ ID NO: 1671 - protein, 472 aa, Artificial Sequence
  Fusion Protein
AHGEGTFTSDLSILLDEEAVQLFIEWLLATGPSSGAPPPSGGGGGGGSGGGGSGGGGSADKTHTCPPCPAPELLGGPSVFLFPPKPKDTLMISRTPEVTCVVVDVSHEDPEVKFNWYVDGVEVHNAKTKPREEQYNNASRVVSVLTVLHQDWLNGKEYKCKVSNKALPAPIEKTISKAKGQPREPQVYTLPPSRDELTKNQVSLTCLVKGFYPSDIAVEWESNGQPENNYKTTPPVLDSDGSFFLYSKLTVDKSRWQQGNVFSCSVMHEALHNHYTQKSLSLSPGGGGSGSAHPIPDSSPLLQFGGQVRQRYLYTDDACQTEAHLEIREDGTVGGAADQSPESLLQLKALKPGVIQILGVKTSRFLCQRPDGALYGSLHFDPEACSFRELLLEDGYNVYQSEAHGLPLHLCGNKSPHRDPAPRGPARFLPLPGLPPAPPEPPGILAPQPPDVGSSDPLSMVGSQGRSPSYAS

SEQ ID NO: 1672 - protein, 473 aa, Artificial Sequence
  Fusion Protein
AHGEGTFTSDLSILLDEEAVQLFIEWLLATGPSSGAPPPSGGGGGGGSGGGGSGGGGSADKTHTCPPCPAPELLGGPSVFLFPPKPKDTLMISRTPEVTCVVVDVSHEDPEVKFNWYVDGVEVHNAKTKPREEQYNNASRVVSVLTVLHQDWLNGKEYKCKVSNKALPAPIEKTISKAKGQPREPQVYTLPPSRDELTKNQVSLTCLVKGFYPSDIAVEWESNGQPENNYKTTPPVLDSDGSFFLYSKLTVDKSRWQQGNVFSCSVMHEALHNHYTQKSLSLSPGGGGSGSAHPIPDSSPLLQFGGQVRQRYLYTDDACQTEAHLEIREDGTVGGAADQSPESLLQLKALKPGVIQILGVKTSRFLCQRPDGALYGSLHFDPEACSFRELLLEDGYNVYQSEAHGLPLHLCGNKSPHRDPAPRGPARFLPLPGLPPAPPEPPGILAPQPPDVGSSDPLSMVYPSQGRSPSYAS

SEQ ID NO: 1673 - protein, 474 aa, Artificial Sequence
  Fusion Protein
AHGEGTFTSDLSILLDEEAVQLFIEWLLATGPSSGAPPPSGGGGGGGSGGGGSGGGGSAESKYGPPCPPCPAPEFEGGPSVFLFPPKPKDTLMISRTPEVTCVVVDVSQEDPEVQFNWYVDGVEVHNAKTKPREEQFNSTYRVVSVLTVLHQDWLNGKEYKCKVSNKGLPSSIEKTISKAKGQPREPQVYTLPPSQEEMTKNQVSLTCLVKGFYPSDIAVEWESNGQPENNYKTTPPVLDSDGSFFLYSRLTVDKSRWQEGNVFSCSVMHEALHNHYTQKSLSLSLGGGGSGSAHPIPDSSPLLQFGGQVRQRYLYTDDACQTEAHLEIREDGTVGGAADQSPESLLQLKALKPGVIQILGVKTSRFLCQRPDGALYGSLHFDPEACSFRELLLEDGYNVYQSEAHGLPLHLPGCKSPHRDPAPRGPARFLPLPGLPPAPPEPPGILAPQPPDVGSSDPLSMVGSQGRSPSYAS

SEQ ID NO: 1674 - protein, 475 aa, Artificial Sequence
  Fusion Protein
AHGEGTFTSDLSILLDEEAVQLFIEWLLATGPSSGAPPPSGGGGGGGSGGGGSGGGGSAESKYGPPCPPCPAPEFEGGPSVFLFPPKPKDTLMISRTPEVTCVVVDVSQEDPEVQFNWYVDGVEVHNAKTKPREEQFNSTYRVVSVLTVLHQDWLNGKEYKCKVSNKGLPSSIEKTISKAKGQPREPQVYTLPPSQEEMTKNQVSLTCLVKGFYPSDIAVEWESNGQPENNYKTTPPVLDSDGSFFLYSRLTVDKSRWQEGNVFSCSVMHEALHNHYTQKSLSLSLGGGGSGSAHPIPDSSPLLQFGGQVRQRYLYTDDACQTEAHLEIREDGTVGGAADQSPESLLQLKALKPGVIQILGVKTSRFLCQRPDGALYGSLHFDPEACSFRELLLEDGYNVYQSEAHGLPLHLPGCKSPHRDPAPRGPARFLPLPGLPPAPPEPPGILAPQPPDVGSSDPLSMVYPSQGRSPSYAS

SEQ ID NO: 1675 - protein, 474 aa, Artificial Sequence
  Fusion Protein
AHGEGTFTSDLSILLDEEAVQLFIEWLLATGPSSGAPPPSGGGGGGGSGGGGSGGGGSAESKYGPPCPPCPAPEFEGGPSVFLFPPKPKDTLMISRTPEVTCVVVDVSQEDPEVQFNWYVDGVEVHNAKTKPREEQFNSTYRVVSVLTVLHQDWLNGKEYKCKVSNKGLPSSIEKTISKAKGQPREPQVYTLPPSQEEMTKNQVSLTCLVKGFYPSDIAVEWESNGQPENNYKTTPPVLDSDGSFFLYSRLTVDKSRWQEGNVFSCSVMHEALHNHYTQKSLSLSLGGGGSGSAHPIPDSSPLLQFGGQVRQRYLYTDDACQTEAHLEIREDGTVGGAADQSPESLLQLKALKPGVIQILGVKTSRFLCQRPDGALYGSLHFDPEACSFRELLLEDGYNVYQSEAHGLPLHLCGNKSPHRDPAPRGPARFLPLPGLPPAPPEPPGILAPQPPDVGSSDPLSMVGSQGRSPSYAS

SEQ ID NO: 1676 - protein, 475 aa, Artificial Sequence
  Fusion Protein
AHGEGTFTSDLSILLDEEAVQLFIEWLLATGPSSGAPPPSGGGGGGGSGGGGSGGGGSAESKYGPPCPPCPAPEFEGGPSVFLFPPKPKDTLMISRTPEVTCVVVDVSQEDPEVQFNWYVDGVEVHNAKTKPREEQFNSTYRVVSVLTVLHQDWLNGKEYKCKVSNKGLPSSIEKTISKAKGQPREPQVYTLPPSQEEMTKNQVSLTCLVKGFYPSDIAVEWESNGQPENNYKTTPPVLDSDGSFFLYSRLTVDKSRWQEGNVFSCSVMHEALHNHYTQKSLSLSLGGGGSGSAHPIPDSSPLLQFGGQVRQRYLYTDDACQTEAHLEIREDGTVGGAADQSPESLLQLKALKPGVIQILGVKTSRFLCQRPDGALYGSLHFDPEACSFRELLLEDGYNVYQSEAHGLPLHLCGNKSPHRDPAPRGPARFLPLPGLPPAPPEPPGILAPQPPDVGSSDPLSMVYPSQGRSPSYAS

SEQ ID NO: 1677 - protein, 472 aa, Artificial Sequence
  Fusion Protein
AHGEGTFTSDLSILLDEEAVQLFIEWLLATGPVSGAPPPSGGGGGGGSGGGGSGGGGSADKTHTCPPCPAPEAAGGPSVFLFPPKPKDTLMISRTPEVTCVVVDVSHEDPEVKFNWYVDGVEVHNAKTKPREEQYNSTYRVVSVLTVLHQDWLNGKEYKCKVSNKALPAPIEKTISKAKGQPREPQVYTLPPSRDELTKNQVSLTCLVKGFYPSDIAVEWESNGQPENNYKTTPPVLDSDGSFFLYSKLTVDKSRWQQGNVFSCSVMHEALHNHYTQKSLSLSPGGGGSGSAHPIPDSSPLLQFGGQVRQRYLYTDDACQTEAHLEIREDGTVGGAADQSPESLLQLKALKPGVIQILGVKTSRFLCQRPDGALYGSLHFDPEACSFRELLLEDGYNVYQSEAHGLPLHLPGCKSPHRDPAPRGPARFLPLPGLPPAPPEPPGILAPQPPDVGSSDPLSMVGSQGRSPSYAS

SEQ ID NO: 1678 - protein, 473 aa, Artificial Sequence
  Fusion Protein
AHGEGTFTSDLSILLDEEAVQLFIEWLLATGPVSGAPPPSGGGGGGGSGGGGSGGGGSADKTHTCPPCPAPEAAGGPSVFLFPPKPKDTLMISRTPEVTCVVVDVSHEDPEVKFNWYVDGVEVHNAKTKPREEQYNSTYRVVSVLTVLHQDWLNGKEYKCKVSNKALPAPIEKTISKAKGQPREPQVYTLPPSRDELTKNQVSLTCLVKGFYPSDIAVEWESNGQPENNYKTTPPVLDSDGSFFLYSKLTVDKSRWQQGNVFSCSVMHEALHNHYTQKSLSLSPGGGGSGSAHPIPDSSPLLQFGGQVRQRYLYTDDACQTEAHLEIREDGTVGGAADQSPESLLQLKALKPGVIQILGVKTSRFLCQRPDGALYGSLHFDPEACSFRELLLEDGYNVYQSEAHGLPLHLPGCKSPHRDPAPRGPARFLPLPGLPPAPPEPPGILAPQPPDVGSSDPLSMVYPSQGRSPSYAS

SEQ ID NO: 1679 - protein, 472 aa, Artificial Sequence
  Fusion Protein
AHGEGTFTSDLSILLDEEAVQLFIEWLLATGPVSGAPPPSGGGGGGGSGGGGSGGGGSADKTHTCPPCPAPEAAGGPSVFLFPPKPKDTLMISRTPEVTCVVVDVSHEDPEVKFNWYVDGVEVHNAKTKPREEQYNSTYRVVSVLTVLHQDWLNGKEYKCKVSNKALPAPIEKTISKAKGQPREPQVYTLPPSRDELTKNQVSLTCLVKGFYPSDIAVEWESNGQPENNYKTTPPVLDSDGSFFLYSKLTVDKSRWQQGNVFSCSVMHEALHNHYTQKSLSLSPGGGGSGSAHPIPDSSPLLQFGGQVRQRYLYTDDACQTEAHLEIREDGTVGGAADQSPESLLQLKALKPGVIQILGVKTSRFLCQRPDGALYGSLHFDPEACSFRELLLEDGYNVYQSEAHGLPLHLCGNKSPHRDPAPRGPARFLPLPGLPPAPPEPPGILAPQPPDVGSSDPLSMVGSQGRSPSYAS

SEQ ID NO: 1680 - protein, 473 aa, Artificial Sequence
  Fusion Protein
AHGEGTFTSDLSILLDEEAVQLFIEWLLATGPVSGAPPPSGGGGGGGSGGGGSGGGGSADKTHTCPPCPAPEAAGGPSVFLFPPKPKDTLMISRTPEVTCVVVDVSHEDPEVKFNWYVDGVEVHNAKTKPREEQYNSTYRVVSVLTVLHQDWLNGKEYKCKVSNKALPAPIEKTISKAKGQPREPQVYTLPPSRDELTKNQVSLTCLVKGFYPSDIAVEWESNGQPENNYKTTPPVLDSDGSFFLYSKLTVDKSRWQQGNVFSCSVMHEALHNHYTQKSLSLSPGGGGSGSAHPIPDSSPLLQFGGQVRQRYLYTDDACQTEAHLEIREDGTVGGAADQSPESLLQLKALKPGVIQILGVKTSRFLCQRPDGALYGSLHFDPEACSFRELLLEDGYNVYQSEAHGLPLHLCGNKSPHRDPAPRGPARFLPLPGLPPAPPEPPGILAPQPPDVGSSDPLSMVYPSQGRSPSYAS

SEQ ID NO: 1681 - protein, 472 aa, Artificial Sequence
  Fusion Protein
AHGEGTFTSDLSILLDEEAVQLFIEWLLATGPVSGAPPPSGGGGGGGSGGGGSGGGGSADKTHTCPPCPAPELLGGPSVFLFPPKPKDTLMISRTPEVTCVVVDVSHEDPEVKFNWYVDGVEVHNAKTKPREEQYNNASRVVSVLTVLHQDWLNGKEYKCKVSNKALPAPIEKTISKAKGQPREPQVYTLPPSRDELTKNQVSLTCLVKGFYPSDIAVEWESNGQPENNYKTTPPVLDSDGSFFLYSKLTVDKSRWQQGNVFSCSVMHEALHNHYTQKSLSLSPGGGGSGSAHPIPDSSPLLQFGGQVRQRYLYTDDACQTEAHLEIREDGTVGGAADQSPESLLQLKALKPGVIQILGVKTSRFLCQRPDGALYGSLHFDPEACSFRELLLEDGYNVYQSEAHGLPLHLPGCKSPHRDPAPRGPARFLPLPGLPPAPPEPPGILAPQPPDVGSSDPLSMVGSQGRSPSYAS

SEQ ID NO: 1682 - protein, 473 aa, Artificial Sequence
  Fusion Protein
AHGEGTFTSDLSILLDEEAVQLFIEWLLATGPVSGAPPPSGGGGGGGSGGGGSGGGGSADKTHTCPPCPAPELLGGPSVFLFPPKPKDTLMISRTPEVTCVVVDVSHEDPEVKFNWYVDGVEVHNAKTKPREEQYNNASRVVSVLTVLHQDWLNGKEYKCKVSNKALPAPIEKTISKAKGQPREPQVYTLPPSRDELTKNQVSLTCLVKGFYPSDIAVEWESNGQPENNYKTTPPVLDSDGSFFLYSKLTVDKSRWQQGNVFSCSVMHEALHNHYTQKSLSLSPGGGGSGSAHPIPDSSPLLQFGGQVRQRYLYTDDACQTEAHLEIREDGTVGGAADQSPESLLQLKALKPGVIQILGVKTSRFLCQRPDGALYGSLHFDPEACSFRELLLEDGYNVYQSEAHGLPLHLPGCKSPHRDPAPRGPARFLPLPGLPPAPPEPPGILAPQPPDVGSSDPLSMVYPSQGRSPSYAS

SEQ ID NO: 1683 - protein, 472 aa, Artificial Sequence
  Fusion Protein
AHGEGTFTSDLSILLDEEAVQLFIEWLLATGPVSGAPPPSGGGGGGGSGGGGSGGGGSADKTHTCPPCPAPELLGGPSVFLFPPKPKDTLMISRTPEVTCVVVDVSHEDPEVKFNWYVDGVEVHNAKTKPREEQYNNASRVVSVLTVLHQDWLNGKEYKCKVSNKALPAPIEKTISKAKGQPREPQVYTLPPSRDELTKNQVSLTCLVKGFYPSDIAVEWESNGQPENNYKTTPPVLDSDGSFFLYSKLTVDKSRWQQGNVFSCSVMHEALHNHYTQKSLSLSPGGGGSGSAHPIPDSSPLLQFGGQVRQRYLYTDDACQTEAHLEIREDGTVGGAADQSPESLLQLKALKPGVIQILGVKTSRFLCQRPDGALYGSLHFDPEACSFRELLLEDGYNVYQSEAHGLPLHLCGNKSPHRDPAPRGPARFLPLPGLPPAPPEPPGILAPQPPDVGSSDPLSMVGSQGRSPSYAS

SEQ ID NO: 1684 - protein, 473 aa, Artificial Sequence
  Fusion Protein
AHGEGTFTSDLSILLDEEAVQLFIEWLLATGPVSGAPPPSGGGGGGGSGGGGSGGGGSADKTHTCPPCPAPELLGGPSVFLFPPKPKDTLMISRTPEVTCVVVDVSHEDPEVKFNWYVDGVEVHNAKTKPREEQYNNASRVVSVLTVLHQDWLNGKEYKCKVSNKALPAPIEKTISKAKGQPREPQVYTLPPSRDELTKNQVSLTCLVKGFYPSDIAVEWESNGQPENNYKTTPPVLDSDGSFFLYSKLTVDKSRWQQGNVFSCSVMHEALHNHYTQKSLSLSPGGGGSGSAHPIPDSSPLLQFGGQVRQRYLYTDDACQTEAHLEIREDGTVGGAADQSPESLLQLKALKPGVIQILGVKTSRFLCQRPDGALYGSLHFDPEACSFRELLLEDGYNVYQSEAHGLPLHLCGNKSPHRDPAPRGPARFLPLPGLPPAPPEPPGILAPQPPDVGSSDPLSMVYPSQGRSPSYAS

SEQ ID NO: 1685 - protein, 474 aa, Artificial Sequence
  Fusion Protein
AHGEGTFTSDLSILLDEEAVQLFIEWLLATGPVSGAPPPSGGGGGGGSGGGGSGGGGSAESKYGPPCPPCPAPEFEGGPSVFLFPPKPKDTLMISRTPEVTCVVVDVSQEDPEVQFNWYVDGVEVHNAKTKPREEQFNSTYRVVSVLTVLHQDWLNGKEYKCKVSNKGLPSSIEKTISKAKGQPREPQVYTLPPSQEEMTKNQVSLTCLVKGFYPSDIAVEWESNGQPENNYKTTPPVLDSDGSFFLYSRLTVDKSRWQEGNVFSCSVMHEALHNHYTQKSLSLSLGGGGSGSAHPIPDSSPLLQFGGQVRQRYLYTDDACQTEAHLEIREDGTVGGAADQSPESLLQLKALKPGVIQILGVKTSRFLCQRPDGALYGSLHFDPEACSFRELLLEDGYNVYQSEAHGLPLHLPGCKSPHRDPAPRGPARFLPLPGLPPAPPEPPGILAPQPPDVGSSDPLSMVGSQGRSPSYAS

SEQ ID NO: 1686 - protein, 475 aa, Artificial Sequence
  Fusion Protein
AHGEGTFTSDLSILLDEEAVQLFIEWLLATGPVSGAPPPSGGGGGGGSGGGGSGGGGSAESKYGPPCPPCPAPEFEGGPSVFLFPPKPKDTLMISRTPEVTCVVVDVSQEDPEVQFNWYVDGVEVHNAKTKPREEQFNSTYRVVSVLTVLHQDWLNGKEYKCKVSNKGLPSSIEKTISKAKGQPREPQVYTLPPSQEEMTKNQVSLTCLVKGFYPSDIAVEWESNGQPENNYKTTPPVLDSDGSFFLYSRLTVDKSRWQEGNVFSCSVMHEALHNHYTQKSLSLSLGGGGSGSAHPIPDSSPLLQFGGQVRQRYLYTDDACQTEAHLEIREDGTVGGAADQSPESLLQLKALKPGVIQILGVKTSRFLCQRPDGALYGSLHFDPEACSFRELLLEDGYNVYQSEAHGLPLHLPGCKSPHRDPAPRGPARFLPLPGLPPAPPEPPGILAPQPPDVGSSDPLSMVYPSQGRSPSYAS

SEQ ID NO: 1687 - protein, 474 aa, Artificial Sequence
  Fusion Protein
AHGEGTFTSDLSILLDEEAVQLFIEWLLATGPVSGAPPPSGGGGGGGSGGGGSGGGGSAESKYGPPCPPCPAPEFEGGPSVFLFPPKPKDTLMISRTPEVTCVVVDVSQEDPEVQFNWYVDGVEVHNAKTKPREEQFNSTYRVVSVLTVLHQDWLNGKEYKCKVSNKGLPSSIEKTISKAKGQPREPQVYTLPPSQEEMTKNQVSLTCLVKGFYPSDIAVEWESNGQPENNYKTTPPVLDSDGSFFLYSRLTVDKSRWQEGNVFSCSVMHEALHNHYTQKSLSLSLGGGGSGSAHPIPDSSPLLQFGGQVRQRYLYTDDACQTEAHLEIREDGTVGGAADQSPESLLQLKALKPGVIQILGVKTSRFLCQRPDGALYGSLHFDPEACSFRELLLEDGYNVYQSEAHGLPLHLCGNKSPHRDPAPRGPARFLPLPGLPPAPPEPPGILAPQPPDVGSSDPLSMVGSQGRSPSYAS

SEQ ID NO: 1688 - protein, 475 aa, Artificial Sequence
  Fusion Protein
AHGEGTFTSDLSILLDEEAVQLFIEWLLATGPVSGAPPPSGGGGGGGSGGGGSGGGGSAESKYGPPCPPCPAPEFEGGPSVFLFPPKPKDTLMISRTPEVTCVVVDVSQEDPEVQFNWYVDGVEVHNAKTKPREEQFNSTYRVVSVLTVLHQDWLNGKEYKCKVSNKGLPSSIEKTISKAKGQPREPQVYTLPPSQEEMTKNQVSLTCLVKGFYPSDIAVEWESNGQPENNYKTTPPVLDSDGSFFLYSRLTVDKSRWQEGNVFSCSVMHEALHNHYTQKSLSLSLGGGGSGSAHPIPDSSPLLQFGGQVRQRYLYTDDACQTEAHLEIREDGTVGGAADQSPESLLQLKALKPGVIQILGVKTSRFLCQRPDGALYGSLHFDPEACSFRELLLEDGYNVYQSEAHGLPLHLCGNKSPHRDPAPRGPARFLPLPGLPPAPPEPPGILAPQPPDVGSSDPLSMVYPSQGRSPSYAS

SEQ ID NO: 1689 - protein, 472 aa, Artificial Sequence
  Fusion Protein
AHGEGTFTSDLSIQLEEEAVREFIEWLLATGPVSGAPPPSGGGGGGGSGGGGSGGGGSADKTHTCPPCPAPEAAGGPSVFLFPPKPKDTLMISRTPEVTCVVVDVSHEDPEVKFNWYVDGVEVHNAKTKPREEQYNSTYRVVSVLTVLHQDWLNGKEYKCKVSNKALPAPIEKTISKAKGQPREPQVYTLPPSRDELTKNQVSLTCLVKGFYPSDIAVEWESNGQPENNYKTTPPVLDSDGSFFLYSKLTVDKSRWQQGNVFSCSVMHEALHNHYTQKSLSLSPGGGGSGSAHPIPDSSPLLQFGGQVRQRYLYTDDACQTEAHLEIREDGTVGGAADQSPESLLQLKALKPGVIQILGVKTSRFLCQRPDGALYGSLHFDPEACSFRELLLEDGYNVYQSEAHGLPLHLPGCKSPHRDPAPRGPARFLPLPGLPPAPPEPPGILAPQPPDVGSSDPLSMVGSQGRSPSYAS

SEQ ID NO: 1690 - protein, 473 aa, Artificial Sequence
  Fusion Protein
AHGEGTFTSDLSIQLEEEAVREFIEWLLATGPVSGAPPPSGGGGGGGSGGGGSGGGGSADKTHTCPPCPAPEAAGGPSVFLFPPKPKDTLMISRTPEVTCVVVDVSHEDPEVKFNWYVDGVEVHNAKTKPREEQYNSTYRVVSVLTVLHQDWLNGKEYKCKVSNKALPAPIEKTISKAKGQPREPQVYTLPPSRDELTKNQVSLTCLVKGFYPSDIAVEWESNGQPENNYKTTPPVLDSDGSFFLYSKLTVDKSRWQQGNVFSCSVMHEALHNHYTQKSLSLSPGGGGSGSAHPIPDSSPLLQFGGQVRQRYLYTDDACQTEAHLEIREDGTVGGAADQSPESLLQLKALKPGVIQILGVKTSRFLCQRPDGALYGSLHFDPEACSFRELLLEDGYNVYQSEAHGLPLHLPGCKSPHRDPAPRGPARFLPLPGLPPAPPEPPGILAPQPPDVGSSDPLSMVYPSQGRSPSYAS

SEQ ID NO: 1691 - protein, 472 aa, Artificial Sequence
  Fusion Protein
AHGEGTFTSDLSIQLEEEAVREFIEWLLATGPVSGAPPPSGGGGGGGSGGGGSGGGGSADKTHTCPPCPAPEAAGGPSVFLFPPKPKDTLMISRTPEVTCVVVDVSHEDPEVKFNWYVDGVEVHNAKTKPREEQYNSTYRVVSVLTVLHQDWLNGKEYKCKVSNKALPAPIEKTISKAKGQPREPQVYTLPPSRDELTKNQVSLTCLVKGFYPSDIAVEWESNGQPENNYKTTPPVLDSDGSFFLYSKLTVDKSRWQQGNVFSCSVMHEALHNHYTQKSLSLSPGGGGSGSAHPIPDSSPLLQFGGQVRQRYLYTDDACQTEAHLEIREDGTVGGAADQSPESLLQLKALKPGVIQILGVKTSRFLCQRPDGALYGSLHFDPEACSFRELLLEDGYNVYQSEAHGLPLHLCGNKSPHRDPAPRGPARFLPLPGLPPAPPEPPGILAPQPPDVGSSDPLSMVGSQGRSPSYAS

SEQ ID NO: 1692 - protein, 473 aa, Artificial Sequence
  Fusion Protein
AHGEGTFTSDLSIQLEEEAVREFIEWLLATGPVSGAPPPSGGGGGGGSGGGGSGGGGSADKTHTCPPCPAPEAAGGPSVFLFPPKPKDTLMISRTPEVTCVVVDVSHEDPEVKFNWYVDGVEVHNAKTKPREEQYNSTYRVVSVLTVLHQDWLNGKEYKCKVSNKALPAPIEKTISKAKGQPREPQVYTLPPSRDELTKNQVSLTCLVKGFYPSDIAVEWESNGQPENNYKTTPPVLDSDGSFFLYSKLTVDKSRWQQGNVFSCSVMHEALHNHYTQKSLSLSPGGGGSGSAHPIPDSSPLLQFGGQVRQRYLYTDDACQTEAHLEIREDGTVGGAADQSPESLLQLKALKPGVIQILGVKTSRFLCQRPDGALYGSLHFDPEACSFRELLLEDGYNVYQSEAHGLPLHLCGNKSPHRDPAPRGPARFLPLPGLPPAPPEPPGILAPQPPDVGSSDPLSMVYPSQGRSPSYAS

SEQ ID NO: 1693 - protein, 472 aa, Artificial Sequence
  Fusion Protein
AHGEGTFTSDLSIQLEEEAVREFIEWLLATGPVSGAPPPSGGGGGGGSGGGGSGGGGSADKTHTCPPCPAPELLGGPSVFLFPPKPKDTLMISRTPEVTCVVVDVSHEDPEVKFNWYVDGVEVHNAKTKPREEQYNNASRVVSVLTVLHQDWLNGKEYKCKVSNKALPAPIEKTISKAKGQPREPQVYTLPPSRDELTKNQVSLTCLVKGFYPSDIAVEWESNGQPENNYKTTPPVLDSDGSFFLYSKLTVDKSRWQQGNVFSCSVMHEALHNHYTQKSLSLSPGGGGSGSAHPIPDSSPLLQFGGQVRQRYLYTDDACQTEAHLEIREDGTVGGAADQSPESLLQLKALKPGVIQILGVKTSRFLCQRPDGALYGSLHFDPEACSFRELLLEDGYNVYQSEAHGLPLHLPGCKSPHRDPAPRGPARFLPLPGLPPAPPEPPGILAPQPPDVGSSDPLSMVGSQGRSPSYAS

SEQ ID NO: 1694 - protein, 473 aa, Artificial Sequence
  Fusion Protein
AHGEGTFTSDLSIQLEEEAVREFIEWLLATGPVSGAPPPSGGGGGGGSGGGGSGGGGSADKTHTCPPCPAPELLGGPSVFLFPPKPKDTLMISRTPEVTCVVVDVSHEDPEVKFNWYVDGVEVHNAKTKPREEQYNNASRVVSVLTVLHQDWLNGKEYKCKVSNKALPAPIEKTISKAKGQPREPQVYTLPPSRDELTKNQVSLTCLVKGFYPSDIAVEWESNGQPENNYKTTPPVLDSDGSFFLYSKLTVDKSRWQQGNVFSCSVMHEALHNHYTQKSLSLSPGGGGSGSAHPIPDSSPLLQFGGQVRQRYLYTDDACQTEAHLEIREDGTVGGAADQSPESLLQLKALKPGVIQILGVKTSRFLCQRPDGALYGSLHFDPEACSFRELLLEDGYNVYQSEAHGLPLHLPGCKSPHRDPAPRGPARFLPLPGLPPAPPEPPGILAPQPPDVGSSDPLSMVYPSQGRSPSYAS

SEQ ID NO: 1695 - protein, 472 aa, Artificial Sequence
  Fusion Protein
AHGEGTFTSDLSIQLEEEAVREFIEWLLATGPVSGAPPPSGGGGGGGSGGGGSGGGGSADKTHTCPPCPAPELLGGPSVFLFPPKPKDTLMISRTPEVTCVVVDVSHEDPEVKFNWYVDGVEVHNAKTKPREEQYNNASRVVSVLTVLHQDWLNGKEYKCKVSNKALPAPIEKTISKAKGQPREPQVYTLPPSRDELTKNQVSLTCLVKGFYPSDIAVEWESNGQPENNYKTTPPVLDSDGSFFLYSKLTVDKSRWQQGNVFSCSVMHEALHNHYTQKSLSLSPGGGGSGSAHPIPDSSPLLQFGGQVRQRYLYTDDACQTEAHLEIREDGTVGGAADQSPESLLQLKALKPGVIQILGVKTSRFLCQRPDGALYGSLHFDPEACSFRELLLEDGYNVYQSEAHGLPLHLCGNKSPHRDPAPRGPARFLPLPGLPPAPPEPPGILAPQPPDVGSSDPLSMVGSQGRSPSYAS

SEQ ID NO: 1696 - protein, 473 aa, Artificial Sequence
  Fusion Protein
AHGEGTFTSDLSIQLEEEAVREFIEWLLATGPVSGAPPPSGGGGGGGSGGGGSGGGGSADKTHTCPPCPAPELLGGPSVFLFPPKPKDTLMISRTPEVTCVVVDVSHEDPEVKFNWYVDGVEVHNAKTKPREEQYNNASRVVSVLTVLHQDWLNGKEYKCKVSNKALPAPIEKTISKAKGQPREPQVYTLPPSRDELTKNQVSLTCLVKGFYPSDIAVEWESNGQPENNYKTTPPVLDSDGSFFLYSKLTVDKSRWQQGNVFSCSVMHEALHNHYTQKSLSLSPGGGGSGSAHPIPDSSPLLQFGGQVRQRYLYTDDACQTEAHLEIREDGTVGGAADQSPESLLQLKALKPGVIQILGVKTSRFLCQRPDGALYGSLHFDPEACSFRELLLEDGYNVYQSEAHGLPLHLCGNKSPHRDPAPRGPARFLPLPGLPPAPPEPPGILAPQPPDVGSSDPLSMVYPSQGRSPSYAS

SEQ ID NO: 1697 - protein, 474 aa, Artificial Sequence
  Fusion Protein
AHGEGTFTSDLSIQLEEEAVREFIEWLLATGPVSGAPPPSGGGGGGGSGGGGSGGGGSAESKYGPPCPPCPAPEFEGGPSVFLFPPKPKDTLMISRTPEVTCVVVDVSQEDPEVQFNWYVDGVEVHNAKTKPREEQFNSTYRVVSVLTVLHQDWLNGKEYKCKVSNKGLPSSIEKTISKAKGQPREPQVYTLPPSQEEMTKNQVSLTCLVKGFYPSDIAVEWESNGQPENNYKTTPPVLDSDGSFFLYSRLTVDKSRWQEGNVFSCSVMHEALHNHYTQKSLSLSLGGGGSGSAHPIPDSSPLLQFGGQVRQRYLYTDDACQTEAHLEIREDGTVGGAADQSPESLLQLKALKPGVIQILGVKTSRFLCQRPDGALYGSLHFDPEACSFRELLLEDGYNVYQSEAHGLPLHLPGCKSPHRDPAPRGPARFLPLPGLPPAPPEPPGILAPQPPDVGSSDPLSMVGSQGRSPSYAS

SEQ ID NO: 1698 - protein, 475 aa, Artificial Sequence
  Fusion Protein
AHGEGTFTSDLSIQLEEEAVREFIEWLLATGPVSGAPPPSGGGGGGGSGGGGSGGGGSAESKYGPPCPPCPAPEFEGGPSVFLFPPKPKDTLMISRTPEVTCVVVDVSQEDPEVQFNWYVDGVEVHNAKTKPREEQFNSTYRVVSVLTVLHQDWLNGKEYKCKVSNKGLPSSIEKTISKAKGQPREPQVYTLPPSQEEMTKNQVSLTCLVKGFYPSDIAVEWESNGQPENNYKTTPPVLDSDGSFFLYSRLTVDKSRWQEGNVFSCSVMHEALHNHYTQKSLSLSLGGGGSGSAHPIPDSSPLLQFGGQVRQRYLYTDDACQTEAHLEIREDGTVGGAADQSPESLLQLKALKPGVIQILGVKTSRFLCQRPDGALYGSLHFDPEACSFRELLLEDGYNVYQSEAHGLPLHLPGCKSPHRDPAPRGPARFLPLPGLPPAPPEPPGILAPQPPDVGSSDPLSMVYPSQGRSPSYAS

SEQ ID NO: 1699 - protein, 474 aa, Artificial Sequence
  Fusion Protein
AHGEGTFTSDLSIQLEEEAVREFIEWLLATGPVSGAPPPSGGGGGGGSGGGGSGGGGSAESKYGPPCPPCPAPEFEGGPSVFLFPPKPKDTLMISRTPEVTCVVVDVSQEDPEVQFNWYVDGVEVHNAKTKPREEQFNSTYRVVSVLTVLHQDWLNGKEYKCKVSNKGLPSSIEKTISKAKGQPREPQVYTLPPSQEEMTKNQVSLTCLVKGFYPSDIAVEWESNGQPENNYKTTPPVLDSDGSFFLYSRLTVDKSRWQEGNVFSCSVMHEALHNHYTQKSLSLSLGGGGSGSAHPIPDSSPLLQFGGQVRQRYLYTDDACQTEAHLEIREDGTVGGAADQSPESLLQLKALKPGVIQILGVKTSRFLCQRPDGALYGSLHFDPEACSFRELLLEDGYNVYQSEAHGLPLHLCGNKSPHRDPAPRGPARFLPLPGLPPAPPEPPGILAPQPPDVGSSDPLSMVGSQGRSPSYAS

SEQ ID NO: 1700 - protein, 475 aa, Artificial Sequence
  Fusion Protein
AHGEGTFTSDLSIQLEEEAVREFIEWLLATGPVSGAPPPSGGGGGGGSGGGGSGGGGSAESKYGPPCPPCPAPEFEGGPSVFLFPPKPKDTLMISRTPEVTCVVVDVSQEDPEVQFNWYVDGVEVHNAKTKPREEQFNSTYRVVSVLTVLHQDWLNGKEYKCKVSNKGLPSSIEKTISKAKGQPREPQVYTLPPSQEEMTKNQVSLTCLVKGFYPSDIAVEWESNGQPENNYKTTPPVLDSDGSFFLYSRLTVDKSRWQEGNVFSCSVMHEALHNHYTQKSLSLSLGGGGSGSAHPIPDSSPLLQFGGQVRQRYLYTDDACQTEAHLEIREDGTVGGAADQSPESLLQLKALKPGVIQILGVKTSRFLCQRPDGALYGSLHFDPEACSFRELLLEDGYNVYQSEAHGLPLHLCGNKSPHRDPAPRGPARFLPLPGLPPAPPEPPGILAPQPPDVGSSDPLSMVYPSQGRSPSYAS

SEQ ID NO: 1701 - protein, 472 aa, Artificial Sequence
  Fusion Protein
AHGEGTFTSDLSIQLEEEAVRLFIEWLLATGPSSGAPPPSGGGGGGGSGGGGSGGGGSADKTHTCPPCPAPEAAGGPSVFLFPPKPKDTLMISRTPEVTCVVVDVSHEDPEVKFNWYVDGVEVHNAKTKPREEQYNSTYRVVSVLTVLHQDWLNGKEYKCKVSNKALPAPIEKTISKAKGQPREPQVYTLPPSRDELTKNQVSLTCLVKGFYPSDIAVEWESNGQPENNYKTTPPVLDSDGSFFLYSKLTVDKSRWQQGNVFSCSVMHEALHNHYTQKSLSLSPGGGGSGSAHPIPDSSPLLQFGGQVRQRYLYTDDACQTEAHLEIREDGTVGGAADQSPESLLQLKALKPGVIQILGVKTSRFLCQRPDGALYGSLHFDPEACSFRELLLEDGYNVYQSEAHGLPLHLPGCKSPHRDPAPRGPARFLPLPGLPPAPPEPPGILAPQPPDVGSSDPLSMVGSQGRSPSYAS

SEQ ID NO: 1702 - protein, 473 aa, Artificial Sequence
  Fusion Protein
AHGEGTFTSDLSIQLEEEAVRLFIEWLLATGPSSGAPPPSGGGGGGGSGGGGSGGGGSADKTHTCPPCPAPEAAGGPSVFLFPPKPKDTLMISRTPEVTCVVVDVSHEDPEVKFNWYVDGVEVHNAKTKPREEQYNSTYRVVSVLTVLHQDWLNGKEYKCKVSNKALPAPIEKTISKAKGQPREPQVYTLPPSRDELTKNQVSLTCLVKGFYPSDIAVEWESNGQPENNYKTTPPVLDSDGSFFLYSKLTVDKSRWQQGNVFSCSVMHEALHNHYTQKSLSLSPGGGGSGSAHPIPDSSPLLQFGGQVRQRYLYTDDACQTEAHLEIREDGTVGGAADQSPESLLQLKALKPGVIQILGVKTSRFLCQRPDGALYGSLHFDPEACSFRELLLEDGYNVYQSEAHGLPLHLPGCKSPHRDPAPRGPARFLPLPGLPPAPPEPPGILAPQPPDVGSSDPLSMVYPSQGRSPSYAS

SEQ ID NO: 1703 - protein, 472 aa, Artificial Sequence
  Fusion Protein
AHGEGTFTSDLSIQLEEEAVRLFIEWLLATGPSSGAPPPSGGGGGGGSGGGGSGGGGSADKTHTCPPCPAPEAAGGPSVFLFPPKPKDTLMISRTPEVTCVVVDVSHEDPEVKFNWYVDGVEVHNAKTKPREEQYNSTYRVVSVLTVLHQDWLNGKEYKCKVSNKALPAPIEKTISKAKGQPREPQVYTLPPSRDELTKNQVSLTCLVKGFYPSDIAVEWESNGQPENNYKTTPPVLDSDGSFFLYSKLTVDKSRWQQGNVFSCSVMHEALHNHYTQKSLSLSPGGGGSGSAHPIPDSSPLLQFGGQVRQRYLYTDDACQTEAHLEIREDGTVGGAADQSPESLLQLKALKPGVIQILGVKTSRFLCQRPDGALYGSLHFDPEACSFRELLLEDGYNVYQSEAHGLPLHLCGNKSPHRDPAPRGPARFLPLPGLPPAPPEPPGILAPQPPDVGSSDPLSMVGSQGRSPSYAS

SEQ ID NO: 1704 - protein, 473 aa, Artificial Sequence
  Fusion Protein
AHGEGTFTSDLSIQLEEEAVRLFIEWLLATGPSSGAPPPSGGGGGGGSGGGGSGGGGSADKTHTCPPCPAPEAAGGPSVFLFPPKPKDTLMISRTPEVTCVVVDVSHEDPEVKFNWYVDGVEVHNAKTKPREEQYNSTYRVVSVLTVLHQDWLNGKEYKCKVSNKALPAPIEKTISKAKGQPREPQVYTLPPSRDELTKNQVSLTCLVKGFYPSDIAVEWESNGQPENNYKTTPPVLDSDGSFFLYSKLTVDKSRWQQGNVFSCSVMHEALHNHYTQKSLSLSPGGGGSGSAHPIPDSSPLLQFGGQVRQRYLYTDDACQTEAHLEIREDGTVGGAADQSPESLLQLKALKPGVIQILGVKTSRFLCQRPDGALYGSLHFDPEACSFRELLLEDGYNVYQSEAHGLPLHLCGNKSPHRDPAPRGPARFLPLPGLPPAPPEPPGILAPQPPDVGSSDPLSMVYPSQGRSPSYAS

SEQ ID NO: 1705 - protein, 472 aa, Artificial Sequence
  Fusion Protein
AHGEGTFTSDLSIQLEEEAVRLFIEWLLATGPSSGAPPPSGGGGGGGSGGGGSGGGGSADKTHTCPPCPAPELLGGPSVFLFPPKPKDTLMISRTPEVTCVVVDVSHEDPEVKFNWYVDGVEVHNAKTKPREEQYNNASRVVSVLTVLHQDWLNGKEYKCKVSNKALPAPIEKTISKAKGQPREPQVYTLPPSRDELTKNQVSLTCLVKGFYPSDIAVEWESNGQPENNYKTTPPVLDSDGSFFLYSKLTVDKSRWQQGNVFSCSVMHEALHNHYTQKSLSLSPGGGGSGSAHPIPDSSPLLQFGGQVRQRYLYTDDACQTEAHLEIREDGTVGGAADQSPESLLQLKALKPGVIQILGVKTSRFLCQRPDGALYGSLHFDPEACSFRELLLEDGYNVYQSEAHGLPLHLPGCKSPHRDPAPRGPARFLPLPGLPPAPPEPPGILAPQPPDVGSSDPLSMVGSQGRSPSYAS

SEQ ID NO: 1706 - protein, 473 aa, Artificial Sequence
  Fusion Protein
AHGEGTFTSDLSIQLEEEAVRLFIEWLLATGPSSGAPPPSGGGGGGGSGGGGSGGGGSADKTHTCPPCPAPELLGGPSVFLFPPKPKDTLMISRTPEVTCVVVDVSHEDPEVKFNWYVDGVEVHNAKTKPREEQYNNASRVVSVLTVLHQDWLNGKEYKCKVSNKALPAPIEKTISKAKGQPREPQVYTLPPSRDELTKNQVSLTCLVKGFYPSDIAVEWESNGQPENNYKTTPPVLDSDGSFFLYSKLTVDKSRWQQGNVFSCSVMHEALHNHYTQKSLSLSPGGGGSGSAHPIPDSSPLLQFGGQVRQRYLYTDDACQTEAHLEIREDGTVGGAADQSPESLLQLKALKPGVIQILGVKTSRFLCQRPDGALYGSLHFDPEACSFRELLLEDGYNVYQSEAHGLPLHLPGCKSPHRDPAPRGPARFLPLPGLPPAPPEPPGILAPQPPDVGSSDPLSMVYPSQGRSPSYAS

SEQ ID NO: 1707 - protein, 472 aa, Artificial Sequence
  Fusion Protein
AHGEGTFTSDLSIQLEEEAVRLFIEWLLATGPSSGAPPPSGGGGGGGSGGGGSGGGGSADKTHTCPPCPAPELLGGPSVFLFPPKPKDTLMISRTPEVTCVVVDVSHEDPEVKFNWYVDGVEVHNAKTKPREEQYNNASRVVSVLTVLHQDWLNGKEYKCKVSNKALPAPIEKTISKAKGQPREPQVYTLPPSRDELTKNQVSLTCLVKGFYPSDIAVEWESNGQPENNYKTTPPVLDSDGSFFLYSKLTVDKSRWQQGNVFSCSVMHEALHNHYTQKSLSLSPGGGGSGSAHPIPDSSPLLQFGGQVRQRYLYTDDACQTEAHLEIREDGTVGGAADQSPESLLQLKALKPGVIQILGVKTSRFLCQRPDGALYGSLHFDPEACSFRELLLEDGYNVYQSEAHGLPLHLCGNKSPHRDPAPRGPARFLPLPGLPPAPPEPPGILAPQPPDVGSSDPLSMVGSQGRSPSYAS

SEQ ID NO: 1708 - protein, 473 aa, Artificial Sequence
  Fusion Protein
AHGEGTFTSDLSIQLEEEAVRLFIEWLLATGPSSGAPPPSGGGGGGGSGGGGSGGGGSADKTHTCPPCPAPELLGGPSVFLFPPKPKDTLMISRTPEVTCVVVDVSHEDPEVKFNWYVDGVEVHNAKTKPREEQYNNASRVVSVLTVLHQDWLNGKEYKCKVSNKALPAPIEKTISKAKGQPREPQVYTLPPSRDELTKNQVSLTCLVKGFYPSDIAVEWESNGQPENNYKTTPPVLDSDGSFFLYSKLTVDKSRWQQGNVFSCSVMHEALHNHYTQKSLSLSPGGGGSGSAHPIPDSSPLLQFGGQVRQRYLYTDDACQTEAHLEIREDGTVGGAADQSPESLLQLKALKPGVIQILGVKTSRFLCQRPDGALYGSLHFDPEACSFRELLLEDGYNVYQSEAHGLPLHLCGNKSPHRDPAPRGPARFLPLPGLPPAPPEPPGILAPQPPDVGSSDPLSMVYPSQGRSPSYAS

SEQ ID NO: 1709 - protein, 474 aa, Artificial Sequence
  Fusion Protein
AHGEGTFTSDLSIQLEEEAVRLFIEWLLATGPSSGAPPPSGGGGGGGSGGGGSGGGGSAESKYGPPCPPCPAPEFEGGPSVFLFPPKPKDTLMISRTPEVTCVVVDVSQEDPEVQFNWYVDGVEVHNAKTKPREEQFNSTYRVVSVLTVLHQDWLNGKEYKCKVSNKGLPSSIEKTISKAKGQPREPQVYTLPPSQEEMTKNQVSLTCLVKGFYPSDIAVEWESNGQPENNYKTTPPVLDSDGSFFLYSRLTVDKSRWQEGNVFSCSVMHEALHNHYTQKSLSLSLGGGGSGSAHPIPDSSPLLQFGGQVRQRYLYTDDACQTEAHLEIREDGTVGGAADQSPESLLQLKALKPGVIQILGVKTSRFLCQRPDGALYGSLHFDPEACSFRELLLEDGYNVYQSEAHGLPLHLPGCKSPHRDPAPRGPARFLPLPGLPPAPPEPPGILAPQPPDVGSSDPLSMVGSQGRSPSYAS

SEQ ID NO: 1710 - protein, 475 aa, Artificial Sequence
  Fusion Protein
AHGEGTFTSDLSIQLEEEAVRLFIEWLLATGPSSGAPPPSGGGGGGGSGGGGSGGGGSAESKYGPPCPPCPAPEFEGGPSVFLFPPKPKDTLMISRTPEVTCVVVDVSQEDPEVQFNWYVDGVEVHNAKTKPREEQFNSTYRVVSVLTVLHQDWLNGKEYKCKVSNKGLPSSIEKTISKAKGQPREPQVYTLPPSQEEMTKNQVSLTCLVKGFYPSDIAVEWESNGQPENNYKTTPPVLDSDGSFFLYSRLTVDKSRWQEGNVFSCSVMHEALHNHYTQKSLSLSLGGGGSGSAHPIPDSSPLLQFGGQVRQRYLYTDDACQTEAHLEIREDGTVGGAADQSPESLLQLKALKPGVIQILGVKTSRFLCQRPDGALYGSLHFDPEACSFRELLLEDGYNVYQSEAHGLPLHLPGCKSPHRDPAPRGPARFLPLPGLPPAPPEPPGILAPQPPDVGSSDPLSMVYPSQGRSPSYAS

SEQ ID NO: 1711 - protein, 474 aa, Artificial Sequence
  Fusion Protein
AHGEGTFTSDLSIQLEEEAVRLFIEWLLATGPSSGAPPPSGGGGGGGSGGGGSGGGGSAESKYGPPCPPCPAPEFEGGPSVFLFPPKPKDTLMISRTPEVTCVVVDVSQEDPEVQFNWYVDGVEVHNAKTKPREEQFNSTYRVVSVLTVLHQDWLNGKEYKCKVSNKGLPSSIEKTISKAKGQPREPQVYTLPPSQEEMTKNQVSLTCLVKGFYPSDIAVEWESNGQPENNYKTTPPVLDSDGSFFLYSRLTVDKSRWQEGNVFSCSVMHEALHNHYTQKSLSLSLGGGGSGSAHPIPDSSPLLQFGGQVRQRYLYTDDACQTEAHLEIREDGTVGGAADQSPESLLQLKALKPGVIQILGVKTSRFLCQRPDGALYGSLHFDPEACSFRELLLEDGYNVYQSEAHGLPLHLCGNKSPHRDPAPRGPARFLPLPGLPPAPPEPPGILAPQPPDVGSSDPLSMVGSQGRSPSYAS

SEQ ID NO: 1712 - protein, 475 aa, Artificial Sequence
  Fusion Protein
AHGEGTFTSDLSIQLEEEAVRLFIEWLLATGPSSGAPPPSGGGGGGGSGGGGSGGGGSAESKYGPPCPPCPAPEFEGGPSVFLFPPKPKDTLMISRTPEVTCVVVDVSQEDPEVQFNWYVDGVEVHNAKTKPREEQFNSTYRVVSVLTVLHQDWLNGKEYKCKVSNKGLPSSIEKTISKAKGQPREPQVYTLPPSQEEMTKNQVSLTCLVKGFYPSDIAVEWESNGQPENNYKTTPPVLDSDGSFFLYSRLTVDKSRWQEGNVFSCSVMHEALHNHYTQKSLSLSLGGGGSGSAHPIPDSSPLLQFGGQVRQRYLYTDDACQTEAHLEIREDGTVGGAADQSPESLLQLKALKPGVIQILGVKTSRFLCQRPDGALYGSLHFDPEACSFRELLLEDGYNVYQSEAHGLPLHLCGNKSPHRDPAPRGPARFLPLPGLPPAPPEPPGILAPQPPDVGSSDPLSMVYPSQGRSPSYAS

SEQ ID NO: 1713 - protein, 472 aa, Artificial Sequence
  Fusion Protein
AHGEGTFTSDLSIQLEEEAVQEFIEWLLATGPVSGAPPPSGGGGGGGSGGGGSGGGGSADKTHTCPPCPAPEAAGGPSVFLFPPKPKDTLMISRTPEVTCVVVDVSHEDPEVKFNWYVDGVEVHNAKTKPREEQYNSTYRVVSVLTVLHQDWLNGKEYKCKVSNKALPAPIEKTISKAKGQPREPQVYTLPPSRDELTKNQVSLTCLVKGFYPSDIAVEWESNGQPENNYKTTPPVLDSDGSFFLYSKLTVDKSRWQQGNVFSCSVMHEALHNHYTQKSLSLSPGGGGSGSAHPIPDSSPLLQFGGQVRQRYLYTDDACQTEAHLEIREDGTVGGAADQSPESLLQLKALKPGVIQILGVKTSRFLCQRPDGALYGSLHFDPEACSFRELLLEDGYNVYQSEAHGLPLHLPGCKSPHRDPAPRGPARFLPLPGLPPAPPEPPGILAPQPPDVGSSDPLSMVGSQGRSPSYAS

SEQ ID NO: 1714 - protein, 473 aa, Artificial Sequence
  Fusion Protein
AHGEGTFTSDLSIQLEEEAVQEFIEWLLATGPVSGAPPPSGGGGGGGSGGGGSGGGGSADKTHTCPPCPAPEAAGGPSVFLFPPKPKDTLMISRTPEVTCVVVDVSHEDPEVKFNWYVDGVEVHNAKTKPREEQYNSTYRVVSVLTVLHQDWLNGKEYKCKVSNKALPAPIEKTISKAKGQPREPQVYTLPPSRDELTKNQVSLTCLVKGFYPSDIAVEWESNGQPENNYKTTPPVLDSDGSFFLYSKLTVDKSRWQQGNVFSCSVMHEALHNHYTQKSLSLSPGGGGSGSAHPIPDSSPLLQFGGQVRQRYLYTDDACQTEAHLEIREDGTVGGAADQSPESLLQLKALKPGVIQILGVKTSRFLCQRPDGALYGSLHFDPEACSFRELLLEDGYNVYQSEAHGLPLHLPGCKSPHRDPAPRGPARFLPLPGLPPAPPEPPGILAPQPPDVGSSDPLSMVYPSQGRSPSYAS

SEQ ID NO: 1715 - protein, 472 aa, Artificial Sequence
  Fusion Protein
AHGEGTFTSDLSIQLEEEAVQEFIEWLLATGPVSGAPPPSGGGGGGGSGGGGSGGGGSADKTHTCPPCPAPEAAGGPSVFLFPPKPKDTLMISRTPEVTCVVVDVSHEDPEVKFNWYVDGVEVHNAKTKPREEQYNSTYRVVSVLTVLHQDWLNGKEYKCKVSNKALPAPIEKTISKAKGQPREPQVYTLPPSRDELTKNQVSLTCLVKGFYPSDIAVEWESNGQPENNYKTTPPVLDSDGSFFLYSKLTVDKSRWQQGNVFSCSVMHEALHNHYTQKSLSLSPGGGGSGSAHPIPDSSPLLQFGGQVRQRYLYTDDACQTEAHLEIREDGTVGGAADQSPESLLQLKALKPGVIQILGVKTSRFLCQRPDGALYGSLHFDPEACSFRELLLEDGYNVYQSEAHGLPLHLCGNKSPHRDPAPRGPARFLPLPGLPPAPPEPPGILAPQPPDVGSSDPLSMVGSQGRSPSYAS

SEQ ID NO: 1716 - protein, 473 aa, Artificial Sequence
  Fusion Protein
AHGEGTFTSDLSIQLEEEAVQEFIEWLLATGPVSGAPPPSGGGGGGGSGGGGSGGGGSADKTHTCPPCPAPEAAGGPSVFLFPPKPKDTLMISRTPEVTCVVVDVSHEDPEVKFNWYVDGVEVHNAKTKPREEQYNSTYRVVSVLTVLHQDWLNGKEYKCKVSNKALPAPIEKTISKAKGQPREPQVYTLPPSRDELTKNQVSLTCLVKGFYPSDIAVEWESNGQPENNYKTTPPVLDSDGSFFLYSKLTVDKSRWQQGNVFSCSVMHEALHNHYTQKSLSLSPGGGGSGSAHPIPDSSPLLQFGGQVRQRYLYTDDACQTEAHLEIREDGTVGGAADQSPESLLQLKALKPGVIQILGVKTSRFLCQRPDGALYGSLHFDPEACSFRELLLEDGYNVYQSEAHGLPLHLCGNKSPHRDPAPRGPARFLPLPGLPPAPPEPPGILAPQPPDVGSSDPLSMVYPSQGRSPSYAS

SEQ ID NO: 1717 - protein, 472 aa, Artificial Sequence
  Fusion Protein
AHGEGTFTSDLSIQLEEEAVQEFIEWLLATGPVSGAPPPSGGGGGGGSGGGGSGGGGSADKTHTCPPCPAPELLGGPSVFLFPPKPKDTLMISRTPEVTCVVVDVSHEDPEVKFNWYVDGVEVHNAKTKPREEQYNNASRVVSVLTVLHQDWLNGKEYKCKVSNKALPAPIEKTISKAKGQPREPQVYTLPPSRDELTKNQVSLTCLVKGFYPSDIAVEWESNGQPENNYKTTPPVLDSDGSFFLYSKLTVDKSRWQQGNVFSCSVMHEALHNHYTQKSLSLSPGGGGSGSAHPIPDSSPLLQFGGQVRQRYLYTDDACQTEAHLEIREDGTVGGAADQSPESLLQLKALKPGVIQILGVKTSRFLCQRPDGALYGSLHFDPEACSFRELLLEDGYNVYQSEAHGLPLHLPGCKSPHRDPAPRGPARFLPLPGLPPAPPEPPGILAPQPPDVGSSDPLSMVGSQGRSPSYAS

SEQ ID NO: 1718 - protein, 473 aa, Artificial Sequence
  Fusion Protein
AHGEGTFTSDLSIQLEEEAVQEFIEWLLATGPVSGAPPPSGGGGGGGSGGGGSGGGGSADKTHTCPPCPAPELLGGPSVFLFPPKPKDTLMISRTPEVTCVVVDVSHEDPEVKFNWYVDGVEVHNAKTKPREEQYNNASRVVSVLTVLHQDWLNGKEYKCKVSNKALPAPIEKTISKAKGQPREPQVYTLPPSRDELTKNQVSLTCLVKGFYPSDIAVEWESNGQPENNYKTTPPVLDSDGSFFLYSKLTVDKSRWQQGNVFSCSVMHEALHNHYTQKSLSLSPGGGGSGSAHPIPDSSPLLQFGGQVRQRYLYTDDACQTEAHLEIREDGTVGGAADQSPESLLQLKALKPGVIQILGVKTSRFLCQRPDGALYGSLHFDPEACSFRELLLEDGYNVYQSEAHGLPLHLPGCKSPHRDPAPRGPARFLPLPGLPPAPPEPPGILAPQPPDVGSSDPLSMVYPSQGRSPSYAS

SEQ ID NO: 1719 - protein, 472 aa, Artificial Sequence
  Fusion Protein
AHGEGTFTSDLSIQLEEEAVQEFIEWLLATGPVSGAPPPSGGGGGGGSGGGGSGGGGSADKTHTCPPCPAPELLGGPSVFLFPPKPKDTLMISRTPEVTCVVVDVSHEDPEVKFNWYVDGVEVHNAKTKPREEQYNNASRVVSVLTVLHQDWLNGKEYKCKVSNKALPAPIEKTISKAKGQPREPQVYTLPPSRDELTKNQVSLTCLVKGFYPSDIAVEWESNGQPENNYKTTPPVLDSDGSFFLYSKLTVDKSRWQQGNVFSCSVMHEALHNHYTQKSLSLSPGGGGSGSAHPIPDSSPLLQFGGQVRQRYLYTDDACQTEAHLEIREDGTVGGAADQSPESLLQLKALKPGVIQILGVKTSRFLCQRPDGALYGSLHFDPEACSFRELLLEDGYNVYQSEAHGLPLHLCGNKSPHRDPAPRGPARFLPLPGLPPAPPEPPGILAPQPPDVGSSDPLSMVGSQGRSPSYAS

SEQ ID NO: 1720 - protein, 473 aa, Artificial Sequence
  Fusion Protein
AHGEGTFTSDLSIQLEEEAVQEFIEWLLATGPVSGAPPPSGGGGGGGSGGGGSGGGGSADKTHTCPPCPAPELLGGPSVFLFPPKPKDTLMISRTPEVTCVVVDVSHEDPEVKFNWYVDGVEVHNAKTKPREEQYNNASRVVSVLTVLHQDWLNGKEYKCKVSNKALPAPIEKTISKAKGQPREPQVYTLPPSRDELTKNQVSLTCLVKGFYPSDIAVEWESNGQPENNYKTTPPVLDSDGSFFLYSKLTVDKSRWQQGNVFSCSVMHEALHNHYTQKSLSLSPGGGGSGSAHPIPDSSPLLQFGGQVRQRYLYTDDACQTEAHLEIREDGTVGGAADQSPESLLQLKALKPGVIQILGVKTSRFLCQRPDGALYGSLHFDPEACSFRELLLEDGYNVYQSEAHGLPLHLCGNKSPHRDPAPRGPARFLPLPGLPPAPPEPPGILAPQPPDVGSSDPLSMVYPSQGRSPSYAS

SEQ ID NO: 1721 - protein, 474 aa, Artificial Sequence
  Fusion Protein
AHGEGTFTSDLSIQLEEEAVQEFIEWLLATGPVSGAPPPSGGGGGGGSGGGGSGGGGSAESKYGPPCPPCPAPEFEGGPSVFLFPPKPKDTLMISRTPEVTCVVVDVSQEDPEVQFNWYVDGVEVHNAKTKPREEQFNSTYRVVSVLTVLHQDWLNGKEYKCKVSNKGLPSSIEKTISKAKGQPREPQVYTLPPSQEEMTKNQVSLTCLVKGFYPSDIAVEWESNGQPENNYKTTPPVLDSDGSFFLYSRLTVDKSRWQEGNVFSCSVMHEALHNHYTQKSLSLSLGGGGSGSAHPIPDSSPLLQFGGQVRQRYLYTDDACQTEAHLEIREDGTVGGAADQSPESLLQLKALKPGVIQILGVKTSRFLCQRPDGALYGSLHFDPEACSFRELLLEDGYNVYQSEAHGLPLHLPGCKSPHRDPAPRGPARFLPLPGLPPAPPEPPGILAPQPPDVGSSDPLSMVGSQGRSPSYAS

SEQ ID NO: 1722 - protein, 475 aa, Artificial Sequence
  Fusion Protein
AHGEGTFTSDLSIQLEEEAVQEFIEWLLATGPVSGAPPPSGGGGGGGSGGGGSGGGGSAESKYGPPCPPCPAPEFEGGPSVFLFPPKPKDTLMISRTPEVTCVVVDVSQEDPEVQFNWYVDGVEVHNAKTKPREEQFNSTYRVVSVLTVLHQDWLNGKEYKCKVSNKGLPSSIEKTISKAKGQPREPQVYTLPPSQEEMTKNQVSLTCLVKGFYPSDIAVEWESNGQPENNYKTTPPVLDSDGSFFLYSRLTVDKSRWQEGNVFSCSVMHEALHNHYTQKSLSLSLGGGGSGSAHPIPDSSPLLQFGGQVRQRYLYTDDACQTEAHLEIREDGTVGGAADQSPESLLQLKALKPGVIQILGVKTSRFLCQRPDGALYGSLHFDPEACSFRELLLEDGYNVYQSEAHGLPLHLPGCKSPHRDPAPRGPARFLPLPGLPPAPPEPPGILAPQPPDVGSSDPLSMVYPSQGRSPSYAS

SEQ ID NO: 1723 - protein, 474 aa, Artificial Sequence
  Fusion Protein
AHGEGTFTSDLSIQLEEEAVQEFIEWLLATGPVSGAPPPSGGGGGGGSGGGGSGGGGSAESKYGPPCPPCPAPEFEGGPSVFLFPPKPKDTLMISRTPEVTCVVVDVSQEDPEVQFNWYVDGVEVHNAKTKPREEQFNSTYRVVSVLTVLHQDWLNGKEYKCKVSNKGLPSSIEKTISKAKGQPREPQVYTLPPSQEEMTKNQVSLTCLVKGFYPSDIAVEWESNGQPENNYKTTPPVLDSDGSFFLYSRLTVDKSRWQEGNVFSCSVMHEALHNHYTQKSLSLSLGGGGSGSAHPIPDSSPLLQFGGQVRQRYLYTDDACQTEAHLEIREDGTVGGAADQSPESLLQLKALKPGVIQILGVKTSRFLCQRPDGALYGSLHFDPEACSFRELLLEDGYNVYQSEAHGLPLHLCGNKSPHRDPAPRGPARFLPLPGLPPAPPEPPGILAPQPPDVGSSDPLSMVGSQGRSPSYAS

SEQ ID NO: 1724 - protein, 475 aa, Artificial Sequence
  Fusion Protein
AHGEGTFTSDLSIQLEEEAVQEFIEWLLATGPVSGAPPPSGGGGGGGSGGGGSGGGGSAESKYGPPCPPCPAPEFEGGPSVFLFPPKPKDTLMISRTPEVTCVVVDVSQEDPEVQFNWYVDGVEVHNAKTKPREEQFNSTYRVVSVLTVLHQDWLNGKEYKCKVSNKGLPSSIEKTISKAKGQPREPQVYTLPPSQEEMTKNQVSLTCLVKGFYPSDIAVEWESNGQPENNYKTTPPVLDSDGSFFLYSRLTVDKSRWQEGNVFSCSVMHEALHNHYTQKSLSLSLGGGGSGSAHPIPDSSPLLQFGGQVRQRYLYTDDACQTEAHLEIREDGTVGGAADQSPESLLQLKALKPGVIQILGVKTSRFLCQRPDGALYGSLHFDPEACSFRELLLEDGYNVYQSEAHGLPLHLCGNKSPHRDPAPRGPARFLPLPGLPPAPPEPPGILAPQPPDVGSSDPLSMVYPSQGRSPSYAS

SEQ ID NO: 1725 - protein, 472 aa, Artificial Sequence
  Fusion Protein
AHGEGTFTSDLSIQLEEEAVQLFIEWLLATGPSSGAPPPSGGGGGGGSGGGGSGGGGSADKTHTCPPCPAPEAAGGPSVFLFPPKPKDTLMISRTPEVTCVVVDVSHEDPEVKFNWYVDGVEVHNAKTKPREEQYNSTYRVVSVLTVLHQDWLNGKEYKCKVSNKALPAPIEKTISKAKGQPREPQVYTLPPSRDELTKNQVSLTCLVKGFYPSDIAVEWESNGQPENNYKTTPPVLDSDGSFFLYSKLTVDKSRWQQGNVFSCSVMHEALHNHYTQKSLSLSPGGGGSGSAHPIPDSSPLLQFGGQVRQRYLYTDDACQTEAHLEIREDGTVGGAADQSPESLLQLKALKPGVIQILGVKTSRFLCQRPDGALYGSLHFDPEACSFRELLLEDGYNVYQSEAHGLPLHLPGCKSPHRDPAPRGPARFLPLPGLPPAPPEPPGILAPQPPDVGSSDPLSMVGSQGRSPSYAS

SEQ ID NO: 1726 - protein, 473 aa, Artificial Sequence
  Fusion Protein
AHGEGTFTSDLSIQLEEEAVQLFIEWLLATGPSSGAPPPSGGGGGGGSGGGGSGGGGSADKTHTCPPCPAPEAAGGPSVFLFPPKPKDTLMISRTPEVTCVVVDVSHEDPEVKFNWYVDGVEVHNAKTKPREEQYNSTYRVVSVLTVLHQDWLNGKEYKCKVSNKALPAPIEKTISKAKGQPREPQVYTLPPSRDELTKNQVSLTCLVKGFYPSDIAVEWESNGQPENNYKTTPPVLDSDGSFFLYSKLTVDKSRWQQGNVFSCSVMHEALHNHYTQKSLSLSPGGGGSGSAHPIPDSSPLLQFGGQVRQRYLYTDDACQTEAHLEIREDGTVGGAADQSPESLLQLKALKPGVIQILGVKTSRFLCQRPDGALYGSLHFDPEACSFRELLLEDGYNVYQSEAHGLPLHLPGCKSPHRDPAPRGPARFLPLPGLPPAPPEPPGILAPQPPDVGSSDPLSMVYPSQGRSPSYAS

SEQ ID NO: 1727 - protein, 472 aa, Artificial Sequence
  Fusion Protein
AHGEGTFTSDLSIQLEEEAVQLFIEWLLATGPSSGAPPPSGGGGGGGSGGGGSGGGGSADKTHTCPPCPAPEAAGGPSVFLFPPKPKDTLMISRTPEVTCVVVDVSHEDPEVKFNWYVDGVEVHNAKTKPREEQYNSTYRVVSVLTVLHQDWLNGKEYKCKVSNKALPAPIEKTISKAKGQPREPQVYTLPPSRDELTKNQVSLTCLVKGFYPSDIAVEWESNGQPENNYKTTPPVLDSDGSFFLYSKLTVDKSRWQQGNVFSCSVMHEALHNHYTQKSLSLSPGGGGSGSAHPIPDSSPLLQFGGQVRQRYLYTDDACQTEAHLEIREDGTVGGAADQSPESLLQLKALKPGVIQILGVKTSRFLCQRPDGALYGSLHFDPEACSFRELLLEDGYNVYQSEAHGLPLHLCGNKSPHRDPAPRGPARFLPLPGLPPAPPEPPGILAPQPPDVGSSDPLSMVGSQGRSPSYAS

SEQ ID NO: 1728 - protein, 473 aa, Artificial Sequence
  Fusion Protein
AHGEGTFTSDLSIQLEEEAVQLFIEWLLATGPSSGAPPPSGGGGGGGSGGGGSGGGGSADKTHTCPPCPAPEAAGGPSVFLFPPKPKDTLMISRTPEVTCVVVDVSHEDPEVKFNWYVDGVEVHNAKTKPREEQYNSTYRVVSVLTVLHQDWLNGKEYKCKVSNKALPAPIEKTISKAKGQPREPQVYTLPPSRDELTKNQVSLTCLVKGFYPSDIAVEWESNGQPENNYKTTPPVLDSDGSFFLYSKLTVDKSRWQQGNVFSCSVMHEALHNHYTQKSLSLSPGGGGSGSAHPIPDSSPLLQFGGQVRQRYLYTDDACQTEAHLEIREDGTVGGAADQSPESLLQLKALKPGVIQILGVKTSRFLCQRPDGALYGSLHFDPEACSFRELLLEDGYNVYQSEAHGLPLHLCGNKSPHRDPAPRGPARFLPLPGLPPAPPEPPGILAPQPPDVGSSDPLSMVYPSQGRSPSYAS

SEQ ID NO: 1729 - protein, 472 aa, Artificial Sequence
  Fusion Protein
AHGEGTFTSDLSIQLEEEAVQLFIEWLLATGPSSGAPPPSGGGGGGGSGGGGSGGGGSADKTHTCPPCPAPELLGGPSVFLFPPKPKDTLMISRTPEVTCVVVDVSHEDPEVKFNWYVDGVEVHNAKTKPREEQYNNASRVVSVLTVLHQDWLNGKEYKCKVSNKALPAPIEKTISKAKGQPREPQVYTLPPSRDELTKNQVSLTCLVKGFYPSDIAVEWESNGQPENNYKTTPPVLDSDGSFFLYSKLTVDKSRWQQGNVFSCSVMHEALHNHYTQKSLSLSPGGGGSGSAHPIPDSSPLLQFGGQVRQRYLYTDDACQTEAHLEIREDGTVGGAADQSPESLLQLKALKPGVIQILGVKTSRFLCQRPDGALYGSLHFDPEACSFRELLLEDGYNVYQSEAHGLPLHLPGCKSPHRDPAPRGPARFLPLPGLPPAPPEPPGILAPQPPDVGSSDPLSMVGSQGRSPSYAS

SEQ ID NO: 1730 - protein, 473 aa, Artificial Sequence
  Fusion Protein
AHGEGTFTSDLSIQLEEEAVQLFIEWLLATGPSSGAPPPSGGGGGGGSGGGGSGGGGSADKTHTCPPCPAPELLGGPSVFLFPPKPKDTLMISRTPEVTCVVVDVSHEDPEVKFNWYVDGVEVHNAKTKPREEQYNNASRVVSVLTVLHQDWLNGKEYKCKVSNKALPAPIEKTISKAKGQPREPQVYTLPPSRDELTKNQVSLTCLVKGFYPSDIAVEWESNGQPENNYKTTPPVLDSDGSFFLYSKLTVDKSRWQQGNVFSCSVMHEALHNHYTQKSLSLSPGGGGSGSAHPIPDSSPLLQFGGQVRQRYLYTDDACQTEAHLEIREDGTVGGAADQSPESLLQLKALKPGVIQILGVKTSRFLCQRPDGALYGSLHFDPEACSFRELLLEDGYNVYQSEAHGLPLHLPGCKSPHRDPAPRGPARFLPLPGLPPAPPEPPGILAPQPPDVGSSDPLSMVYPSQGRSPSYAS

SEQ ID NO: 1731 - protein, 472 aa, Artificial Sequence
  Fusion Protein
AHGEGTFTSDLSIQLEEEAVQLFIEWLLATGPSSGAPPPSGGGGGGGSGGGGSGGGGSADKTHTCPPCPAPELLGGPSVFLFPPKPKDTLMISRTPEVTCVVVDVSHEDPEVKFNWYVDGVEVHNAKTKPREEQYNNASRVVSVLTVLHQDWLNGKEYKCKVSNKALPAPIEKTISKAKGQPREPQVYTLPPSRDELTKNQVSLTCLVKGFYPSDIAVEWESNGQPENNYKTTPPVLDSDGSFFLYSKLTVDKSRWQQGNVFSCSVMHEALHNHYTQKSLSLSPGGGGSGSAHPIPDSSPLLQFGGQVRQRYLYTDDACQTEAHLEIREDGTVGGAADQSPESLLQLKALKPGVIQILGVKTSRFLCQRPDGALYGSLHFDPEACSFRELLLEDGYNVYQSEAHGLPLHLCGNKSPHRDPAPRGPARFLPLPGLPPAPPEPPGILAPQPPDVGSSDPLSMVGSQGRSPSYAS

SEQ ID NO: 1732 - protein, 473 aa, Artificial Sequence
  Fusion Protein
AHGEGTFTSDLSIQLEEEAVQLFIEWLLATGPSSGAPPPSGGGGGGGSGGGGSGGGGSADKTHTCPPCPAPELLGGPSVFLFPPKPKDTLMISRTPEVTCVVVDVSHEDPEVKFNWYVDGVEVHNAKTKPREEQYNNASRVVSVLTVLHQDWLNGKEYKCKVSNKALPAPIEKTISKAKGQPREPQVYTLPPSRDELTKNQVSLTCLVKGFYPSDIAVEWESNGQPENNYKTTPPVLDSDGSFFLYSKLTVDKSRWQQGNVFSCSVMHEALHNHYTQKSLSLSPGGGGSGSAHPIPDSSPLLQFGGQVRQRYLYTDDACQTEAHLEIREDGTVGGAADQSPESLLQLKALKPGVIQILGVKTSRFLCQRPDGALYGSLHFDPEACSFRELLLEDGYNVYQSEAHGLPLHLCGNKSPHRDPAPRGPARFLPLPGLPPAPPEPPGILAPQPPDVGSSDPLSMVYPSQGRSPSYAS

SEQ ID NO: 1733 - protein, 474 aa, Artificial Sequence
  Fusion Protein
AHGEGTFTSDLSIQLEEEAVQLFIEWLLATGPSSGAPPPSGGGGGGGSGGGGSGGGGSAESKYGPPCPPCPAPEFEGGPSVFLFPPKPKDTLMISRTPEVTCVVVDVSQEDPEVQFNWYVDGVEVHNAKTKPREEQFNSTYRVVSVLTVLHQDWLNGKEYKCKVSNKGLPSSIEKTISKAKGQPREPQVYTLPPSQEEMTKNQVSLTCLVKGFYPSDIAVEWESNGQPENNYKTTPPVLDSDGSFFLYSRLTVDKSRWQEGNVFSCSVMHEALHNHYTQKSLSLSLGGGGSGSAHPIPDSSPLLQFGGQVRQRYLYTDDACQTEAHLEIREDGTVGGAADQSPESLLQLKALKPGVIQILGVKTSRFLCQRPDGALYGSLHFDPEACSFRELLLEDGYNVYQSEAHGLPLHLPGCKSPHRDPAPRGPARFLPLPGLPPAPPEPPGILAPQPPDVGSSDPLSMVGSQGRSPSYAS

SEQ ID NO: 1734 - protein, 475 aa, Artificial Sequence
  Fusion Protein
AHGEGTFTSDLSIQLEEEAVQLFIEWLLATGPSSGAPPPSGGGGGGGSGGGGSGGGGSAESKYGPPCPPCPAPEFEGGPSVFLFPPKPKDTLMISRTPEVTCVVVDVSQEDPEVQFNWYVDGVEVHNAKTKPREEQFNSTYRVVSVLTVLHQDWLNGKEYKCKVSNKGLPSSIEKTISKAKGQPREPQVYTLPPSQEEMTKNQVSLTCLVKGFYPSDIAVEWESNGQPENNYKTTPPVLDSDGSFFLYSRLTVDKSRWQEGNVFSCSVMHEALHNHYTQKSLSLSLGGGGSGSAHPIPDSSPLLQFGGQVRQRYLYTDDACQTEAHLEIREDGTVGGAADQSPESLLQLKALKPGVIQILGVKTSRFLCQRPDGALYGSLHFDPEACSFRELLLEDGYNVYQSEAHGLPLHLPGCKSPHRDPAPRGPARFLPLPGLPPAPPEPPGILAPQPPDVGSSDPLSMVYPSQGRSPSYAS

SEQ ID NO: 1735 - protein, 474 aa, Artificial Sequence
  Fusion Protein
AHGEGTFTSDLSIQLEEEAVQLFIEWLLATGPSSGAPPPSGGGGGGGSGGGGSGGGGSAESKYGPPCPPCPAPEFEGGPSVFLFPPKPKDTLMISRTPEVTCVVVDVSQEDPEVQFNWYVDGVEVHNAKTKPREEQFNSTYRVVSVLTVLHQDWLNGKEYKCKVSNKGLPSSIEKTISKAKGQPREPQVYTLPPSQEEMTKNQVSLTCLVKGFYPSDIAVEWESNGQPENNYKTTPPVLDSDGSFFLYSRLTVDKSRWQEGNVFSCSVMHEALHNHYTQKSLSLSLGGGGSGSAHPIPDSSPLLQFGGQVRQRYLYTDDACQTEAHLEIREDGTVGGAADQSPESLLQLKALKPGVIQILGVKTSRFLCQRPDGALYGSLHFDPEACSFRELLLEDGYNVYQSEAHGLPLHLCGNKSPHRDPAPRGPARFLPLPGLPPAPPEPPGILAPQPPDVGSSDPLSMVGSQGRSPSYAS

SEQ ID NO: 1736 - protein, 475 aa, Artificial Sequence
  Fusion Protein
AHGEGTFTSDLSIQLEEEAVQLFIEWLLATGPSSGAPPPSGGGGGGGSGGGGSGGGGSAESKYGPPCPPCPAPEFEGGPSVFLFPPKPKDTLMISRTPEVTCVVVDVSQEDPEVQFNWYVDGVEVHNAKTKPREEQFNSTYRVVSVLTVLHQDWLNGKEYKCKVSNKGLPSSIEKTISKAKGQPREPQVYTLPPSQEEMTKNQVSLTCLVKGFYPSDIAVEWESNGQPENNYKTTPPVLDSDGSFFLYSRLTVDKSRWQEGNVFSCSVMHEALHNHYTQKSLSLSLGGGGSGSAHPIPDSSPLLQFGGQVRQRYLYTDDACQTEAHLEIREDGTVGGAADQSPESLLQLKALKPGVIQILGVKTSRFLCQRPDGALYGSLHFDPEACSFRELLLEDGYNVYQSEAHGLPLHLCGNKSPHRDPAPRGPARFLPLPGLPPAPPEPPGILAPQPPDVGSSDPLSMVYPSQGRSPSYAS

SEQ ID NO: 1737 - protein, 472 aa, Artificial Sequence
  Fusion Protein
AHGEGTFTSDLSIQLEEEAVQLFIEWLLATGPVSGAPPPSGGGGGGGSGGGGSGGGGSADKTHTCPPCPAPEAAGGPSVFLFPPKPKDTLMISRTPEVTCVVVDVSHEDPEVKFNWYVDGVEVHNAKTKPREEQYNSTYRVVSVLTVLHQDWLNGKEYKCKVSNKALPAPIEKTISKAKGQPREPQVYTLPPSRDELTKNQVSLTCLVKGFYPSDIAVEWESNGQPENNYKTTPPVLDSDGSFFLYSKLTVDKSRWQQGNVFSCSVMHEALHNHYTQKSLSLSPGGGGSGSAHPIPDSSPLLQFGGQVRQRYLYTDDACQTEAHLEIREDGTVGGAADQSPESLLQLKALKPGVIQILGVKTSRFLCQRPDGALYGSLHFDPEACSFRELLLEDGYNVYQSEAHGLPLHLPGCKSPHRDPAPRGPARFLPLPGLPPAPPEPPGILAPQPPDVGSSDPLSMVGSQGRSPSYAS

SEQ ID NO: 1738 - protein, 473 aa, Artificial Sequence
  Fusion Protein
AHGEGTFTSDLSIQLEEEAVQLFIEWLLATGPVSGAPPPSGGGGGGGSGGGGSGGGGSADKTHTCPPCPAPEAAGGPSVFLFPPKPKDTLMISRTPEVTCVVVDVSHEDPEVKFNWYVDGVEVHNAKTKPREEQYNSTYRVVSVLTVLHQDWLNGKEYKCKVSNKALPAPIEKTISKAKGQPREPQVYTLPPSRDELTKNQVSLTCLVKGFYPSDIAVEWESNGQPENNYKTTPPVLDSDGSFFLYSKLTVDKSRWQQGNVFSCSVMHEALHNHYTQKSLSLSPGGGGSGSAHPIPDSSPLLQFGGQVRQRYLYTDDACQTEAHLEIREDGTVGGAADQSPESLLQLKALKPGVIQILGVKTSRFLCQRPDGALYGSLHFDPEACSFRELLLEDGYNVYQSEAHGLPLHLPGCKSPHRDPAPRGPARFLPLPGLPPAPPEPPGILAPQPPDVGSSDPLSMVYPSQGRSPSYAS

SEQ ID NO: 1739 - protein, 472 aa, Artificial Sequence
  Fusion Protein
AHGEGTFTSDLSIQLEEEAVQLFIEWLLATGPVSGAPPPSGGGGGGGSGGGGSGGGGSADKTHTCPPCPAPEAAGGPSVFLFPPKPKDTLMISRTPEVTCVVVDVSHEDPEVKFNWYVDGVEVHNAKTKPREEQYNSTYRVVSVLTVLHQDWLNGKEYKCKVSNKALPAPIEKTISKAKGQPREPQVYTLPPSRDELTKNQVSLTCLVKGFYPSDIAVEWESNGQPENNYKTTPPVLDSDGSFFLYSKLTVDKSRWQQGNVFSCSVMHEALHNHYTQKSLSLSPGGGGSGSAHPIPDSSPLLQFGGQVRQRYLYTDDACQTEAHLEIREDGTVGGAADQSPESLLQLKALKPGVIQILGVKTSRFLCQRPDGALYGSLHFDPEACSFRELLLEDGYNVYQSEAHGLPLHLCGNKSPHRDPAPRGPARFLPLPGLPPAPPEPPGILAPQPPDVGSSDPLSMVGSQGRSPSYAS

SEQ ID NO: 1740 - protein, 473 aa, Artificial Sequence
  Fusion Protein
AHGEGTFTSDLSIQLEEEAVQLFIEWLLATGPVSGAPPPSGGGGGGGSGGGGSGGGGSADKTHTCPPCPAPEAAGGPSVFLFPPKPKDTLMISRTPEVTCVVVDVSHEDPEVKFNWYVDGVEVHNAKTKPREEQYNSTYRVVSVLTVLHQDWLNGKEYKCKVSNKALPAPIEKTISKAKGQPREPQVYTLPPSRDELTKNQVSLTCLVKGFYPSDIAVEWESNGQPENNYKTTPPVLDSDGSFFLYSKLTVDKSRWQQGNVFSCSVMHEALHNHYTQKSLSLSPGGGGSGSAHPIPDSSPLLQFGGQVRQRYLYTDDACQTEAHLEIREDGTVGGAADQSPESLLQLKALKPGVIQILGVKTSRFLCQRPDGALYGSLHFDPEACSFRELLLEDGYNVYQSEAHGLPLHLCGNKSPHRDPAPRGPARFLPLPGLPPAPPEPPGILAPQPPDVGSSDPLSMVYPSQGRSPSYAS

SEQ ID NO: 1741 - protein, 472 aa, Artificial Sequence
  Fusion Protein
AHGEGTFTSDLSIQLEEEAVQLFIEWLLATGPVSGAPPPSGGGGGGGSGGGGSGGGGSADKTHTCPPCPAPELLGGPSVFLFPPKPKDTLMISRTPEVTCVVVDVSHEDPEVKFNWYVDGVEVHNAKTKPREEQYNNASRVVSVLTVLHQDWLNGKEYKCKVSNKALPAPIEKTISKAKGQPREPQVYTLPPSRDELTKNQVSLTCLVKGFYPSDIAVEWESNGQPENNYKTTPPVLDSDGSFFLYSKLTVDKSRWQQGNVFSCSVMHEALHNHYTQKSLSLSPGGGGSGSAHPIPDSSPLLQFGGQVRQRYLYTDDACQTEAHLEIREDGTVGGAADQSPESLLQLKALKPGVIQILGVKTSRFLCQRPDGALYGSLHFDPEACSFRELLLEDGYNVYQSEAHGLPLHLPGCKSPHRDPAPRGPARFLPLPGLPPAPPEPPGILAPQPPDVGSSDPLSMVGSQGRSPSYAS

SEQ ID NO: 1742 - protein, 473 aa, Artificial Sequence
  Fusion Protein
AHGEGTFTSDLSIQLEEEAVQLFIEWLLATGPVSGAPPPSGGGGGGGSGGGGSGGGGSADKTHTCPPCPAPELLGGPSVFLFPPKPKDTLMISRTPEVTCVVVDVSHEDPEVKFNWYVDGVEVHNAKTKPREEQYNNASRVVSVLTVLHQDWLNGKEYKCKVSNKALPAPIEKTISKAKGQPREPQVYTLPPSRDELTKNQVSLTCLVKGFYPSDIAVEWESNGQPENNYKTTPPVLDSDGSFFLYSKLTVDKSRWQQGNVFSCSVMHEALHNHYTQKSLSLSPGGGGSGSAHPIPDSSPLLQFGGQVRQRYLYTDDACQTEAHLEIREDGTVGGAADQSPESLLQLKALKPGVIQILGVKTSRFLCQRPDGALYGSLHFDPEACSFRELLLEDGYNVYQSEAHGLPLHLPGCKSPHRDPAPRGPARFLPLPGLPPAPPEPPGILAPQPPDVGSSDPLSMVYPSQGRSPSYAS

SEQ ID NO: 1743 - protein, 472 aa, Artificial Sequence
  Fusion Protein
AHGEGTFTSDLSIQLEEEAVQLFIEWLLATGPVSGAPPPSGGGGGGGSGGGGSGGGGSADKTHTCPPCPAPELLGGPSVFLFPPKPKDTLMISRTPEVTCVVVDVSHEDPEVKFNWYVDGVEVHNAKTKPREEQYNNASRVVSVLTVLHQDWLNGKEYKCKVSNKALPAPIEKTISKAKGQPREPQVYTLPPSRDELTKNQVSLTCLVKGFYPSDIAVEWESNGQPENNYKTTPPVLDSDGSFFLYSKLTVDKSRWQQGNVFSCSVMHEALHNHYTQKSLSLSPGGGGSGSAHPIPDSSPLLQFGGQVRQRYLYTDDACQTEAHLEIREDGTVGGAADQSPESLLQLKALKPGVIQILGVKTSRFLCQRPDGALYGSLHFDPEACSFRELLLEDGYNVYQSEAHGLPLHLCGNKSPHRDPAPRGPARFLPLPGLPPAPPEPPGILAPQPPDVGSSDPLSMVGSQGRSPSYAS

SEQ ID NO: 1744 - protein, 473 aa, Artificial Sequence
  Fusion Protein
AHGEGTFTSDLSIQLEEEAVQLFIEWLLATGPVSGAPPPSGGGGGGGSGGGGSGGGGSADKTHTCPPCPAPELLGGPSVFLFPPKPKDTLMISRTPEVTCVVVDVSHEDPEVKFNWYVDGVEVHNAKTKPREEQYNNASRVVSVLTVLHQDWLNGKEYKCKVSNKALPAPIEKTISKAKGQPREPQVYTLPPSRDELTKNQVSLTCLVKGFYPSDIAVEWESNGQPENNYKTTPPVLDSDGSFFLYSKLTVDKSRWQQGNVFSCSVMHEALHNHYTQKSLSLSPGGGGSGSAHPIPDSSPLLQFGGQVRQRYLYTDDACQTEAHLEIREDGTVGGAADQSPESLLQLKALKPGVIQILGVKTSRFLCQRPDGALYGSLHFDPEACSFRELLLEDGYNVYQSEAHGLPLHLCGNKSPHRDPAPRGPARFLPLPGLPPAPPEPPGILAPQPPDVGSSDPLSMVYPSQGRSPSYAS

SEQ ID NO: 1745 - protein, 474 aa, Artificial Sequence
  Fusion Protein
AHGEGTFTSDLSIQLEEEAVQLFIEWLLATGPVSGAPPPSGGGGGGGSGGGGSGGGGSAESKYGPPCPPCPAPEFEGGPSVFLFPPKPKDTLMISRTPEVTCVVVDVSQEDPEVQFNWYVDGVEVHNAKTKPREEQFNSTYRVVSVLTVLHQDWLNGKEYKCKVSNKGLPSSIEKTISKAKGQPREPQVYTLPPSQEEMTKNQVSLTCLVKGFYPSDIAVEWESNGQPENNYKTTPPVLDSDGSFFLYSRLTVDKSRWQEGNVFSCSVMHEALHNHYTQKSLSLSLGGGGSGSAHPIPDSSPLLQFGGQVRQRYLYTDDACQTEAHLEIREDGTVGGAADQSPESLLQLKALKPGVIQILGVKTSRFLCQRPDGALYGSLHFDPEACSFRELLLEDGYNVYQSEAHGLPLHLPGCKSPHRDPAPRGPARFLPLPGLPPAPPEPPGILAPQPPDVGSSDPLSMVGSQGRSPSYAS

SEQ ID NO: 1746 - protein, 475 aa, Artificial Sequence
  Fusion Protein
AHGEGTFTSDLSIQLEEEAVQLFIEWLLATGPVSGAPPPSGGGGGGGSGGGGSGGGGSAESKYGPPCPPCPAPEFEGGPSVFLFPPKPKDTLMISRTPEVTCVVVDVSQEDPEVQFNWYVDGVEVHNAKTKPREEQFNSTYRVVSVLTVLHQDWLNGKEYKCKVSNKGLPSSIEKTISKAKGQPREPQVYTLPPSQEEMTKNQVSLTCLVKGFYPSDIAVEWESNGQPENNYKTTPPVLDSDGSFFLYSRLTVDKSRWQEGNVFSCSVMHEALHNHYTQKSLSLSLGGGGSGSAHPIPDSSPLLQFGGQVRQRYLYTDDACQTEAHLEIREDGTVGGAADQSPESLLQLKALKPGVIQILGVKTSRFLCQRPDGALYGSLHFDPEACSFRELLLEDGYNVYQSEAHGLPLHLPGCKSPHRDPAPRGPARFLPLPGLPPAPPEPPGILAPQPPDVGSSDPLSMVYPSQGRSPSYAS

SEQ ID NO: 1747 - protein, 474 aa, Artificial Sequence
  Fusion Protein
AHGEGTFTSDLSIQLEEEAVQLFIEWLLATGPVSGAPPPSGGGGGGGSGGGGSGGGGSAESKYGPPCPPCPAPEFEGGPSVFLFPPKPKDTLMISRTPEVTCVVVDVSQEDPEVQFNWYVDGVEVHNAKTKPREEQFNSTYRVVSVLTVLHQDWLNGKEYKCKVSNKGLPSSIEKTISKAKGQPREPQVYTLPPSQEEMTKNQVSLTCLVKGFYPSDIAVEWESNGQPENNYKTTPPVLDSDGSFFLYSRLTVDKSRWQEGNVFSCSVMHEALHNHYTQKSLSLSLGGGGSGSAHPIPDSSPLLQFGGQVRQRYLYTDDACQTEAHLEIREDGTVGGAADQSPESLLQLKALKPGVIQILGVKTSRFLCQRPDGALYGSLHFDPEACSFRELLLEDGYNVYQSEAHGLPLHLCGNKSPHRDPAPRGPARFLPLPGLPPAPPEPPGILAPQPPDVGSSDPLSMVGSQGRSPSYAS

SEQ ID NO: 1748 - protein, 475 aa, Artificial Sequence
  Fusion Protein
AHGEGTFTSDLSIQLEEEAVQLFIEWLLATGPVSGAPPPSGGGGGGGSGGGGSGGGGSAESKYGPPCPPCPAPEFEGGPSVFLFPPKPKDTLMISRTPEVTCVVVDVSQEDPEVQFNWYVDGVEVHNAKTKPREEQFNSTYRVVSVLTVLHQDWLNGKEYKCKVSNKGLPSSIEKTISKAKGQPREPQVYTLPPSQEEMTKNQVSLTCLVKGFYPSDIAVEWESNGQPENNYKTTPPVLDSDGSFFLYSRLTVDKSRWQEGNVFSCSVMHEALHNHYTQKSLSLSLGGGGSGSAHPIPDSSPLLQFGGQVRQRYLYTDDACQTEAHLEIREDGTVGGAADQSPESLLQLKALKPGVIQILGVKTSRFLCQRPDGALYGSLHFDPEACSFRELLLEDGYNVYQSEAHGLPLHLCGNKSPHRDPAPRGPARFLPLPGLPPAPPEPPGILAPQPPDVGSSDPLSMVYPSQGRSPSYAS

SEQ ID NO: 1749 - protein, 472 aa, Artificial Sequence
  Fusion Protein
AHGEGTFTSDLSILLEEEAVREFIEWLLATGPSSGAPPPSGGGGGGGSGGGGSGGGGSADKTHTCPPCPAPEAAGGPSVFLFPPKPKDTLMISRTPEVTCVVVDVSHEDPEVKFNWYVDGVEVHNAKTKPREEQYNSTYRVVSVLTVLHQDWLNGKEYKCKVSNKALPAPIEKTISKAKGQPREPQVYTLPPSRDELTKNQVSLTCLVKGFYPSDIAVEWESNGQPENNYKTTPPVLDSDGSFFLYSKLTVDKSRWQQGNVFSCSVMHEALHNHYTQKSLSLSPGGGGSGSAHPIPDSSPLLQFGGQVRQRYLYTDDACQTEAHLEIREDGTVGGAADQSPESLLQLKALKPGVIQILGVKTSRFLCQRPDGALYGSLHFDPEACSFRELLLEDGYNVYQSEAHGLPLHLPGCKSPHRDPAPRGPARFLPLPGLPPAPPEPPGILAPQPPDVGSSDPLSMVGSQGRSPSYAS

SEQ ID NO: 1750 - protein, 473 aa, Artificial Sequence
  Fusion Protein
AHGEGTFTSDLSILLEEEAVREFIEWLLATGPSSGAPPPSGGGGGGGSGGGGSGGGGSADKTHTCPPCPAPEAAGGPSVFLFPPKPKDTLMISRTPEVTCVVVDVSHEDPEVKFNWYVDGVEVHNAKTKPREEQYNSTYRVVSVLTVLHQDWLNGKEYKCKVSNKALPAPIEKTISKAKGQPREPQVYTLPPSRDELTKNQVSLTCLVKGFYPSDIAVEWESNGQPENNYKTTPPVLDSDGSFFLYSKLTVDKSRWQQGNVFSCSVMHEALHNHYTQKSLSLSPGGGGSGSAHPIPDSSPLLQFGGQVRQRYLYTDDACQTEAHLEIREDGTVGGAADQSPESLLQLKALKPGVIQILGVKTSRFLCQRPDGALYGSLHFDPEACSFRELLLEDGYNVYQSEAHGLPLHLPGCKSPHRDPAPRGPARFLPLPGLPPAPPEPPGILAPQPPDVGSSDPLSMVYPSQGRSPSYAS

SEQ ID NO: 1751 - protein, 472 aa, Artificial Sequence
  Fusion Protein
AHGEGTFTSDLSILLEEEAVREFIEWLLATGPSSGAPPPSGGGGGGGSGGGGSGGGGSADKTHTCPPCPAPEAAGGPSVFLFPPKPKDTLMISRTPEVTCVVVDVSHEDPEVKFNWYVDGVEVHNAKTKPREEQYNSTYRVVSVLTVLHQDWLNGKEYKCKVSNKALPAPIEKTISKAKGQPREPQVYTLPPSRDELTKNQVSLTCLVKGFYPSDIAVEWESNGQPENNYKTTPPVLDSDGSFFLYSKLTVDKSRWQQGNVFSCSVMHEALHNHYTQKSLSLSPGGGGSGSAHPIPDSSPLLQFGGQVRQRYLYTDDACQTEAHLEIREDGTVGGAADQSPESLLQLKALKPGVIQILGVKTSRFLCQRPDGALYGSLHFDPEACSFRELLLEDGYNVYQSEAHGLPLHLCGNKSPHRDPAPRGPARFLPLPGLPPAPPEPPGILAPQPPDVGSSDPLSMVGSQGRSPSYAS

SEQ ID NO: 1752 - protein, 473 aa, Artificial Sequence
  Fusion Protein
AHGEGTFTSDLSILLEEEAVREFIEWLLATGPSSGAPPPSGGGGGGGSGGGGSGGGGSADKTHTCPPCPAPEAAGGPSVFLFPPKPKDTLMISRTPEVTCVVVDVSHEDPEVKFNWYVDGVEVHNAKTKPREEQYNSTYRVVSVLTVLHQDWLNGKEYKCKVSNKALPAPIEKTISKAKGQPREPQVYTLPPSRDELTKNQVSLTCLVKGFYPSDIAVEWESNGQPENNYKTTPPVLDSDGSFFLYSKLTVDKSRWQQGNVFSCSVMHEALHNHYTQKSLSLSPGGGGSGSAHPIPDSSPLLQFGGQVRQRYLYTDDACQTEAHLEIREDGTVGGAADQSPESLLQLKALKPGVIQILGVKTSRFLCQRPDGALYGSLHFDPEACSFRELLLEDGYNVYQSEAHGLPLHLCGNKSPHRDPAPRGPARFLPLPGLPPAPPEPPGILAPQPPDVGSSDPLSMVYPSQGRSPSYAS

SEQ ID NO: 1753 - protein, 472 aa, Artificial Sequence
  Fusion Protein
AHGEGTFTSDLSILLEEEAVREFIEWLLATGPSSGAPPPSGGGGGGGSGGGGSGGGGSADKTHTCPPCPAPELLGGPSVFLFPPKPKDTLMISRTPEVTCVVVDVSHEDPEVKFNWYVDGVEVHNAKTKPREEQYNNASRVVSVLTVLHQDWLNGKEYKCKVSNKALPAPIEKTISKAKGQPREPQVYTLPPSRDELTKNQVSLTCLVKGFYPSDIAVEWESNGQPENNYKTTPPVLDSDGSFFLYSKLTVDKSRWQQGNVFSCSVMHEALHNHYTQKSLSLSPGGGGSGSAHPIPDSSPLLQFGGQVRQRYLYTDDACQTEAHLEIREDGTVGGAADQSPESLLQLKALKPGVIQILGVKTSRFLCQRPDGALYGSLHFDPEACSFRELLLEDGYNVYQSEAHGLPLHLPGCKSPHRDPAPRGPARFLPLPGLPPAPPEPPGILAPQPPDVGSSDPLSMVGSQGRSPSYAS

SEQ ID NO: 1754 - protein, 473 aa, Artificial Sequence
  Fusion Protein
AHGEGTFTSDLSILLEEEAVREFIEWLLATGPSSGAPPPSGGGGGGGSGGGGSGGGGSADKTHTCPPCPAPELLGGPSVFLFPPKPKDTLMISRTPEVTCVVVDVSHEDPEVKFNWYVDGVEVHNAKTKPREEQYNNASRVVSVLTVLHQDWLNGKEYKCKVSNKALPAPIEKTISKAKGQPREPQVYTLPPSRDELTKNQVSLTCLVKGFYPSDIAVEWESNGQPENNYKTTPPVLDSDGSFFLYSKLTVDKSRWQQGNVFSCSVMHEALHNHYTQKSLSLSPGGGGSGSAHPIPDSSPLLQFGGQVRQRYLYTDDACQTEAHLEIREDGTVGGAADQSPESLLQLKALKPGVIQILGVKTSRFLCQRPDGALYGSLHFDPEACSFRELLLEDGYNVYQSEAHGLPLHLPGCKSPHRDPAPRGPARFLPLPGLPPAPPEPPGILAPQPPDVGSSDPLSMVYPSQGRSPSYAS

SEQ ID NO: 1755 - protein, 472 aa, Artificial Sequence
  Fusion Protein
AHGEGTFTSDLSILLEEEAVREFIEWLLATGPSSGAPPPSGGGGGGGSGGGGSGGGGSADKTHTCPPCPAPELLGGPSVFLFPPKPKDTLMISRTPEVTCVVVDVSHEDPEVKFNWYVDGVEVHNAKTKPREEQYNNASRVVSVLTVLHQDWLNGKEYKCKVSNKALPAPIEKTISKAKGQPREPQVYTLPPSRDELTKNQVSLTCLVKGFYPSDIAVEWESNGQPENNYKTTPPVLDSDGSFFLYSKLTVDKSRWQQGNVFSCSVMHEALHNHYTQKSLSLSPGGGGSGSAHPIPDSSPLLQFGGQVRQRYLYTDDACQTEAHLEIREDGTVGGAADQSPESLLQLKALKPGVIQILGVKTSRFLCQRPDGALYGSLHFDPEACSFRELLLEDGYNVYQSEAHGLPLHLCGNKSPHRDPAPRGPARFLPLPGLPPAPPEPPGILAPQPPDVGSSDPLSMVGSQGRSPSYAS

SEQ ID NO: 1756 - protein, 473 aa, Artificial Sequence
  Fusion Protein
AHGEGTFTSDLSILLEEEAVREFIEWLLATGPSSGAPPPSGGGGGGGSGGGGSGGGGSADKTHTCPPCPAPELLGGPSVFLFPPKPKDTLMISRTPEVTCVVVDVSHEDPEVKFNWYVDGVEVHNAKTKPREEQYNNASRVVSVLTVLHQDWLNGKEYKCKVSNKALPAPIEKTISKAKGQPREPQVYTLPPSRDELTKNQVSLTCLVKGFYPSDIAVEWESNGQPENNYKTTPPVLDSDGSFFLYSKLTVDKSRWQQGNVFSCSVMHEALHNHYTQKSLSLSPGGGGSGSAHPIPDSSPLLQFGGQVRQRYLYTDDACQTEAHLEIREDGTVGGAADQSPESLLQLKALKPGVIQILGVKTSRFLCQRPDGALYGSLHFDPEACSFRELLLEDGYNVYQSEAHGLPLHLCGNKSPHRDPAPRGPARFLPLPGLPPAPPEPPGILAPQPPDVGSSDPLSMVYPSQGRSPSYAS

SEQ ID NO: 1757 - protein, 474 aa, Artificial Sequence
  Fusion Protein
AHGEGTFTSDLSILLEEEAVREFIEWLLATGPSSGAPPPSGGGGGGGSGGGGSGGGGSAESKYGPPCPPCPAPEFEGGPSVFLFPPKPKDTLMISRTPEVTCVVVDVSQEDPEVQFNWYVDGVEVHNAKTKPREEQFNSTYRVVSVLTVLHQDWLNGKEYKCKVSNKGLPSSIEKTISKAKGQPREPQVYTLPPSQEEMTKNQVSLTCLVKGFYPSDIAVEWESNGQPENNYKTTPPVLDSDGSFFLYSRLTVDKSRWQEGNVFSCSVMHEALHNHYTQKSLSLSLGGGGSGSAHPIPDSSPLLQFGGQVRQRYLYTDDACQTEAHLEIREDGTVGGAADQSPESLLQLKALKPGVIQILGVKTSRFLCQRPDGALYGSLHFDPEACSFRELLLEDGYNVYQSEAHGLPLHLPGCKSPHRDPAPRGPARFLPLPGLPPAPPEPPGILAPQPPDVGSSDPLSMVGSQGRSPSYAS

SEQ ID NO: 1758 - protein, 475 aa, Artificial Sequence
  Fusion Protein
AHGEGTFTSDLSILLEEEAVREFIEWLLATGPSSGAPPPSGGGGGGGSGGGGSGGGGSAESKYGPPCPPCPAPEFEGGPSVFLFPPKPKDTLMISRTPEVTCVVVDVSQEDPEVQFNWYVDGVEVHNAKTKPREEQFNSTYRVVSVLTVLHQDWLNGKEYKCKVSNKGLPSSIEKTISKAKGQPREPQVYTLPPSQEEMTKNQVSLTCLVKGFYPSDIAVEWESNGQPENNYKTTPPVLDSDGSFFLYSRLTVDKSRWQEGNVFSCSVMHEALHNHYTQKSLSLSLGGGGSGSAHPIPDSSPLLQFGGQVRQRYLYTDDACQTEAHLEIREDGTVGGAADQSPESLLQLKALKPGVIQILGVKTSRFLCQRPDGALYGSLHFDPEACSFRELLLEDGYNVYQSEAHGLPLHLPGCKSPHRDPAPRGPARFLPLPGLPPAPPEPPGILAPQPPDVGSSDPLSMVYPSQGRSPSYAS

SEQ ID NO: 1759 - protein, 474 aa, Artificial Sequence
  Fusion Protein
AHGEGTFTSDLSILLEEEAVREFIEWLLATGPSSGAPPPSGGGGGGGSGGGGSGGGGSAESKYGPPCPPCPAPEFEGGPSVFLFPPKPKDTLMISRTPEVTCVVVDVSQEDPEVQFNWYVDGVEVHNAKTKPREEQFNSTYRVVSVLTVLHQDWLNGKEYKCKVSNKGLPSSIEKTISKAKGQPREPQVYTLPPSQEEMTKNQVSLTCLVKGFYPSDIAVEWESNGQPENNYKTTPPVLDSDGSFFLYSRLTVDKSRWQEGNVFSCSVMHEALHNHYTQKSLSLSLGGGGSGSAHPIPDSSPLLQFGGQVRQRYLYTDDACQTEAHLEIREDGTVGGAADQSPESLLQLKALKPGVIQILGVKTSRFLCQRPDGALYGSLHFDPEACSFRELLLEDGYNVYQSEAHGLPLHLCGNKSPHRDPAPRGPARFLPLPGLPPAPPEPPGILAPQPPDVGSSDPLSMVGSQGRSPSYAS

SEQ ID NO: 1760 - protein, 475 aa, Artificial Sequence
  Fusion Protein
AHGEGTFTSDLSILLEEEAVREFIEWLLATGPSSGAPPPSGGGGGGGSGGGGSGGGGSAESKYGPPCPPCPAPEFEGGPSVFLFPPKPKDTLMISRTPEVTCVVVDVSQEDPEVQFNWYVDGVEVHNAKTKPREEQFNSTYRVVSVLTVLHQDWLNGKEYKCKVSNKGLPSSIEKTISKAKGQPREPQVYTLPPSQEEMTKNQVSLTCLVKGFYPSDIAVEWESNGQPENNYKTTPPVLDSDGSFFLYSRLTVDKSRWQEGNVFSCSVMHEALHNHYTQKSLSLSLGGGGSGSAHPIPDSSPLLQFGGQVRQRYLYTDDACQTEAHLEIREDGTVGGAADQSPESLLQLKALKPGVIQILGVKTSRFLCQRPDGALYGSLHFDPEACSFRELLLEDGYNVYQSEAHGLPLHLCGNKSPHRDPAPRGPARFLPLPGLPPAPPEPPGILAPQPPDVGSSDPLSMVYPSQGRSPSYAS

SEQ ID NO: 1761 - protein, 472 aa, Artificial Sequence
  Fusion Protein
AHGEGTFTSDLSILLEEEAVREFIEWLLATGPVSGAPPPSGGGGGGGSGGGGSGGGGSADKTHTCPPCPAPEAAGGPSVFLFPPKPKDTLMISRTPEVTCVVVDVSHEDPEVKFNWYVDGVEVHNAKTKPREEQYNSTYRVVSVLTVLHQDWLNGKEYKCKVSNKALPAPIEKTISKAKGQPREPQVYTLPPSRDELTKNQVSLTCLVKGFYPSDIAVEWESNGQPENNYKTTPPVLDSDGSFFLYSKLTVDKSRWQQGNVFSCSVMHEALHNHYTQKSLSLSPGGGGSGSAHPIPDSSPLLQFGGQVRQRYLYTDDACQTEAHLEIREDGTVGGAADQSPESLLQLKALKPGVIQILGVKTSRFLCQRPDGALYGSLHFDPEACSFRELLLEDGYNVYQSEAHGLPLHLPGCKSPHRDPAPRGPARFLPLPGLPPAPPEPPGILAPQPPDVGSSDPLSMVGSQGRSPSYAS

SEQ ID NO: 1762 - protein, 473 aa, Artificial Sequence
  Fusion Protein
AHGEGTFTSDLSILLEEEAVREFIEWLLATGPVSGAPPPSGGGGGGGSGGGGSGGGGSADKTHTCPPCPAPEAAGGPSVFLFPPKPKDTLMISRTPEVTCVVVDVSHEDPEVKFNWYVDGVEVHNAKTKPREEQYNSTYRVVSVLTVLHQDWLNGKEYKCKVSNKALPAPIEKTISKAKGQPREPQVYTLPPSRDELTKNQVSLTCLVKGFYPSDIAVEWESNGQPENNYKTTPPVLDSDGSFFLYSKLTVDKSRWQQGNVFSCSVMHEALHNHYTQKSLSLSPGGGGSGSAHPIPDSSPLLQFGGQVRQRYLYTDDACQTEAHLEIREDGTVGGAADQSPESLLQLKALKPGVIQILGVKTSRFLCQRPDGALYGSLHFDPEACSFRELLLEDGYNVYQSEAHGLPLHLPGCKSPHRDPAPRGPARFLPLPGLPPAPPEPPGILAPQPPDVGSSDPLSMVYPSQGRSPSYAS

SEQ ID NO: 1763 - protein, 472 aa, Artificial Sequence
  Fusion Protein
AHGEGTFTSDLSILLEEEAVREFIEWLLATGPVSGAPPPSGGGGGGGSGGGGSGGGGSADKTHTCPPCPAPEAAGGPSVFLFPPKPKDTLMISRTPEVTCVVVDVSHEDPEVKFNWYVDGVEVHNAKTKPREEQYNSTYRVVSVLTVLHQDWLNGKEYKCKVSNKALPAPIEKTISKAKGQPREPQVYTLPPSRDELTKNQVSLTCLVKGFYPSDIAVEWESNGQPENNYKTTPPVLDSDGSFFLYSKLTVDKSRWQQGNVFSCSVMHEALHNHYTQKSLSLSPGGGGSGSAHPIPDSSPLLQFGGQVRQRYLYTDDACQTEAHLEIREDGTVGGAADQSPESLLQLKALKPGVIQILGVKTSRFLCQRPDGALYGSLHFDPEACSFRELLLEDGYNVYQSEAHGLPLHLCGNKSPHRDPAPRGPARFLPLPGLPPAPPEPPGILAPQPPDVGSSDPLSMVGSQGRSPSYAS

SEQ ID NO: 1764 - protein, 473 aa, Artificial Sequence
  Fusion Protein
AHGEGTFTSDLSILLEEEAVREFIEWLLATGPVSGAPPPSGGGGGGGSGGGGSGGGGSADKTHTCPPCPAPEAAGGPSVFLFPPKPKDTLMISRTPEVTCVVVDVSHEDPEVKFNWYVDGVEVHNAKTKPREEQYNSTYRVVSVLTVLHQDWLNGKEYKCKVSNKALPAPIEKTISKAKGQPREPQVYTLPPSRDELTKNQVSLTCLVKGFYPSDIAVEWESNGQPENNYKTTPPVLDSDGSFFLYSKLTVDKSRWQQGNVFSCSVMHEALHNHYTQKSLSLSPGGGGSGSAHPIPDSSPLLQFGGQVRQRYLYTDDACQTEAHLEIREDGTVGGAADQSPESLLQLKALKPGVIQILGVKTSRFLCQRPDGALYGSLHFDPEACSFRELLLEDGYNVYQSEAHGLPLHLCGNKSPHRDPAPRGPARFLPLPGLPPAPPEPPGILAPQPPDVGSSDPLSMVYPSQGRSPSYAS

SEQ ID NO: 1765 - protein, 472 aa, Artificial Sequence
  Fusion Protein
AHGEGTFTSDLSILLEEEAVREFIEWLLATGPVSGAPPPSGGGGGGGSGGGGSGGGGSADKTHTCPPCPAPELLGGPSVFLFPPKPKDTLMISRTPEVTCVVVDVSHEDPEVKFNWYVDGVEVHNAKTKPREEQYNNASRVVSVLTVLHQDWLNGKEYKCKVSNKALPAPIEKTISKAKGQPREPQVYTLPPSRDELTKNQVSLTCLVKGFYPSDIAVEWESNGQPENNYKTTPPVLDSDGSFFLYSKLTVDKSRWQQGNVFSCSVMHEALHNHYTQKSLSLSPGGGGSGSAHPIPDSSPLLQFGGQVRQRYLYTDDACQTEAHLEIREDGTVGGAADQSPESLLQLKALKPGVIQILGVKTSRFLCQRPDGALYGSLHFDPEACSFRELLLEDGYNVYQSEAHGLPLHLPGCKSPHRDPAPRGPARFLPLPGLPPAPPEPPGILAPQPPDVGSSDPLSMVGSQGRSPSYAS

SEQ ID NO: 1766 - protein, 473 aa, Artificial Sequence
  Fusion Protein
AHGEGTFTSDLSILLEEEAVREFIEWLLATGPVSGAPPPSGGGGGGGSGGGGSGGGGSADKTHTCPPCPAPELLGGPSVFLFPPKPKDTLMISRTPEVTCVVVDVSHEDPEVKFNWYVDGVEVHNAKTKPREEQYNNASRVVSVLTVLHQDWLNGKEYKCKVSNKALPAPIEKTISKAKGQPREPQVYTLPPSRDELTKNQVSLTCLVKGFYPSDIAVEWESNGQPENNYKTTPPVLDSDGSFFLYSKLTVDKSRWQQGNVFSCSVMHEALHNHYTQKSLSLSPGGGGSGSAHPIPDSSPLLQFGGQVRQRYLYTDDACQTEAHLEIREDGTVGGAADQSPESLLQLKALKPGVIQILGVKTSRFLCQRPDGALYGSLHFDPEACSFRELLLEDGYNVYQSEAHGLPLHLPGCKSPHRDPAPRGPARFLPLPGLPPAPPEPPGILAPQPPDVGSSDPLSMVYPSQGRSPSYAS

SEQ ID NO: 1767 - protein, 472 aa, Artificial Sequence
  Fusion Protein
AHGEGTFTSDLSILLEEEAVREFIEWLLATGPVSGAPPPSGGGGGGGSGGGGSGGGGSADKTHTCPPCPAPELLGGPSVFLFPPKPKDTLMISRTPEVTCVVVDVSHEDPEVKFNWYVDGVEVHNAKTKPREEQYNNASRVVSVLTVLHQDWLNGKEYKCKVSNKALPAPIEKTISKAKGQPREPQVYTLPPSRDELTKNQVSLTCLVKGFYPSDIAVEWESNGQPENNYKTTPPVLDSDGSFFLYSKLTVDKSRWQQGNVFSCSVMHEALHNHYTQKSLSLSPGGGGSGSAHPIPDSSPLLQFGGQVRQRYLYTDDACQTEAHLEIREDGTVGGAADQSPESLLQLKALKPGVIQILGVKTSRFLCQRPDGALYGSLHFDPEACSFRELLLEDGYNVYQSEAHGLPLHLCGNKSPHRDPAPRGPARFLPLPGLPPAPPEPPGILAPQPPDVGSSDPLSMVGSQGRSPSYAS

SEQ ID NO: 1768 - protein, 473 aa, Artificial Sequence
  Fusion Protein
AHGEGTFTSDLSILLEEEAVREFIEWLLATGPVSGAPPPSGGGGGGGSGGGGSGGGGSADKTHTCPPCPAPELLGGPSVFLFPPKPKDTLMISRTPEVTCVVVDVSHEDPEVKFNWYVDGVEVHNAKTKPREEQYNNASRVVSVLTVLHQDWLNGKEYKCKVSNKALPAPIEKTISKAKGQPREPQVYTLPPSRDELTKNQVSLTCLVKGFYPSDIAVEWESNGQPENNYKTTPPVLDSDGSFFLYSKLTVDKSRWQQGNVFSCSVMHEALHNHYTQKSLSLSPGGGGSGSAHPIPDSSPLLQFGGQVRQRYLYTDDACQTEAHLEIREDGTVGGAADQSPESLLQLKALKPGVIQILGVKTSRFLCQRPDGALYGSLHFDPEACSFRELLLEDGYNVYQSEAHGLPLHLCGNKSPHRDPAPRGPARFLPLPGLPPAPPEPPGILAPQPPDVGSSDPLSMVYPSQGRSPSYAS

SEQ ID NO: 1769 - protein, 474 aa, Artificial Sequence
  Fusion Protein
AHGEGTFTSDLSILLEEEAVREFIEWLLATGPVSGAPPPSGGGGGGGSGGGGSGGGGSAESKYGPPCPPCPAPEFEGGPSVFLFPPKPKDTLMISRTPEVTCVVVDVSQEDPEVQFNWYVDGVEVHNAKTKPREEQFNSTYRVVSVLTVLHQDWLNGKEYKCKVSNKGLPSSIEKTISKAKGQPREPQVYTLPPSQEEMTKNQVSLTCLVKGFYPSDIAVEWESNGQPENNYKTTPPVLDSDGSFFLYSRLTVDKSRWQEGNVFSCSVMHEALHNHYTQKSLSLSLGGGGSGSAHPIPDSSPLLQFGGQVRQRYLYTDDACQTEAHLEIREDGTVGGAADQSPESLLQLKALKPGVIQILGVKTSRFLCQRPDGALYGSLHFDPEACSFRELLLEDGYNVYQSEAHGLPLHLPGCKSPHRDPAPRGPARFLPLPGLPPAPPEPPGILAPQPPDVGSSDPLSMVGSQGRSPSYAS

SEQ ID NO: 1770 - protein, 475 aa, Artificial Sequence
  Fusion Protein
AHGEGTFTSDLSILLEEEAVREFIEWLLATGPVSGAPPPSGGGGGGGSGGGGSGGGGSAESKYGPPCPPCPAPEFEGGPSVFLFPPKPKDTLMISRTPEVTCVVVDVSQEDPEVQFNWYVDGVEVHNAKTKPREEQFNSTYRVVSVLTVLHQDWLNGKEYKCKVSNKGLPSSIEKTISKAKGQPREPQVYTLPPSQEEMTKNQVSLTCLVKGFYPSDIAVEWESNGQPENNYKTTPPVLDSDGSFFLYSRLTVDKSRWQEGNVFSCSVMHEALHNHYTQKSLSLSLGGGGSGSAHPIPDSSPLLQFGGQVRQRYLYTDDACQTEAHLEIREDGTVGGAADQSPESLLQLKALKPGVIQILGVKTSRFLCQRPDGALYGSLHFDPEACSFRELLLEDGYNVYQSEAHGLPLHLPGCKSPHRDPAPRGPARFLPLPGLPPAPPEPPGILAPQPPDVGSSDPLSMVYPSQGRSPSYAS

SEQ ID NO: 1771 - protein, 474 aa, Artificial Sequence
  Fusion Protein
AHGEGTFTSDLSILLEEEAVREFIEWLLATGPVSGAPPPSGGGGGGGSGGGGSGGGGSAESKYGPPCPPCPAPEFEGGPSVFLFPPKPKDTLMISRTPEVTCVVVDVSQEDPEVQFNWYVDGVEVHNAKTKPREEQFNSTYRVVSVLTVLHQDWLNGKEYKCKVSNKGLPSSIEKTISKAKGQPREPQVYTLPPSQEEMTKNQVSLTCLVKGFYPSDIAVEWESNGQPENNYKTTPPVLDSDGSFFLYSRLTVDKSRWQEGNVFSCSVMHEALHNHYTQKSLSLSLGGGGSGSAHPIPDSSPLLQFGGQVRQRYLYTDDACQTEAHLEIREDGTVGGAADQSPESLLQLKALKPGVIQILGVKTSRFLCQRPDGALYGSLHFDPEACSFRELLLEDGYNVYQSEAHGLPLHLCGNKSPHRDPAPRGPARFLPLPGLPPAPPEPPGILAPQPPDVGSSDPLSMVGSQGRSPSYAS

SEQ ID NO: 1772 - protein, 475 aa, Artificial Sequence
  Fusion Protein
AHGEGTFTSDLSILLEEEAVREFIEWLLATGPVSGAPPPSGGGGGGGSGGGGSGGGGSAESKYGPPCPPCPAPEFEGGPSVFLFPPKPKDTLMISRTPEVTCVVVDVSQEDPEVQFNWYVDGVEVHNAKTKPREEQFNSTYRVVSVLTVLHQDWLNGKEYKCKVSNKGLPSSIEKTISKAKGQPREPQVYTLPPSQEEMTKNQVSLTCLVKGFYPSDIAVEWESNGQPENNYKTTPPVLDSDGSFFLYSRLTVDKSRWQEGNVFSCSVMHEALHNHYTQKSLSLSLGGGGSGSAHPIPDSSPLLQFGGQVRQRYLYTDDACQTEAHLEIREDGTVGGAADQSPESLLQLKALKPGVIQILGVKTSRFLCQRPDGALYGSLHFDPEACSFRELLLEDGYNVYQSEAHGLPLHLCGNKSPHRDPAPRGPARFLPLPGLPPAPPEPPGILAPQPPDVGSSDPLSMVYPSQGRSPSYAS

SEQ ID NO: 1773 - protein, 472 aa, Artificial Sequence
  Fusion Protein
AHGEGTFTSDLSILLEEEAVRLFIEWLLATGPVSGAPPPSGGGGGGGSGGGGSGGGGSADKTHTCPPCPAPEAAGGPSVFLFPPKPKDTLMISRTPEVTCVVVDVSHEDPEVKFNWYVDGVEVHNAKTKPREEQYNSTYRVVSVLTVLHQDWLNGKEYKCKVSNKALPAPIEKTISKAKGQPREPQVYTLPPSRDELTKNQVSLTCLVKGFYPSDIAVEWESNGQPENNYKTTPPVLDSDGSFFLYSKLTVDKSRWQQGNVFSCSVMHEALHNHYTQKSLSLSPGGGGSGSAHPIPDSSPLLQFGGQVRQRYLYTDDACQTEAHLEIREDGTVGGAADQSPESLLQLKALKPGVIQILGVKTSRFLCQRPDGALYGSLHFDPEACSFRELLLEDGYNVYQSEAHGLPLHLPGCKSPHRDPAPRGPARFLPLPGLPPAPPEPPGILAPQPPDVGSSDPLSMVGSQGRSPSYAS

SEQ ID NO: 1774 - protein, 473 aa, Artificial Sequence
  Fusion Protein
AHGEGTFTSDLSILLEEEAVRLFIEWLLATGPVSGAPPPSGGGGGGGSGGGGSGGGGSADKTHTCPPCPAPEAAGGPSVFLFPPKPKDTLMISRTPEVTCVVVDVSHEDPEVKFNWYVDGVEVHNAKTKPREEQYNSTYRVVSVLTVLHQDWLNGKEYKCKVSNKALPAPIEKTISKAKGQPREPQVYTLPPSRDELTKNQVSLTCLVKGFYPSDIAVEWESNGQPENNYKTTPPVLDSDGSFFLYSKLTVDKSRWQQGNVFSCSVMHEALHNHYTQKSLSLSPGGGGSGSAHPIPDSSPLLQFGGQVRQRYLYTDDACQTEAHLEIREDGTVGGAADQSPESLLQLKALKPGVIQILGVKTSRFLCQRPDGALYGSLHFDPEACSFRELLLEDGYNVYQSEAHGLPLHLPGCKSPHRDPAPRGPARFLPLPGLPPAPPEPPGILAPQPPDVGSSDPLSMVYPSQGRSPSYAS

SEQ ID NO: 1775 - protein, 472 aa, Artificial Sequence
  Fusion Protein
AHGEGTFTSDLSILLEEEAVRLFIEWLLATGPVSGAPPPSGGGGGGGSGGGGSGGGGSADKTHTCPPCPAPEAAGGPSVFLFPPKPKDTLMISRTPEVTCVVVDVSHEDPEVKFNWYVDGVEVHNAKTKPREEQYNSTYRVVSVLTVLHQDWLNGKEYKCKVSNKALPAPIEKTISKAKGQPREPQVYTLPPSRDELTKNQVSLTCLVKGFYPSDIAVEWESNGQPENNYKTTPPVLDSDGSFFLYSKLTVDKSRWQQGNVFSCSVMHEALHNHYTQKSLSLSPGGGGSGSAHPIPDSSPLLQFGGQVRQRYLYTDDACQTEAHLEIREDGTVGGAADQSPESLLQLKALKPGVIQILGVKTSRFLCQRPDGALYGSLHFDPEACSFRELLLEDGYNVYQSEAHGLPLHLCGNKSPHRDPAPRGPARFLPLPGLPPAPPEPPGILAPQPPDVGSSDPLSMVGSQGRSPSYAS

SEQ ID NO: 1776 - protein, 473 aa, Artificial Sequence
  Fusion Protein
AHGEGTFTSDLSILLEEEAVRLFIEWLLATGPVSGAPPPSGGGGGGGSGGGGSGGGGSADKTHTCPPCPAPEAAGGPSVFLFPPKPKDTLMISRTPEVTCVVVDVSHEDPEVKFNWYVDGVEVHNAKTKPREEQYNSTYRVVSVLTVLHQDWLNGKEYKCKVSNKALPAPIEKTISKAKGQPREPQVYTLPPSRDELTKNQVSLTCLVKGFYPSDIAVEWESNGQPENNYKTTPPVLDSDGSFFLYSKLTVDKSRWQQGNVFSCSVMHEALHNHYTQKSLSLSPGGGGSGSAHPIPDSSPLLQFGGQVRQRYLYTDDACQTEAHLEIREDGTVGGAADQSPESLLQLKALKPGVIQILGVKTSRFLCQRPDGALYGSLHFDPEACSFRELLLEDGYNVYQSEAHGLPLHLCGNKSPHRDPAPRGPARFLPLPGLPPAPPEPPGILAPQPPDVGSSDPLSMVYPSQGRSPSYAS

SEQ ID NO: 1777 - protein, 472 aa, Artificial Sequence
  Fusion Protein
AHGEGTFTSDLSILLEEEAVRLFIEWLLATGPVSGAPPPSGGGGGGGSGGGGSGGGGSADKTHTCPPCPAPELLGGPSVFLFPPKPKDTLMISRTPEVTCVVVDVSHEDPEVKFNWYVDGVEVHNAKTKPREEQYNNASRVVSVLTVLHQDWLNGKEYKCKVSNKALPAPIEKTISKAKGQPREPQVYTLPPSRDELTKNQVSLTCLVKGFYPSDIAVEWESNGQPENNYKTTPPVLDSDGSFFLYSKLTVDKSRWQQGNVFSCSVMHEALHNHYTQKSLSLSPGGGGSGSAHPIPDSSPLLQFGGQVRQRYLYTDDACQTEAHLEIREDGTVGGAADQSPESLLQLKALKPGVIQILGVKTSRFLCQRPDGALYGSLHFDPEACSFRELLLEDGYNVYQSEAHGLPLHLPGCKSPHRDPAPRGPARFLPLPGLPPAPPEPPGILAPQPPDVGSSDPLSMVGSQGRSPSYAS

SEQ ID NO: 1778 - protein, 473 aa, Artificial Sequence
  Fusion Protein
AHGEGTFTSDLSILLEEEAVRLFIEWLLATGPVSGAPPPSGGGGGGGSGGGGSGGGGSADKTHTCPPCPAPELLGGPSVFLFPPKPKDTLMISRTPEVTCVVVDVSHEDPEVKFNWYVDGVEVHNAKTKPREEQYNNASRVVSVLTVLHQDWLNGKEYKCKVSNKALPAPIEKTISKAKGQPREPQVYTLPPSRDELTKNQVSLTCLVKGFYPSDIAVEWESNGQPENNYKTTPPVLDSDGSFFLYSKLTVDKSRWQQGNVFSCSVMHEALHNHYTQKSLSLSPGGGGSGSAHPIPDSSPLLQFGGQVRQRYLYTDDACQTEAHLEIREDGTVGGAADQSPESLLQLKALKPGVIQILGVKTSRFLCQRPDGALYGSLHFDPEACSFRELLLEDGYNVYQSEAHGLPLHLPGCKSPHRDPAPRGPARFLPLPGLPPAPPEPPGILAPQPPDVGSSDPLSMVYPSQGRSPSYAS

SEQ ID NO: 1779 - protein, 472 aa, Artificial Sequence
  Fusion Protein
AHGEGTFTSDLSILLEEEAVRLFIEWLLATGPVSGAPPPSGGGGGGGSGGGGSGGGGSADKTHTCPPCPAPELLGGPSVFLFPPKPKDTLMISRTPEVTCVVVDVSHEDPEVKFNWYVDGVEVHNAKTKPREEQYNNASRVVSVLTVLHQDWLNGKEYKCKVSNKALPAPIEKTISKAKGQPREPQVYTLPPSRDELTKNQVSLTCLVKGFYPSDIAVEWESNGQPENNYKTTPPVLDSDGSFFLYSKLTVDKSRWQQGNVFSCSVMHEALHNHYTQKSLSLSPGGGGSGSAHPIPDSSPLLQFGGQVRQRYLYTDDACQTEAHLEIREDGTVGGAADQSPESLLQLKALKPGVIQILGVKTSRFLCQRPDGALYGSLHFDPEACSFRELLLEDGYNVYQSEAHGLPLHLCGNKSPHRDPAPRGPARFLPLPGLPPAPPEPPGILAPQPPDVGSSDPLSMVGSQGRSPSYAS

SEQ ID NO: 1780 - protein, 473 aa, Artificial Sequence
  Fusion Protein
AHGEGTFTSDLSILLEEEAVRLFIEWLLATGPVSGAPPPSGGGGGGGSGGGGSGGGGSADKTHTCPPCPAPELLGGPSVFLFPPKPKDTLMISRTPEVTCVVVDVSHEDPEVKFNWYVDGVEVHNAKTKPREEQYNNASRVVSVLTVLHQDWLNGKEYKCKVSNKALPAPIEKTISKAKGQPREPQVYTLPPSRDELTKNQVSLTCLVKGFYPSDIAVEWESNGQPENNYKTTPPVLDSDGSFFLYSKLTVDKSRWQQGNVFSCSVMHEALHNHYTQKSLSLSPGGGGSGSAHPIPDSSPLLQFGGQVRQRYLYTDDACQTEAHLEIREDGTVGGAADQSPESLLQLKALKPGVIQILGVKTSRFLCQRPDGALYGSLHFDPEACSFRELLLEDGYNVYQSEAHGLPLHLCGNKSPHRDPAPRGPARFLPLPGLPPAPPEPPGILAPQPPDVGSSDPLSMVYPSQGRSPSYAS

SEQ ID NO: 1781 - protein, 474 aa, Artificial Sequence
  Fusion Protein
AHGEGTFTSDLSILLEEEAVRLFIEWLLATGPVSGAPPPSGGGGGGGSGGGGSGGGGSAESKYGPPCPPCPAPEFEGGPSVFLFPPKPKDTLMISRTPEVTCVVVDVSQEDPEVQFNWYVDGVEVHNAKTKPREEQFNSTYRVVSVLTVLHQDWLNGKEYKCKVSNKGLPSSIEKTISKAKGQPREPQVYTLPPSQEEMTKNQVSLTCLVKGFYPSDIAVEWESNGQPENNYKTTPPVLDSDGSFFLYSRLTVDKSRWQEGNVFSCSVMHEALHNHYTQKSLSLSLGGGGSGSAHPIPDSSPLLQFGGQVRQRYLYTDDACQTEAHLEIREDGTVGGAADQSPESLLQLKALKPGVIQILGVKTSRFLCQRPDGALYGSLHFDPEACSFRELLLEDGYNVYQSEAHGLPLHLPGCKSPHRDPAPRGPARFLPLPGLPPAPPEPPGILAPQPPDVGSSDPLSMVGSQGRSPSYAS

SEQ ID NO: 1782 - protein, 475 aa, Artificial Sequence
  Fusion Protein
AHGEGTFTSDLSILLEEEAVRLFIEWLLATGPVSGAPPPSGGGGGGGSGGGGSGGGGSAESKYGPPCPPCPAPEFEGGPSVFLFPPKPKDTLMISRTPEVTCVVVDVSQEDPEVQFNWYVDGVEVHNAKTKPREEQFNSTYRVVSVLTVLHQDWLNGKEYKCKVSNKGLPSSIEKTISKAKGQPREPQVYTLPPSQEEMTKNQVSLTCLVKGFYPSDIAVEWESNGQPENNYKTTPPVLDSDGSFFLYSRLTVDKSRWQEGNVFSCSVMHEALHNHYTQKSLSLSLGGGGSGSAHPIPDSSPLLQFGGQVRQRYLYTDDACQTEAHLEIREDGTVGGAADQSPESLLQLKALKPGVIQILGVKTSRFLCQRPDGALYGSLHFDPEACSFRELLLEDGYNVYQSEAHGLPLHLPGCKSPHRDPAPRGPARFLPLPGLPPAPPEPPGILAPQPPDVGSSDPLSMVYPSQGRSPSYAS

SEQ ID NO: 1783 - protein, 474 aa, Artificial Sequence
  Fusion Protein
AHGEGTFTSDLSILLEEEAVRLFIEWLLATGPVSGAPPPSGGGGGGGSGGGGSGGGGSAESKYGPPCPPCPAPEFEGGPSVFLFPPKPKDTLMISRTPEVTCVVVDVSQEDPEVQFNWYVDGVEVHNAKTKPREEQFNSTYRVVSVLTVLHQDWLNGKEYKCKVSNKGLPSSIEKTISKAKGQPREPQVYTLPPSQEEMTKNQVSLTCLVKGFYPSDIAVEWESNGQPENNYKTTPPVLDSDGSFFLYSRLTVDKSRWQEGNVFSCSVMHEALHNHYTQKSLSLSLGGGGSGSAHPIPDSSPLLQFGGQVRQRYLYTDDACQTEAHLEIREDGTVGGAADQSPESLLQLKALKPGVIQILGVKTSRFLCQRPDGALYGSLHFDPEACSFRELLLEDGYNVYQSEAHGLPLHLCGNKSPHRDPAPRGPARFLPLPGLPPAPPEPPGILAPQPPDVGSSDPLSMVGSQGRSPSYAS

SEQ ID NO: 1784 - protein, 475 aa, Artificial Sequence
  Fusion Protein
AHGEGTFTSDLSILLEEEAVRLFIEWLLATGPVSGAPPPSGGGGGGGSGGGGSGGGGSAESKYGPPCPPCPAPEFEGGPSVFLFPPKPKDTLMISRTPEVTCVVVDVSQEDPEVQFNWYVDGVEVHNAKTKPREEQFNSTYRVVSVLTVLHQDWLNGKEYKCKVSNKGLPSSIEKTISKAKGQPREPQVYTLPPSQEEMTKNQVSLTCLVKGFYPSDIAVEWESNGQPENNYKTTPPVLDSDGSFFLYSRLTVDKSRWQEGNVFSCSVMHEALHNHYTQKSLSLSLGGGGSGSAHPIPDSSPLLQFGGQVRQRYLYTDDACQTEAHLEIREDGTVGGAADQSPESLLQLKALKPGVIQILGVKTSRFLCQRPDGALYGSLHFDPEACSFRELLLEDGYNVYQSEAHGLPLHLCGNKSPHRDPAPRGPARFLPLPGLPPAPPEPPGILAPQPPDVGSSDPLSMVYPSQGRSPSYAS

SEQ ID NO: 1785 - protein, 472 aa, Artificial Sequence
  Fusion Protein
AHGEGTFTSDLSILLEEEAVQLFIEWLLATGPVSGAPPPSGGGGGGGSGGGGSGGGGSADKTHTCPPCPAPEAAGGPSVFLFPPKPKDTLMISRTPEVTCVVVDVSHEDPEVKFNWYVDGVEVHNAKTKPREEQYNSTYRVVSVLTVLHQDWLNGKEYKCKVSNKALPAPIEKTISKAKGQPREPQVYTLPPSRDELTKNQVSLTCLVKGFYPSDIAVEWESNGQPENNYKTTPPVLDSDGSFFLYSKLTVDKSRWQQGNVFSCSVMHEALHNHYTQKSLSLSPGGGGSGSAHPIPDSSPLLQFGGQVRQRYLYTDDACQTEAHLEIREDGTVGGAADQSPESLLQLKALKPGVIQILGVKTSRFLCQRPDGALYGSLHFDPEACSFRELLLEDGYNVYQSEAHGLPLHLPGCKSPHRDPAPRGPARFLPLPGLPPAPPEPPGILAPQPPDVGSSDPLSMVGSQGRSPSYAS

SEQ ID NO: 1786 - protein, 473 aa, Artificial Sequence
  Fusion Protein
AHGEGTFTSDLSILLEEEAVQLFIEWLLATGPVSGAPPPSGGGGGGGSGGGGSGGGGSADKTHTCPPCPAPEAAGGPSVFLFPPKPKDTLMISRTPEVTCVVVDVSHEDPEVKFNWYVDGVEVHNAKTKPREEQYNSTYRVVSVLTVLHQDWLNGKEYKCKVSNKALPAPIEKTISKAKGQPREPQVYTLPPSRDELTKNQVSLTCLVKGFYPSDIAVEWESNGQPENNYKTTPPVLDSDGSFFLYSKLTVDKSRWQQGNVFSCSVMHEALHNHYTQKSLSLSPGGGGSGSAHPIPDSSPLLQFGGQVRQRYLYTDDACQTEAHLEIREDGTVGGAADQSPESLLQLKALKPGVIQILGVKTSRFLCQRPDGALYGSLHFDPEACSFRELLLEDGYNVYQSEAHGLPLHLPGCKSPHRDPAPRGPARFLPLPGLPPAPPEPPGILAPQPPDVGSSDPLSMVYPSQGRSPSYAS

SEQ ID NO: 1787 - protein, 472 aa, Artificial Sequence
  Fusion Protein
AHGEGTFTSDLSILLEEEAVQLFIEWLLATGPVSGAPPPSGGGGGGGSGGGGSGGGGSADKTHTCPPCPAPEAAGGPSVFLFPPKPKDTLMISRTPEVTCVVVDVSHEDPEVKFNWYVDGVEVHNAKTKPREEQYNSTYRVVSVLTVLHQDWLNGKEYKCKVSNKALPAPIEKTISKAKGQPREPQVYTLPPSRDELTKNQVSLTCLVKGFYPSDIAVEWESNGQPENNYKTTPPVLDSDGSFFLYSKLTVDKSRWQQGNVFSCSVMHEALHNHYTQKSLSLSPGGGGSGSAHPIPDSSPLLQFGGQVRQRYLYTDDACQTEAHLEIREDGTVGGAADQSPESLLQLKALKPGVIQILGVKTSRFLCQRPDGALYGSLHFDPEACSFRELLLEDGYNVYQSEAHGLPLHLCGNKSPHRDPAPRGPARFLPLPGLPPAPPEPPGILAPQPPDVGSSDPLSMVGSQGRSPSYAS

SEQ ID NO: 1788 - protein, 473 aa, Artificial Sequence
  Fusion Protein
AHGEGTFTSDLSILLEEEAVQLFIEWLLATGPVSGAPPPSGGGGGGGSGGGGSGGGGSADKTHTCPPCPAPEAAGGPSVFLFPPKPKDTLMISRTPEVTCVVVDVSHEDPEVKFNWYVDGVEVHNAKTKPREEQYNSTYRVVSVLTVLHQDWLNGKEYKCKVSNKALPAPIEKTISKAKGQPREPQVYTLPPSRDELTKNQVSLTCLVKGFYPSDIAVEWESNGQPENNYKTTPPVLDSDGSFFLYSKLTVDKSRWQQGNVFSCSVMHEALHNHYTQKSLSLSPGGGGSGSAHPIPDSSPLLQFGGQVRQRYLYTDDACQTEAHLEIREDGTVGGAADQSPESLLQLKALKPGVIQILGVKTSRFLCQRPDGALYGSLHFDPEACSFRELLLEDGYNVYQSEAHGLPLHLCGNKSPHRDPAPRGPARFLPLPGLPPAPPEPPGILAPQPPDVGSSDPLSMVYPSQGRSPSYAS

SEQ ID NO: 1789 - protein, 472 aa, Artificial Sequence
  Fusion Protein
AHGEGTFTSDLSILLEEEAVQLFIEWLLATGPVSGAPPPSGGGGGGGSGGGGSGGGGSADKTHTCPPCPAPELLGGPSVFLFPPKPKDTLMISRTPEVTCVVVDVSHEDPEVKFNWYVDGVEVHNAKTKPREEQYNNASRVVSVLTVLHQDWLNGKEYKCKVSNKALPAPIEKTISKAKGQPREPQVYTLPPSRDELTKNQVSLTCLVKGFYPSDIAVEWESNGQPENNYKTTPPVLDSDGSFFLYSKLTVDKSRWQQGNVFSCSVMHEALHNHYTQKSLSLSPGGGGSGSAHPIPDSSPLLQFGGQVRQRYLYTDDACQTEAHLEIREDGTVGGAADQSPESLLQLKALKPGVIQILGVKTSRFLCQRPDGALYGSLHFDPEACSFRELLLEDGYNVYQSEAHGLPLHLPGCKSPHRDPAPRGPARFLPLPGLPPAPPEPPGILAPQPPDVGSSDPLSMVGSQGRSPSYAS

SEQ ID NO: 1790 - protein, 473 aa, Artificial Sequence
  Fusion Protein
AHGEGTFTSDLSILLEEEAVQLFIEWLLATGPVSGAPPPSGGGGGGGSGGGGSGGGGSADKTHTCPPCPAPELLGGPSVFLFPPKPKDTLMISRTPEVTCVVVDVSHEDPEVKFNWYVDGVEVHNAKTKPREEQYNNASRVVSVLTVLHQDWLNGKEYKCKVSNKALPAPIEKTISKAKGQPREPQVYTLPPSRDELTKNQVSLTCLVKGFYPSDIAVEWESNGQPENNYKTTPPVLDSDGSFFLYSKLTVDKSRWQQGNVFSCSVMHEALHNHYTQKSLSLSPGGGGSGSAHPIPDSSPLLQFGGQVRQRYLYTDDACQTEAHLEIREDGTVGGAADQSPESLLQLKALKPGVIQILGVKTSRFLCQRPDGALYGSLHFDPEACSFRELLLEDGYNVYQSEAHGLPLHLPGCKSPHRDPAPRGPARFLPLPGLPPAPPEPPGILAPQPPDVGSSDPLSMVYPSQGRSPSYAS

SEQ ID NO: 1791 - protein, 472 aa, Artificial Sequence
  Fusion Protein
AHGEGTFTSDLSILLEEEAVQLFIEWLLATGPVSGAPPPSGGGGGGGSGGGGSGGGGSADKTHTCPPCPAPELLGGPSVFLFPPKPKDTLMISRTPEVTCVVVDVSHEDPEVKFNWYVDGVEVHNAKTKPREEQYNNASRVVSVLTVLHQDWLNGKEYKCKVSNKALPAPIEKTISKAKGQPREPQVYTLPPSRDELTKNQVSLTCLVKGFYPSDIAVEWESNGQPENNYKTTPPVLDSDGSFFLYSKLTVDKSRWQQGNVFSCSVMHEALHNHYTQKSLSLSPGGGGSGSAHPIPDSSPLLQFGGQVRQRYLYTDDACQTEAHLEIREDGTVGGAADQSPESLLQLKALKPGVIQILGVKTSRFLCQRPDGALYGSLHFDPEACSFRELLLEDGYNVYQSEAHGLPLHLCGNKSPHRDPAPRGPARFLPLPGLPPAPPEPPGILAPQPPDVGSSDPLSMVGSQGRSPSYAS

SEQ ID NO: 1792 - protein, 473 aa, Artificial Sequence
  Fusion Protein
AHGEGTFTSDLSILLEEEAVQLFIEWLLATGPVSGAPPPSGGGGGGGSGGGGSGGGGSADKTHTCPPCPAPELLGGPSVFLFPPKPKDTLMISRTPEVTCVVVDVSHEDPEVKFNWYVDGVEVHNAKTKPREEQYNNASRVVSVLTVLHQDWLNGKEYKCKVSNKALPAPIEKTISKAKGQPREPQVYTLPPSRDELTKNQVSLTCLVKGFYPSDIAVEWESNGQPENNYKTTPPVLDSDGSFFLYSKLTVDKSRWQQGNVFSCSVMHEALHNHYTQKSLSLSPGGGGSGSAHPIPDSSPLLQFGGQVRQRYLYTDDACQTEAHLEIREDGTVGGAADQSPESLLQLKALKPGVIQILGVKTSRFLCQRPDGALYGSLHFDPEACSFRELLLEDGYNVYQSEAHGLPLHLCGNKSPHRDPAPRGPARFLPLPGLPPAPPEPPGILAPQPPDVGSSDPLSMVYPSQGRSPSYAS

SEQ ID NO: 1793 - protein, 474 aa, Artificial Sequence
  Fusion Protein
AHGEGTFTSDLSILLEEEAVQLFIEWLLATGPVSGAPPPSGGGGGGGSGGGGSGGGGSAESKYGPPCPPCPAPEFEGGPSVFLFPPKPKDTLMISRTPEVTCVVVDVSQEDPEVQFNWYVDGVEVHNAKTKPREEQFNSTYRVVSVLTVLHQDWLNGKEYKCKVSNKGLPSSIEKTISKAKGQPREPQVYTLPPSQEEMTKNQVSLTCLVKGFYPSDIAVEWESNGQPENNYKTTPPVLDSDGSFFLYSRLTVDKSRWQEGNVFSCSVMHEALHNHYTQKSLSLSLGGGGSGSAHPIPDSSPLLQFGGQVRQRYLYTDDACQTEAHLEIREDGTVGGAADQSPESLLQLKALKPGVIQILGVKTSRFLCQRPDGALYGSLHFDPEACSFRELLLEDGYNVYQSEAHGLPLHLPGCKSPHRDPAPRGPARFLPLPGLPPAPPEPPGILAPQPPDVGSSDPLSMVGSQGRSPSYAS

SEQ ID NO: 1794 - protein, 475 aa, Artificial Sequence
  Fusion Protein
AHGEGTFTSDLSILLEEEAVQLFIEWLLATGPVSGAPPPSGGGGGGGSGGGGSGGGGSAESKYGPPCPPCPAPEFEGGPSVFLFPPKPKDTLMISRTPEVTCVVVDVSQEDPEVQFNWYVDGVEVHNAKTKPREEQFNSTYRVVSVLTVLHQDWLNGKEYKCKVSNKGLPSSIEKTISKAKGQPREPQVYTLPPSQEEMTKNQVSLTCLVKGFYPSDIAVEWESNGQPENNYKTTPPVLDSDGSFFLYSRLTVDKSRWQEGNVFSCSVMHEALHNHYTQKSLSLSLGGGGSGSAHPIPDSSPLLQFGGQVRQRYLYTDDACQTEAHLEIREDGTVGGAADQSPESLLQLKALKPGVIQILGVKTSRFLCQRPDGALYGSLHFDPEACSFRELLLEDGYNVYQSEAHGLPLHLPGCKSPHRDPAPRGPARFLPLPGLPPAPPEPPGILAPQPPDVGSSDPLSMVYPSQGRSPSYAS

SEQ ID NO: 1795 - protein, 474 aa, Artificial Sequence
  Fusion Protein
AHGEGTFTSDLSILLEEEAVQLFIEWLLATGPVSGAPPPSGGGGGGGSGGGGSGGGGSAESKYGPPCPPCPAPEFEGGPSVFLFPPKPKDTLMISRTPEVTCVVVDVSQEDPEVQFNWYVDGVEVHNAKTKPREEQFNSTYRVVSVLTVLHQDWLNGKEYKCKVSNKGLPSSIEKTISKAKGQPREPQVYTLPPSQEEMTKNQVSLTCLVKGFYPSDIAVEWESNGQPENNYKTTPPVLDSDGSFFLYSRLTVDKSRWQEGNVFSCSVMHEALHNHYTQKSLSLSLGGGGSGSAHPIPDSSPLLQFGGQVRQRYLYTDDACQTEAHLEIREDGTVGGAADQSPESLLQLKALKPGVIQILGVKTSRFLCQRPDGALYGSLHFDPEACSFRELLLEDGYNVYQSEAHGLPLHLCGNKSPHRDPAPRGPARFLPLPGLPPAPPEPPGILAPQPPDVGSSDPLSMVGSQGRSPSYAS

SEQ ID NO: 1796 - protein, 475 aa, Artificial Sequence
  Fusion Protein
AHGEGTFTSDLSILLEEEAVQLFIEWLLATGPVSGAPPPSGGGGGGGSGGGGSGGGGSAESKYGPPCPPCPAPEFEGGPSVFLFPPKPKDTLMISRTPEVTCVVVDVSQEDPEVQFNWYVDGVEVHNAKTKPREEQFNSTYRVVSVLTVLHQDWLNGKEYKCKVSNKGLPSSIEKTISKAKGQPREPQVYTLPPSQEEMTKNQVSLTCLVKGFYPSDIAVEWESNGQPENNYKTTPPVLDSDGSFFLYSRLTVDKSRWQEGNVFSCSVMHEALHNHYTQKSLSLSLGGGGSGSAHPIPDSSPLLQFGGQVRQRYLYTDDACQTEAHLEIREDGTVGGAADQSPESLLQLKALKPGVIQILGVKTSRFLCQRPDGALYGSLHFDPEACSFRELLLEDGYNVYQSEAHGLPLHLCGNKSPHRDPAPRGPARFLPLPGLPPAPPEPPGILAPQPPDVGSSDPLSMVYPSQGRSPSYAS

SEQ ID NO: 1797 - protein, 472 aa, Artificial Sequence
  Fusion Protein
GHGEGTFTSDLSKQMEEEAVRLFIEWLKNGGPSSGAPPPSGGGGGGGSGGGGSGGGGSADKTHTCPPCPAPEAAGGPSVFLFPPKPKDTLMISRTPEVTCVVVDVSHEDPEVKFNWYVDGVEVHNAKTKPREEQYNSTYRVVSVLTVLHQDWLNGKEYKCKVSNKALPAPIEKTISKAKGQPREPQVYTLPPSRDELTKNQVSLTCLVKGFYPSDIAVEWESNGQPENNYKTTPPVLDSDGSFFLYSKLTVDKSRWQQGNVFSCSVMHEALHNHYTQKSLSLSPGGGGSGSAHPIPDSSPLLQFGGQVRQRYLYTDDACQTEAHLEIREDGTVGGAADQSPESLLQLKALKPGVIQILGVKTSRFLCQRPDGALYGSLHFDPEACSFRELLLEDGYNVYQSEAHGLPLHLPGCKSPHRDPAPRGPARFLPLPGLPPAPPEPPGILAPQPPDVGSSDPLSMVGSQGRSPSYAS

SEQ ID NO: 1798 - protein, 473 aa, Artificial Sequence
  Fusion Protein
GHGEGTFTSDLSKQMEEEAVRLFIEWLKNGGPSSGAPPPSGGGGGGGSGGGGSGGGGSADKTHTCPPCPAPEAAGGPSVFLFPPKPKDTLMISRTPEVTCVVVDVSHEDPEVKFNWYVDGVEVHNAKTKPREEQYNSTYRVVSVLTVLHQDWLNGKEYKCKVSNKALPAPIEKTISKAKGQPREPQVYTLPPSRDELTKNQVSLTCLVKGFYPSDIAVEWESNGQPENNYKTTPPVLDSDGSFFLYSKLTVDKSRWQQGNVFSCSVMHEALHNHYTQKSLSLSPGGGGSGSAHPIPDSSPLLQFGGQVRQRYLYTDDACQTEAHLEIREDGTVGGAADQSPESLLQLKALKPGVIQILGVKTSRFLCQRPDGALYGSLHFDPEACSFRELLLEDGYNVYQSEAHGLPLHLPGCKSPHRDPAPRGPARFLPLPGLPPAPPEPPGILAPQPPDVGSSDPLSMVYPSQGRSPSYAS

SEQ ID NO: 1799 - protein, 472 aa, Artificial Sequence
  Fusion Protein
GHGEGTFTSDLSKQMEEEAVRLFIEWLKNGGPSSGAPPPSGGGGGGGSGGGGSGGGGSADKTHTCPPCPAPEAAGGPSVFLFPPKPKDTLMISRTPEVTCVVVDVSHEDPEVKFNWYVDGVEVHNAKTKPREEQYNSTYRVVSVLTVLHQDWLNGKEYKCKVSNKALPAPIEKTISKAKGQPREPQVYTLPPSRDELTKNQVSLTCLVKGFYPSDIAVEWESNGQPENNYKTTPPVLDSDGSFFLYSKLTVDKSRWQQGNVFSCSVMHEALHNHYTQKSLSLSPGGGGSGSAHPIPDSSPLLQFGGQVRQRYLYTDDACQTEAHLEIREDGTVGGAADQSPESLLQLKALKPGVIQILGVKTSRFLCQRPDGALYGSLHFDPEACSFRELLLEDGYNVYQSEAHGLPLHLCGNKSPHRDPAPRGPARFLPLPGLPPAPPEPPGILAPQPPDVGSSDPLSMVGSQGRSPSYAS

SEQ ID NO: 1800 - protein, 473 aa, Artificial Sequence
  Fusion Protein
GHGEGTFTSDLSKQMEEEAVRLFIEWLKNGGPSSGAPPPSGGGGGGGSGGGGSGGGGSADKTHTCPPCPAPEAAGGPSVFLFPPKPKDTLMISRTPEVTCVVVDVSHEDPEVKFNWYVDGVEVHNAKTKPREEQYNSTYRVVSVLTVLHQDWLNGKEYKCKVSNKALPAPIEKTISKAKGQPREPQVYTLPPSRDELTKNQVSLTCLVKGFYPSDIAVEWESNGQPENNYKTTPPVLDSDGSFFLYSKLTVDKSRWQQGNVFSCSVMHEALHNHYTQKSLSLSPGGGGSGSAHPIPDSSPLLQFGGQVRQRYLYTDDACQTEAHLEIREDGTVGGAADQSPESLLQLKALKPGVIQILGVKTSRFLCQRPDGALYGSLHFDPEACSFRELLLEDGYNVYQSEAHGLPLHLCGNKSPHRDPAPRGPARFLPLPGLPPAPPEPPGILAPQPPDVGSSDPLSMVYPSQGRSPSYAS

SEQ ID NO: 1801 - protein, 472 aa, Artificial Sequence
  Fusion Protein
GHGEGTFTSDLSKQMEEEAVRLFIEWLKNGGPSSGAPPPSGGGGGGGSGGGGSGGGGSADKTHTCPPCPAPELLGGPSVFLFPPKPKDTLMISRTPEVTCVVVDVSHEDPEVKFNWYVDGVEVHNAKTKPREEQYNNASRVVSVLTVLHQDWLNGKEYKCKVSNKALPAPIEKTISKAKGQPREPQVYTLPPSRDELTKNQVSLTCLVKGFYPSDIAVEWESNGQPENNYKTTPPVLDSDGSFFLYSKLTVDKSRWQQGNVFSCSVMHEALHNHYTQKSLSLSPGGGGSGSAHPIPDSSPLLQFGGQVRQRYLYTDDACQTEAHLEIREDGTVGGAADQSPESLLQLKALKPGVIQILGVKTSRFLCQRPDGALYGSLHFDPEACSFRELLLEDGYNVYQSEAHGLPLHLPGCKSPHRDPAPRGPARFLPLPGLPPAPPEPPGILAPQPPDVGSSDPLSMVGSQGRSPSYAS

SEQ ID NO: 1802 - protein, 473 aa, Artificial Sequence
  Fusion Protein
GHGEGTFTSDLSKQMEEEAVRLFIEWLKNGGPSSGAPPPSGGGGGGGSGGGGSGGGGSADKTHTCPPCPAPELLGGPSVFLFPPKPKDTLMISRTPEVTCVVVDVSHEDPEVKFNWYVDGVEVHNAKTKPREEQYNNASRVVSVLTVLHQDWLNGKEYKCKVSNKALPAPIEKTISKAKGQPREPQVYTLPPSRDELTKNQVSLTCLVKGFYPSDIAVEWESNGQPENNYKTTPPVLDSDGSFFLYSKLTVDKSRWQQGNVFSCSVMHEALHNHYTQKSLSLSPGGGGSGSAHPIPDSSPLLQFGGQVRQRYLYTDDACQTEAHLEIREDGTVGGAADQSPESLLQLKALKPGVIQILGVKTSRFLCQRPDGALYGSLHFDPEACSFRELLLEDGYNVYQSEAHGLPLHLPGCKSPHRDPAPRGPARFLPLPGLPPAPPEPPGILAPQPPDVGSSDPLSMVYPSQGRSPSYAS

SEQ ID NO: 1803 - protein, 472 aa, Artificial Sequence
  Fusion Protein
GHGEGTFTSDLSKQMEEEAVRLFIEWLKNGGPSSGAPPPSGGGGGGGSGGGGSGGGGSADKTHTCPPCPAPELLGGPSVFLFPPKPKDTLMISRTPEVTCVVVDVSHEDPEVKFNWYVDGVEVHNAKTKPREEQYNNASRVVSVLTVLHQDWLNGKEYKCKVSNKALPAPIEKTISKAKGQPREPQVYTLPPSRDELTKNQVSLTCLVKGFYPSDIAVEWESNGQPENNYKTTPPVLDSDGSFFLYSKLTVDKSRWQQGNVFSCSVMHEALHNHYTQKSLSLSPGGGGSGSAHPIPDSSPLLQFGGQVRQRYLYTDDACQTEAHLEIREDGTVGGAADQSPESLLQLKALKPGVIQILGVKTSRFLCQRPDGALYGSLHFDPEACSFRELLLEDGYNVYQSEAHGLPLHLCGNKSPHRDPAPRGPARFLPLPGLPPAPPEPPGILAPQPPDVGSSDPLSMVGSQGRSPSYAS

SEQ ID NO: 1804 - protein, 473 aa, Artificial Sequence
  Fusion Protein
GHGEGTFTSDLSKQMEEEAVRLFIEWLKNGGPSSGAPPPSGGGGGGGSGGGGSGGGGSADKTHTCPPCPAPELLGGPSVFLFPPKPKDTLMISRTPEVTCVVVDVSHEDPEVKFNWYVDGVEVHNAKTKPREEQYNNASRVVSVLTVLHQDWLNGKEYKCKVSNKALPAPIEKTISKAKGQPREPQVYTLPPSRDELTKNQVSLTCLVKGFYPSDIAVEWESNGQPENNYKTTPPVLDSDGSFFLYSKLTVDKSRWQQGNVFSCSVMHEALHNHYTQKSLSLSPGGGGSGSAHPIPDSSPLLQFGGQVRQRYLYTDDACQTEAHLEIREDGTVGGAADQSPESLLQLKALKPGVIQILGVKTSRFLCQRPDGALYGSLHFDPEACSFRELLLEDGYNVYQSEAHGLPLHLCGNKSPHRDPAPRGPARFLPLPGLPPAPPEPPGILAPQPPDVGSSDPLSMVYPSQGRSPSYAS

SEQ ID NO: 1805 - protein, 475 aa, Artificial Sequence
  Fusion Protein
GHGEGTFTSDLSKQMEEEAVRLFIEWLKNGGPSSGAPPPSGGGGGGGSGGGGSGGGGSAESKYGPPCPPCPAPEFEGGPSVFLFPPKPKDTLMISRTPEVTCVVVDVSQEDPEVQFNWYVDGVEVHNAKTKPREEQFNSTYRVVSVLTVLHQDWLNGKEYKCKVSNKGLPSSIEKTISKAKGQPREPQVYTLPPSQEEMTKNQVSLTCLVKGFYPSDIAVEWESNGQPENNYKTTPPVLDSDGSFFLYSRLTVDKSRWQEGNVFSCSVMHEALHNHYTQKSLSLSLGGGGSGSAHPIPDSSPLLQFGGQVRQRYLYTDDACQTEAHLEIREDGTVGGAADQSPESLLQLKALKPGVIQILGVKTSRFLCQRPDGALYGSLHFDPEACSFRELLLEDGYNVYQSEAHGLPLHLPGCKSPHRDPAPRGPARFLPLPGLPPAPPEPPGILAPQPPDVGSSDPLSMVYPSQGRSPSYAS

SEQ ID NO: 1806 - protein, 474 aa, Artificial Sequence
  Fusion Protein
GHGEGTFTSDLSKQMEEEAVRLFIEWLKNGGPSSGAPPPSGGGGGGGSGGGGSGGGGSAESKYGPPCPPCPAPEFEGGPSVFLFPPKPKDTLMISRTPEVTCVVVDVSQEDPEVQFNWYVDGVEVHNAKTKPREEQFNSTYRVVSVLTVLHQDWLNGKEYKCKVSNKGLPSSIEKTISKAKGQPREPQVYTLPPSQEEMTKNQVSLTCLVKGFYPSDIAVEWESNGQPENNYKTTPPVLDSDGSFFLYSRLTVDKSRWQEGNVFSCSVMHEALHNHYTQKSLSLSLGGGGSGSAHPIPDSSPLLQFGGQVRQRYLYTDDACQTEAHLEIREDGTVGGAADQSPESLLQLKALKPGVIQILGVKTSRFLCQRPDGALYGSLHFDPEACSFRELLLEDGYNVYQSEAHGLPLHLCGNKSPHRDPAPRGPARFLPLPGLPPAPPEPPGILAPQPPDVGSSDPLSMVGSQGRSPSYAS

SEQ ID NO: 1807 - protein, 475 aa, Artificial Sequence
  Fusion Protein
GHGEGTFTSDLSKQMEEEAVRLFIEWLKNGGPSSGAPPPSGGGGGGGSGGGGSGGGGSAESKYGPPCPPCPAPEFEGGPSVFLFPPKPKDTLMISRTPEVTCVVVDVSQEDPEVQFNWYVDGVEVHNAKTKPREEQFNSTYRVVSVLTVLHQDWLNGKEYKCKVSNKGLPSSIEKTISKAKGQPREPQVYTLPPSQEEMTKNQVSLTCLVKGFYPSDIAVEWESNGQPENNYKTTPPVLDSDGSFFLYSRLTVDKSRWQEGNVFSCSVMHEALHNHYTQKSLSLSLGGGGSGSAHPIPDSSPLLQFGGQVRQRYLYTDDACQTEAHLEIREDGTVGGAADQSPESLLQLKALKPGVIQILGVKTSRFLCQRPDGALYGSLHFDPEACSFRELLLEDGYNVYQSEAHGLPLHLCGNKSPHRDPAPRGPARFLPLPGLPPAPPEPPGILAPQPPDVGSSDPLSMVYPSQGRSPSYAS

SEQ ID NO: 1808 - protein, 472 aa, Artificial Sequence
  Fusion Protein
AHGEGTFTSDLSILLDEEAVREFIEWLLATGPVSGAPPPSGGGGGGGSGGGGSGGGGSADKTHTCPPCPAPEAAGGPSVFLFPPKPKDTLMISRTPEVTCVVVDVSHEDPEVKFNWYVDGVEVHNAKTKPREEQYNSTYRVVSVLTVLHQDWLNGKEYKCKVSNKALPAPIEKTISKAKGQPREPQVYTLPPSRDELTKNQVSLTCLVKGFYPSDIAVEWESNGQPENNYKTTPPVLDSDGSFFLYSKLTVDKSRWQQGNVFSCSVMHEALHNHYTQKSLSLSPGGGGSGSAHPIPDSSPLLQFGGQVRQRYLYTDDACQTEAHLEIREDGTVGGAADQSPESLLQLKALKPGVIQILGVKTSRFLCQRPDGALYGSLHFDPEACSFRELLLEDGYNVYQSEAHGLPLHLPGCKSPHRDPAPRGPARFLPLPGLPPAPPEPPGILAPQPPDVGSSDPLSMVGSQGRSPSYAS

SEQ ID NO: 1809 - protein, 473 aa, Artificial Sequence
  Fusion Protein
AHGEGTFTSDLSILLDEEAVREFIEWLLATGPVSGAPPPSGGGGGGGSGGGGSGGGGSADKTHTCPPCPAPEAAGGPSVFLFPPKPKDTLMISRTPEVTCVVVDVSHEDPEVKFNWYVDGVEVHNAKTKPREEQYNSTYRVVSVLTVLHQDWLNGKEYKCKVSNKALPAPIEKTISKAKGQPREPQVYTLPPSRDELTKNQVSLTCLVKGFYPSDIAVEWESNGQPENNYKTTPPVLDSDGSFFLYSKLTVDKSRWQQGNVFSCSVMHEALHNHYTQKSLSLSPGGGGSGSAHPIPDSSPLLQFGGQVRQRYLYTDDACQTEAHLEIREDGTVGGAADQSPESLLQLKALKPGVIQILGVKTSRFLCQRPDGALYGSLHFDPEACSFRELLLEDGYNVYQSEAHGLPLHLPGCKSPHRDPAPRGPARFLPLPGLPPAPPEPPGILAPQPPDVGSSDPLSMVYPSQGRSPSYAS

SEQ ID NO: 1810 - protein, 472 aa, Artificial Sequence
  Fusion Protein
AHGEGTFTSDLSILLDEEAVREFIEWLLATGPVSGAPPPSGGGGGGGSGGGGSGGGGSADKTHTCPPCPAPEAAGGPSVFLFPPKPKDTLMISRTPEVTCVVVDVSHEDPEVKFNWYVDGVEVHNAKTKPREEQYNSTYRVVSVLTVLHQDWLNGKEYKCKVSNKALPAPIEKTISKAKGQPREPQVYTLPPSRDELTKNQVSLTCLVKGFYPSDIAVEWESNGQPENNYKTTPPVLDSDGSFFLYSKLTVDKSRWQQGNVFSCSVMHEALHNHYTQKSLSLSPGGGGSGSAHPIPDSSPLLQFGGQVRQRYLYTDDACQTEAHLEIREDGTVGGAADQSPESLLQLKALKPGVIQILGVKTSRFLCQRPDGALYGSLHFDPEACSFRELLLEDGYNVYQSEAHGLPLHLCGNKSPHRDPAPRGPARFLPLPGLPPAPPEPPGILAPQPPDVGSSDPLSMVGSQGRSPSYAS

SEQ ID NO: 1811 - protein, 473 aa, Artificial Sequence
  Fusion Protein
AHGEGTFTSDLSILLDEEAVREFIEWLLATGPVSGAPPPSGGGGGGGSGGGGSGGGGSADKTHTCPPCPAPEAAGGPSVFLFPPKPKDTLMISRTPEVTCVVVDVSHEDPEVKFNWYVDGVEVHNAKTKPREEQYNSTYRVVSVLTVLHQDWLNGKEYKCKVSNKALPAPIEKTISKAKGQPREPQVYTLPPSRDELTKNQVSLTCLVKGFYPSDIAVEWESNGQPENNYKTTPPVLDSDGSFFLYSKLTVDKSRWQQGNVFSCSVMHEALHNHYTQKSLSLSPGGGGSGSAHPIPDSSPLLQFGGQVRQRYLYTDDACQTEAHLEIREDGTVGGAADQSPESLLQLKALKPGVIQILGVKTSRFLCQRPDGALYGSLHFDPEACSFRELLLEDGYNVYQSEAHGLPLHLCGNKSPHRDPAPRGPARFLPLPGLPPAPPEPPGILAPQPPDVGSSDPLSMVYPSQGRSPSYAS

SEQ ID NO: 1812 - protein, 472 aa, Artificial Sequence
  Fusion Protein
AHGEGTFTSDLSILLDEEAVREFIEWLLATGPVSGAPPPSGGGGGGGSGGGGSGGGGSADKTHTCPPCPAPELLGGPSVFLFPPKPKDTLMISRTPEVTCVVVDVSHEDPEVKFNWYVDGVEVHNAKTKPREEQYNNASRVVSVLTVLHQDWLNGKEYKCKVSNKALPAPIEKTISKAKGQPREPQVYTLPPSRDELTKNQVSLTCLVKGFYPSDIAVEWESNGQPENNYKTTPPVLDSDGSFFLYSKLTVDKSRWQQGNVFSCSVMHEALHNHYTQKSLSLSPGGGGSGSAHPIPDSSPLLQFGGQVRQRYLYTDDACQTEAHLEIREDGTVGGAADQSPESLLQLKALKPGVIQILGVKTSRFLCQRPDGALYGSLHFDPEACSFRELLLEDGYNVYQSEAHGLPLHLPGCKSPHRDPAPRGPARFLPLPGLPPAPPEPPGILAPQPPDVGSSDPLSMVGSQGRSPSYAS

SEQ ID NO: 1813 - protein, 473 aa, Artificial Sequence
  Fusion Protein
AHGEGTFTSDLSILLDEEAVREFIEWLLATGPVSGAPPPSGGGGGGGSGGGGSGGGGSADKTHTCPPCPAPELLGGPSVFLFPPKPKDTLMISRTPEVTCVVVDVSHEDPEVKFNWYVDGVEVHNAKTKPREEQYNNASRVVSVLTVLHQDWLNGKEYKCKVSNKALPAPIEKTISKAKGQPREPQVYTLPPSRDELTKNQVSLTCLVKGFYPSDIAVEWESNGQPENNYKTTPPVLDSDGSFFLYSKLTVDKSRWQQGNVFSCSVMHEALHNHYTQKSLSLSPGGGGSGSAHPIPDSSPLLQFGGQVRQRYLYTDDACQTEAHLEIREDGTVGGAADQSPESLLQLKALKPGVIQILGVKTSRFLCQRPDGALYGSLHFDPEACSFRELLLEDGYNVYQSEAHGLPLHLPGCKSPHRDPAPRGPARFLPLPGLPPAPPEPPGILAPQPPDVGSSDPLSMVYPSQGRSPSYAS

SEQ ID NO: 1814 - protein, 472 aa, Artificial Sequence
  Fusion Protein
AHGEGTFTSDLSILLDEEAVREFIEWLLATGPVSGAPPPSGGGGGGGSGGGGSGGGGSADKTHTCPPCPAPELLGGPSVFLFPPKPKDTLMISRTPEVTCVVVDVSHEDPEVKFNWYVDGVEVHNAKTKPREEQYNNASRVVSVLTVLHQDWLNGKEYKCKVSNKALPAPIEKTISKAKGQPREPQVYTLPPSRDELTKNQVSLTCLVKGFYPSDIAVEWESNGQPENNYKTTPPVLDSDGSFFLYSKLTVDKSRWQQGNVFSCSVMHEALHNHYTQKSLSLSPGGGGSGSAHPIPDSSPLLQFGGQVRQRYLYTDDACQTEAHLEIREDGTVGGAADQSPESLLQLKALKPGVIQILGVKTSRFLCQRPDGALYGSLHFDPEACSFRELLLEDGYNVYQSEAHGLPLHLCGNKSPHRDPAPRGPARFLPLPGLPPAPPEPPGILAPQPPDVGSSDPLSMVGSQGRSPSYAS

SEQ ID NO: 1815 - protein, 473 aa, Artificial Sequence
  Fusion Protein
AHGEGTFTSDLSILLDEEAVREFIEWLLATGPVSGAPPPSGGGGGGGSGGGGSGGGGSADKTHTCPPCPAPELLGGPSVFLFPPKPKDTLMISRTPEVTCVVVDVSHEDPEVKFNWYVDGVEVHNAKTKPREEQYNNASRVVSVLTVLHQDWLNGKEYKCKVSNKALPAPIEKTISKAKGQPREPQVYTLPPSRDELTKNQVSLTCLVKGFYPSDIAVEWESNGQPENNYKTTPPVLDSDGSFFLYSKLTVDKSRWQQGNVFSCSVMHEALHNHYTQKSLSLSPGGGGSGSAHPIPDSSPLLQFGGQVRQRYLYTDDACQTEAHLEIREDGTVGGAADQSPESLLQLKALKPGVIQILGVKTSRFLCQRPDGALYGSLHFDPEACSFRELLLEDGYNVYQSEAHGLPLHLCGNKSPHRDPAPRGPARFLPLPGLPPAPPEPPGILAPQPPDVGSSDPLSMVYPSQGRSPSYAS

SEQ ID NO: 1816 - protein, 474 aa, Artificial Sequence
  Fusion Protein
AHGEGTFTSDLSILLDEEAVREFIEWLLATGPVSGAPPPSGGGGGGGSGGGGSGGGGSAESKYGPPCPPCPAPEFEGGPSVFLFPPKPKDTLMISRTPEVTCVVVDVSQEDPEVQFNWYVDGVEVHNAKTKPREEQFNSTYRVVSVLTVLHQDWLNGKEYKCKVSNKGLPSSIEKTISKAKGQPREPQVYTLPPSQEEMTKNQVSLTCLVKGFYPSDIAVEWESNGQPENNYKTTPPVLDSDGSFFLYSRLTVDKSRWQEGNVFSCSVMHEALHNHYTQKSLSLSLGGGGSGSAHPIPDSSPLLQFGGQVRQRYLYTDDACQTEAHLEIREDGTVGGAADQSPESLLQLKALKPGVIQILGVKTSRFLCQRPDGALYGSLHFDPEACSFRELLLEDGYNVYQSEAHGLPLHLPGCKSPHRDPAPRGPARFLPLPGLPPAPPEPPGILAPQPPDVGSSDPLSMVGSQGRSPSYAS

SEQ ID NO: 1817 - protein, 475 aa, Artificial Sequence
  Fusion Protein
AHGEGTFTSDLSILLDEEAVREFIEWLLATGPVSGAPPPSGGGGGGGSGGGGSGGGGSAESKYGPPCPPCPAPEFEGGPSVFLFPPKPKDTLMISRTPEVTCVVVDVSQEDPEVQFNWYVDGVEVHNAKTKPREEQFNSTYRVVSVLTVLHQDWLNGKEYKCKVSNKGLPSSIEKTISKAKGQPREPQVYTLPPSQEEMTKNQVSLTCLVKGFYPSDIAVEWESNGQPENNYKTTPPVLDSDGSFFLYSRLTVDKSRWQEGNVFSCSVMHEALHNHYTQKSLSLSLGGGGSGSAHPIPDSSPLLQFGGQVRQRYLYTDDACQTEAHLEIREDGTVGGAADQSPESLLQLKALKPGVIQILGVKTSRFLCQRPDGALYGSLHFDPEACSFRELLLEDGYNVYQSEAHGLPLHLPGCKSPHRDPAPRGPARFLPLPGLPPAPPEPPGILAPQPPDVGSSDPLSMVYPSQGRSPSYAS

SEQ ID NO: 1818 - protein, 474 aa, Artificial Sequence
  Fusion Protein
AHGEGTFTSDLSILLDEEAVREFIEWLLATGPVSGAPPPSGGGGGGGSGGGGSGGGGSAESKYGPPCPPCPAPEFEGGPSVFLFPPKPKDTLMISRTPEVTCVVVDVSQEDPEVQFNWYVDGVEVHNAKTKPREEQFNSTYRVVSVLTVLHQDWLNGKEYKCKVSNKGLPSSIEKTISKAKGQPREPQVYTLPPSQEEMTKNQVSLTCLVKGFYPSDIAVEWESNGQPENNYKTTPPVLDSDGSFFLYSRLTVDKSRWQEGNVFSCSVMHEALHNHYTQKSLSLSLGGGGSGSAHPIPDSSPLLQFGGQVRQRYLYTDDACQTEAHLEIREDGTVGGAADQSPESLLQLKALKPGVIQILGVKTSRFLCQRPDGALYGSLHFDPEACSFRELLLEDGYNVYQSEAHGLPLHLCGNKSPHRDPAPRGPARFLPLPGLPPAPPEPPGILAPQPPDVGSSDPLSMVGSQGRSPSYAS

SEQ ID NO: 1819 - protein, 475 aa, Artificial Sequence
  Fusion Protein
AHGEGTFTSDLSILLDEEAVREFIEWLLATGPVSGAPPPSGGGGGGGSGGGGSGGGGSAESKYGPPCPPCPAPEFEGGPSVFLFPPKPKDTLMISRTPEVTCVVVDVSQEDPEVQFNWYVDGVEVHNAKTKPREEQFNSTYRVVSVLTVLHQDWLNGKEYKCKVSNKGLPSSIEKTISKAKGQPREPQVYTLPPSQEEMTKNQVSLTCLVKGFYPSDIAVEWESNGQPENNYKTTPPVLDSDGSFFLYSRLTVDKSRWQEGNVFSCSVMHEALHNHYTQKSLSLSLGGGGSGSAHPIPDSSPLLQFGGQVRQRYLYTDDACQTEAHLEIREDGTVGGAADQSPESLLQLKALKPGVIQILGVKTSRFLCQRPDGALYGSLHFDPEACSFRELLLEDGYNVYQSEAHGLPLHLCGNKSPHRDPAPRGPARFLPLPGLPPAPPEPPGILAPQPPDVGSSDPLSMVYPSQGRSPSYAS

SEQ ID NO: 1820 - protein, 471 aa, Artificial Sequence
  Fusion Protein
HGEGTFTSDLSKQLEEEAVQLFIEWLLNGGPSSGAPPPEGGGGGGGSGGGGSGGGGSADKTHTCPPCPAPEAAGGPSVFLFPPKPKDTLMISRTPEVTCVVVDVSHEDPEVKFNWYVDGVEVHNAKTKPREEQYNSTYRVVSVLTVLHQDWLNGKEYKCKVSNKALPAPIEKTISKAKGQPREPQVYTLPPSRDELTKNQVSLTCLVKGFYPSDIAVEWESNGQPENNYKTTPPVLDSDGSFFLYSKLTVDKSRWQQGNVFSCSVMHEALHNHYTQKSLSLSPGGGGSGSAHPIPDSSPLLQFGGQVRQRYLYTDDACQTEAHLEIREDGTVGGAADQSPESLLQLKALKPGVIQILGVKTSRFLCQRPDGALYGSLHFDPEACSFRELLLEDGYNVYQSEAHGLPLHLPGCKSPHRDPAPRGPARFLPLPGLPPAPPEPPGILAPQPPDVGSSDPLSMVGSQGRSPSYAS

SEQ ID NO: 1821 - protein, 472 aa, Artificial Sequence
  Fusion Protein
HGEGTFTSDLSKQLEEEAVQLFIEWLLNGGPSSGAPPPEGGGGGGGSGGGGSGGGGSADKTHTCPPCPAPEAAGGPSVFLFPPKPKDTLMISRTPEVTCVVVDVSHEDPEVKFNWYVDGVEVHNAKTKPREEQYNSTYRVVSVLTVLHQDWLNGKEYKCKVSNKALPAPIEKTISKAKGQPREPQVYTLPPSRDELTKNQVSLTCLVKGFYPSDIAVEWESNGQPENNYKTTPPVLDSDGSFFLYSKLTVDKSRWQQGNVFSCSVMHEALHNHYTQKSLSLSPGGGGSGSAHPIPDSSPLLQFGGQVRQRYLYTDDACQTEAHLEIREDGTVGGAADQSPESLLQLKALKPGVIQILGVKTSRFLCQRPDGALYGSLHFDPEACSFRELLLEDGYNVYQSEAHGLPLHLPGCKSPHRDPAPRGPARFLPLPGLPPAPPEPPGILAPQPPDVGSSDPLSMVYPSQGRSPSYAS

SEQ ID NO: 1822 - protein, 471 aa, Artificial Sequence
  Fusion Protein
HGEGTFTSDLSKQLEEEAVQLFIEWLLNGGPSSGAPPPEGGGGGGGSGGGGSGGGGSADKTHTCPPCPAPEAAGGPSVFLFPPKPKDTLMISRTPEVTCVVVDVSHEDPEVKFNWYVDGVEVHNAKTKPREEQYNSTYRVVSVLTVLHQDWLNGKEYKCKVSNKALPAPIEKTISKAKGQPREPQVYTLPPSRDELTKNQVSLTCLVKGFYPSDIAVEWESNGQPENNYKTTPPVLDSDGSFFLYSKLTVDKSRWQQGNVFSCSVMHEALHNHYTQKSLSLSPGGGGSGSAHPIPDSSPLLQFGGQVRQRYLYTDDACQTEAHLEIREDGTVGGAADQSPESLLQLKALKPGVIQILGVKTSRFLCQRPDGALYGSLHFDPEACSFRELLLEDGYNVYQSEAHGLPLHLCGNKSPHRDPAPRGPARFLPLPGLPPAPPEPPGILAPQPPDVGSSDPLSMVGSQGRSPSYAS

SEQ ID NO: 1823 - protein, 472 aa, Artificial Sequence
  Fusion Protein
HGEGTFTSDLSKQLEEEAVQLFIEWLLNGGPSSGAPPPEGGGGGGGSGGGGSGGGGSADKTHTCPPCPAPEAAGGPSVFLFPPKPKDTLMISRTPEVTCVVVDVSHEDPEVKFNWYVDGVEVHNAKTKPREEQYNSTYRVVSVLTVLHQDWLNGKEYKCKVSNKALPAPIEKTISKAKGQPREPQVYTLPPSRDELTKNQVSLTCLVKGFYPSDIAVEWESNGQPENNYKTTPPVLDSDGSFFLYSKLTVDKSRWQQGNVFSCSVMHEALHNHYTQKSLSLSPGGGGSGSAHPIPDSSPLLQFGGQVRQRYLYTDDACQTEAHLEIREDGTVGGAADQSPESLLQLKALKPGVIQILGVKTSRFLCQRPDGALYGSLHFDPEACSFRELLLEDGYNVYQSEAHGLPLHLCGNKSPHRDPAPRGPARFLPLPGLPPAPPEPPGILAPQPPDVGSSDPLSMVYPSQGRSPSYAS

SEQ ID NO: 1824 - protein, 471 aa, Artificial Sequence
  Fusion Protein
HGEGTFTSDLSKQLEEEAVQLFIEWLLNGGPSSGAPPPEGGGGGGGSGGGGSGGGGSADKTHTCPPCPAPELLGGPSVFLFPPKPKDTLMISRTPEVTCVVVDVSHEDPEVKFNWYVDGVEVHNAKTKPREEQYNNASRVVSVLTVLHQDWLNGKEYKCKVSNKALPAPIEKTISKAKGQPREPQVYTLPPSRDELTKNQVSLTCLVKGFYPSDIAVEWESNGQPENNYKTTPPVLDSDGSFFLYSKLTVDKSRWQQGNVFSCSVMHEALHNHYTQKSLSLSPGGGGSGSAHPIPDSSPLLQFGGQVRQRYLYTDDACQTEAHLEIREDGTVGGAADQSPESLLQLKALKPGVIQILGVKTSRFLCQRPDGALYGSLHFDPEACSFRELLLEDGYNVYQSEAHGLPLHLPGCKSPHRDPAPRGPARFLPLPGLPPAPPEPPGILAPQPPDVGSSDPLSMVGSQGRSPSYAS

SEQ ID NO: 1825 - protein, 472 aa, Artificial Sequence
  Fusion Protein
HGEGTFTSDLSKQLEEEAVQLFIEWLLNGGPSSGAPPPEGGGGGGGSGGGGSGGGGSADKTHTCPPCPAPELLGGPSVFLFPPKPKDTLMISRTPEVTCVVVDVSHEDPEVKFNWYVDGVEVHNAKTKPREEQYNNASRVVSVLTVLHQDWLNGKEYKCKVSNKALPAPIEKTISKAKGQPREPQVYTLPPSRDELTKNQVSLTCLVKGFYPSDIAVEWESNGQPENNYKTTPPVLDSDGSFFLYSKLTVDKSRWQQGNVFSCSVMHEALHNHYTQKSLSLSPGGGGSGSAHPIPDSSPLLQFGGQVRQRYLYTDDACQTEAHLEIREDGTVGGAADQSPESLLQLKALKPGVIQILGVKTSRFLCQRPDGALYGSLHFDPEACSFRELLLEDGYNVYQSEAHGLPLHLPGCKSPHRDPAPRGPARFLPLPGLPPAPPEPPGILAPQPPDVGSSDPLSMVYPSQGRSPSYAS

SEQ ID NO: 1826 - protein, 471 aa, Artificial Sequence
  Fusion Protein
HGEGTFTSDLSKQLEEEAVQLFIEWLLNGGPSSGAPPPEGGGGGGGSGGGGSGGGGSADKTHTCPPCPAPELLGGPSVFLFPPKPKDTLMISRTPEVTCVVVDVSHEDPEVKFNWYVDGVEVHNAKTKPREEQYNNASRVVSVLTVLHQDWLNGKEYKCKVSNKALPAPIEKTISKAKGQPREPQVYTLPPSRDELTKNQVSLTCLVKGFYPSDIAVEWESNGQPENNYKTTPPVLDSDGSFFLYSKLTVDKSRWQQGNVFSCSVMHEALHNHYTQKSLSLSPGGGGSGSAHPIPDSSPLLQFGGQVRQRYLYTDDACQTEAHLEIREDGTVGGAADQSPESLLQLKALKPGVIQILGVKTSRFLCQRPDGALYGSLHFDPEACSFRELLLEDGYNVYQSEAHGLPLHLCGNKSPHRDPAPRGPARFLPLPGLPPAPPEPPGILAPQPPDVGSSDPLSMVGSQGRSPSYAS

SEQ ID NO: 1827 - protein, 472 aa, Artificial Sequence
  Fusion Protein
HGEGTFTSDLSKQLEEEAVQLFIEWLLNGGPSSGAPPPEGGGGGGGSGGGGSGGGGSADKTHTCPPCPAPELLGGPSVFLFPPKPKDTLMISRTPEVTCVVVDVSHEDPEVKFNWYVDGVEVHNAKTKPREEQYNNASRVVSVLTVLHQDWLNGKEYKCKVSNKALPAPIEKTISKAKGQPREPQVYTLPPSRDELTKNQVSLTCLVKGFYPSDIAVEWESNGQPENNYKTTPPVLDSDGSFFLYSKLTVDKSRWQQGNVFSCSVMHEALHNHYTQKSLSLSPGGGGSGSAHPIPDSSPLLQFGGQVRQRYLYTDDACQTEAHLEIREDGTVGGAADQSPESLLQLKALKPGVIQILGVKTSRFLCQRPDGALYGSLHFDPEACSFRELLLEDGYNVYQSEAHGLPLHLCGNKSPHRDPAPRGPARFLPLPGLPPAPPEPPGILAPQPPDVGSSDPLSMVYPSQGRSPSYAS

SEQ ID NO: 1828 - protein, 474 aa, Artificial Sequence
  Fusion Protein
HGEGTFTSDLSKQLEEEAVQLFIEWLLNGGPSSGAPPPEGGGGGGGSGGGGSGGGGSAESKYGPPCPPCPAPEFEGGPSVFLFPPKPKDTLMISRTPEVTCVVVDVSQEDPEVQFNWYVDGVEVHNAKTKPREEQFNSTYRVVSVLTVLHQDWLNGKEYKCKVSNKGLPSSIEKTISKAKGQPREPQVYTLPPSQEEMTKNQVSLTCLVKGFYPSDIAVEWESNGQPENNYKTTPPVLDSDGSFFLYSRLTVDKSRWQEGNVFSCSVMHEALHNHYTQKSLSLSLGGGGSGSAHPIPDSSPLLQFGGQVRQRYLYTDDACQTEAHLEIREDGTVGGAADQSPESLLQLKALKPGVIQILGVKTSRFLCQRPDGALYGSLHFDPEACSFRELLLEDGYNVYQSEAHGLPLHLPGCKSPHRDPAPRGPARFLPLPGLPPAPPEPPGILAPQPPDVGSSDPLSMVYPSQGRSPSYAS

SEQ ID NO: 1829 - protein, 473 aa, Artificial Sequence
  Fusion Protein
HGEGTFTSDLSKQLEEEAVQLFIEWLLNGGPSSGAPPPEGGGGGGGSGGGGSGGGGSAESKYGPPCPPCPAPEFEGGPSVFLFPPKPKDTLMISRTPEVTCVVVDVSQEDPEVQFNWYVDGVEVHNAKTKPREEQFNSTYRVVSVLTVLHQDWLNGKEYKCKVSNKGLPSSIEKTISKAKGQPREPQVYTLPPSQEEMTKNQVSLTCLVKGFYPSDIAVEWESNGQPENNYKTTPPVLDSDGSFFLYSRLTVDKSRWQEGNVFSCSVMHEALHNHYTQKSLSLSLGGGGSGSAHPIPDSSPLLQFGGQVRQRYLYTDDACQTEAHLEIREDGTVGGAADQSPESLLQLKALKPGVIQILGVKTSRFLCQRPDGALYGSLHFDPEACSFRELLLEDGYNVYQSEAHGLPLHLCGNKSPHRDPAPRGPARFLPLPGLPPAPPEPPGILAPQPPDVGSSDPLSMVGSQGRSPSYAS

SEQ ID NO: 1830 - protein, 474 aa, Artificial Sequence
  Fusion Protein
HGEGTFTSDLSKQLEEEAVQLFIEWLLNGGPSSGAPPPEGGGGGGGSGGGGSGGGGSAESKYGPPCPPCPAPEFEGGPSVFLFPPKPKDTLMISRTPEVTCVVVDVSQEDPEVQFNWYVDGVEVHNAKTKPREEQFNSTYRVVSVLTVLHQDWLNGKEYKCKVSNKGLPSSIEKTISKAKGQPREPQVYTLPPSQEEMTKNQVSLTCLVKGFYPSDIAVEWESNGQPENNYKTTPPVLDSDGSFFLYSRLTVDKSRWQEGNVFSCSVMHEALHNHYTQKSLSLSLGGGGSGSAHPIPDSSPLLQFGGQVRQRYLYTDDACQTEAHLEIREDGTVGGAADQSPESLLQLKALKPGVIQILGVKTSRFLCQRPDGALYGSLHFDPEACSFRELLLEDGYNVYQSEAHGLPLHLCGNKSPHRDPAPRGPARFLPLPGLPPAPPEPPGILAPQPPDVGSSDPLSMVYPSQGRSPSYAS

SEQ ID NO: 1831 - protein, 471 aa, Artificial Sequence
  Fusion Protein
HGEGTFTSDLSKQLEEEAVRLFIEWLLATGPSSGEPPPEGGGGGGGSGGGGSGGGGSADKTHTCPPCPAPEAAGGPSVFLFPPKPKDTLMISRTPEVTCVVVDVSHEDPEVKFNWYVDGVEVHNAKTKPREEQYNSTYRVVSVLTVLHQDWLNGKEYKCKVSNKALPAPIEKTISKAKGQPREPQVYTLPPSRDELTKNQVSLTCLVKGFYPSDIAVEWESNGQPENNYKTTPPVLDSDGSFFLYSKLTVDKSRWQQGNVFSCSVMHEALHNHYTQKSLSLSPGGGGSGSAHPIPDSSPLLQFGGQVRQRYLYTDDACQTEAHLEIREDGTVGGAADQSPESLLQLKALKPGVIQILGVKTSRFLCQRPDGALYGSLHFDPEACSFRELLLEDGYNVYQSEAHGLPLHLPGCKSPHRDPAPRGPARFLPLPGLPPAPPEPPGILAPQPPDVGSSDPLSMVGSQGRSPSYAS

SEQ ID NO: 1832 - protein, 472 aa, Artificial Sequence
  Fusion Protein
HGEGTFTSDLSKQLEEEAVRLFIEWLLATGPSSGEPPPEGGGGGGGSGGGGSGGGGSADKTHTCPPCPAPEAAGGPSVFLFPPKPKDTLMISRTPEVTCVVVDVSHEDPEVKFNWYVDGVEVHNAKTKPREEQYNSTYRVVSVLTVLHQDWLNGKEYKCKVSNKALPAPIEKTISKAKGQPREPQVYTLPPSRDELTKNQVSLTCLVKGFYPSDIAVEWESNGQPENNYKTTPPVLDSDGSFFLYSKLTVDKSRWQQGNVFSCSVMHEALHNHYTQKSLSLSPGGGGSGSAHPIPDSSPLLQFGGQVRQRYLYTDDACQTEAHLEIREDGTVGGAADQSPESLLQLKALKPGVIQILGVKTSRFLCQRPDGALYGSLHFDPEACSFRELLLEDGYNVYQSEAHGLPLHLPGCKSPHRDPAPRGPARFLPLPGLPPAPPEPPGILAPQPPDVGSSDPLSMVYPSQGRSPSYAS

SEQ ID NO: 1833 - protein, 471 aa, Artificial Sequence
  Fusion Protein
HGEGTFTSDLSKQLEEEAVRLFIEWLLATGPSSGEPPPEGGGGGGGSGGGGSGGGGSADKTHTCPPCPAPEAAGGPSVFLFPPKPKDTLMISRTPEVTCVVVDVSHEDPEVKFNWYVDGVEVHNAKTKPREEQYNSTYRVVSVLTVLHQDWLNGKEYKCKVSNKALPAPIEKTISKAKGQPREPQVYTLPPSRDELTKNQVSLTCLVKGFYPSDIAVEWESNGQPENNYKTTPPVLDSDGSFFLYSKLTVDKSRWQQGNVFSCSVMHEALHNHYTQKSLSLSPGGGGSGSAHPIPDSSPLLQFGGQVRQRYLYTDDACQTEAHLEIREDGTVGGAADQSPESLLQLKALKPGVIQILGVKTSRFLCQRPDGALYGSLHFDPEACSFRELLLEDGYNVYQSEAHGLPLHLCGNKSPHRDPAPRGPARFLPLPGLPPAPPEPPGILAPQPPDVGSSDPLSMVGSQGRSPSYAS

SEQ ID NO: 1834 - protein, 472 aa, Artificial Sequence
  Fusion Protein
HGEGTFTSDLSKQLEEEAVRLFIEWLLATGPSSGEPPPEGGGGGGGSGGGGSGGGGSADKTHTCPPCPAPEAAGGPSVFLFPPKPKDTLMISRTPEVTCVVVDVSHEDPEVKFNWYVDGVEVHNAKTKPREEQYNSTYRVVSVLTVLHQDWLNGKEYKCKVSNKALPAPIEKTISKAKGQPREPQVYTLPPSRDELTKNQVSLTCLVKGFYPSDIAVEWESNGQPENNYKTTPPVLDSDGSFFLYSKLTVDKSRWQQGNVFSCSVMHEALHNHYTQKSLSLSPGGGGSGSAHPIPDSSPLLQFGGQVRQRYLYTDDACQTEAHLEIREDGTVGGAADQSPESLLQLKALKPGVIQILGVKTSRFLCQRPDGALYGSLHFDPEACSFRELLLEDGYNVYQSEAHGLPLHLCGNKSPHRDPAPRGPARFLPLPGLPPAPPEPPGILAPQPPDVGSSDPLSMVYPSQGRSPSYAS

SEQ ID NO: 1835 - protein, 471 aa, Artificial Sequence
  Fusion Protein
HGEGTFTSDLSKQLEEEAVRLFIEWLLATGPSSGEPPPEGGGGGGGSGGGGSGGGGSADKTHTCPPCPAPELLGGPSVFLFPPKPKDTLMISRTPEVTCVVVDVSHEDPEVKFNWYVDGVEVHNAKTKPREEQYNNASRVVSVLTVLHQDWLNGKEYKCKVSNKALPAPIEKTISKAKGQPREPQVYTLPPSRDELTKNQVSLTCLVKGFYPSDIAVEWESNGQPENNYKTTPPVLDSDGSFFLYSKLTVDKSRWQQGNVFSCSVMHEALHNHYTQKSLSLSPGGGGSGSAHPIPDSSPLLQFGGQVRQRYLYTDDACQTEAHLEIREDGTVGGAADQSPESLLQLKALKPGVIQILGVKTSRFLCQRPDGALYGSLHFDPEACSFRELLLEDGYNVYQSEAHGLPLHLPGCKSPHRDPAPRGPARFLPLPGLPPAPPEPPGILAPQPPDVGSSDPLSMVGSQGRSPSYAS

SEQ ID NO: 1836 - protein, 472 aa, Artificial Sequence
  Fusion Protein
HGEGTFTSDLSKQLEEEAVRLFIEWLLATGPSSGEPPPEGGGGGGGSGGGGSGGGGSADKTHTCPPCPAPELLGGPSVFLFPPKPKDTLMISRTPEVTCVVVDVSHEDPEVKFNWYVDGVEVHNAKTKPREEQYNNASRVVSVLTVLHQDWLNGKEYKCKVSNKALPAPIEKTISKAKGQPREPQVYTLPPSRDELTKNQVSLTCLVKGFYPSDIAVEWESNGQPENNYKTTPPVLDSDGSFFLYSKLTVDKSRWQQGNVFSCSVMHEALHNHYTQKSLSLSPGGGGSGSAHPIPDSSPLLQFGGQVRQRYLYTDDACQTEAHLEIREDGTVGGAADQSPESLLQLKALKPGVIQILGVKTSRFLCQRPDGALYGSLHFDPEACSFRELLLEDGYNVYQSEAHGLPLHLPGCKSPHRDPAPRGPARFLPLPGLPPAPPEPPGILAPQPPDVGSSDPLSMVYPSQGRSPSYAS

SEQ ID NO: 1837 - protein, 471 aa, Artificial Sequence
  Fusion Protein
HGEGTFTSDLSKQLEEEAVRLFIEWLLATGPSSGEPPPEGGGGGGGSGGGGSGGGGSADKTHTCPPCPAPELLGGPSVFLFPPKPKDTLMISRTPEVTCVVVDVSHEDPEVKFNWYVDGVEVHNAKTKPREEQYNNASRVVSVLTVLHQDWLNGKEYKCKVSNKALPAPIEKTISKAKGQPREPQVYTLPPSRDELTKNQVSLTCLVKGFYPSDIAVEWESNGQPENNYKTTPPVLDSDGSFFLYSKLTVDKSRWQQGNVFSCSVMHEALHNHYTQKSLSLSPGGGGSGSAHPIPDSSPLLQFGGQVRQRYLYTDDACQTEAHLEIREDGTVGGAADQSPESLLQLKALKPGVIQILGVKTSRFLCQRPDGALYGSLHFDPEACSFRELLLEDGYNVYQSEAHGLPLHLCGNKSPHRDPAPRGPARFLPLPGLPPAPPEPPGILAPQPPDVGSSDPLSMVGSQGRSPSYAS

SEQ ID NO: 1838 - protein, 472 aa, Artificial Sequence
  Fusion Protein
HGEGTFTSDLSKQLEEEAVRLFIEWLLATGPSSGEPPPEGGGGGGGSGGGGSGGGGSADKTHTCPPCPAPELLGGPSVFLFPPKPKDTLMISRTPEVTCVVVDVSHEDPEVKFNWYVDGVEVHNAKTKPREEQYNNASRVVSVLTVLHQDWLNGKEYKCKVSNKALPAPIEKTISKAKGQPREPQVYTLPPSRDELTKNQVSLTCLVKGFYPSDIAVEWESNGQPENNYKTTPPVLDSDGSFFLYSKLTVDKSRWQQGNVFSCSVMHEALHNHYTQKSLSLSPGGGGSGSAHPIPDSSPLLQFGGQVRQRYLYTDDACQTEAHLEIREDGTVGGAADQSPESLLQLKALKPGVIQILGVKTSRFLCQRPDGALYGSLHFDPEACSFRELLLEDGYNVYQSEAHGLPLHLCGNKSPHRDPAPRGPARFLPLPGLPPAPPEPPGILAPQPPDVGSSDPLSMVYPSQGRSPSYAS

SEQ ID NO: 1839 - protein, 474 aa, Artificial Sequence
  Fusion Protein
HGEGTFTSDLSKQLEEEAVRLFIEWLLATGPSSGEPPPEGGGGGGGSGGGGSGGGGSAESKYGPPCPPCPAPEFEGGPSVFLFPPKPKDTLMISRTPEVTCVVVDVSQEDPEVQFNWYVDGVEVHNAKTKPREEQFNSTYRVVSVLTVLHQDWLNGKEYKCKVSNKGLPSSIEKTISKAKGQPREPQVYTLPPSQEEMTKNQVSLTCLVKGFYPSDIAVEWESNGQPENNYKTTPPVLDSDGSFFLYSRLTVDKSRWQEGNVFSCSVMHEALHNHYTQKSLSLSLGGGGSGSAHPIPDSSPLLQFGGQVRQRYLYTDDACQTEAHLEIREDGTVGGAADQSPESLLQLKALKPGVIQILGVKTSRFLCQRPDGALYGSLHFDPEACSFRELLLEDGYNVYQSEAHGLPLHLPGCKSPHRDPAPRGPARFLPLPGLPPAPPEPPGILAPQPPDVGSSDPLSMVYPSQGRSPSYAS

SEQ ID NO: 1840 - protein, 473 aa, Artificial Sequence
  Fusion Protein
HGEGTFTSDLSKQLEEEAVRLFIEWLLATGPSSGEPPPEGGGGGGGSGGGGSGGGGSAESKYGPPCPPCPAPEFEGGPSVFLFPPKPKDTLMISRTPEVTCVVVDVSQEDPEVQFNWYVDGVEVHNAKTKPREEQFNSTYRVVSVLTVLHQDWLNGKEYKCKVSNKGLPSSIEKTISKAKGQPREPQVYTLPPSQEEMTKNQVSLTCLVKGFYPSDIAVEWESNGQPENNYKTTPPVLDSDGSFFLYSRLTVDKSRWQEGNVFSCSVMHEALHNHYTQKSLSLSLGGGGSGSAHPIPDSSPLLQFGGQVRQRYLYTDDACQTEAHLEIREDGTVGGAADQSPESLLQLKALKPGVIQILGVKTSRFLCQRPDGALYGSLHFDPEACSFRELLLEDGYNVYQSEAHGLPLHLCGNKSPHRDPAPRGPARFLPLPGLPPAPPEPPGILAPQPPDVGSSDPLSMVGSQGRSPSYAS

SEQ ID NO: 1841 - protein, 474 aa, Artificial Sequence
  Fusion Protein
HGEGTFTSDLSKQLEEEAVRLFIEWLLATGPSSGEPPPEGGGGGGGSGGGGSGGGGSAESKYGPPCPPCPAPEFEGGPSVFLFPPKPKDTLMISRTPEVTCVVVDVSQEDPEVQFNWYVDGVEVHNAKTKPREEQFNSTYRVVSVLTVLHQDWLNGKEYKCKVSNKGLPSSIEKTISKAKGQPREPQVYTLPPSQEEMTKNQVSLTCLVKGFYPSDIAVEWESNGQPENNYKTTPPVLDSDGSFFLYSRLTVDKSRWQEGNVFSCSVMHEALHNHYTQKSLSLSLGGGGSGSAHPIPDSSPLLQFGGQVRQRYLYTDDACQTEAHLEIREDGTVGGAADQSPESLLQLKALKPGVIQILGVKTSRFLCQRPDGALYGSLHFDPEACSFRELLLEDGYNVYQSEAHGLPLHLCGNKSPHRDPAPRGPARFLPLPGLPPAPPEPPGILAPQPPDVGSSDPLSMVYPSQGRSPSYAS

SEQ ID NO: 1842 - protein, 472 aa, Artificial Sequence
  Fusion Protein
GHGEGTFTSDLSKQLEEEAVQLFIEWLKAGGPSSGAPPPSGGGGGGGSGGGGSGGGGSADKTHTCPPCPAPEAAGGPSVFLFPPKPKDTLMISRTPEVTCVVVDVSHEDPEVKFNWYVDGVEVHNAKTKPREEQYNSTYRVVSVLTVLHQDWLNGKEYKCKVSNKALPAPIEKTISKAKGQPREPQVYTLPPSRDELTKNQVSLTCLVKGFYPSDIAVEWESNGQPENNYKTTPPVLDSDGSFFLYSKLTVDKSRWQQGNVFSCSVMHEALHNHYTQKSLSLSPGGGGSGSAHPIPDSSPLLQFGGQVRQRYLYTDDACQTEAHLEIREDGTVGGAADQSPESLLQLKALKPGVIQILGVKTSRFLCQRPDGALYGSLHFDPEACSFRELLLEDGYNVYQSEAHGLPLHLPGCKSPHRDPAPRGPARFLPLPGLPPAPPEPPGILAPQPPDVGSSDPLSMVGSQGRSPSYAS

SEQ ID NO: 1843 - protein, 473 aa, Artificial Sequence
  Fusion Protein
GHGEGTFTSDLSKQLEEEAVQLFIEWLKAGGPSSGAPPPSGGGGGGGSGGGGSGGGGSADKTHTCPPCPAPEAAGGPSVFLFPPKPKDTLMISRTPEVTCVVVDVSHEDPEVKFNWYVDGVEVHNAKTKPREEQYNSTYRVVSVLTVLHQDWLNGKEYKCKVSNKALPAPIEKTISKAKGQPREPQVYTLPPSRDELTKNQVSLTCLVKGFYPSDIAVEWESNGQPENNYKTTPPVLDSDGSFFLYSKLTVDKSRWQQGNVFSCSVMHEALHNHYTQKSLSLSPGGGGSGSAHPIPDSSPLLQFGGQVRQRYLYTDDACQTEAHLEIREDGTVGGAADQSPESLLQLKALKPGVIQILGVKTSRFLCQRPDGALYGSLHFDPEACSFRELLLEDGYNVYQSEAHGLPLHLPGCKSPHRDPAPRGPARFLPLPGLPPAPPEPPGILAPQPPDVGSSDPLSMVYPSQGRSPSYAS

SEQ ID NO: 1844 - protein, 472 aa, Artificial Sequence
  Fusion Protein
GHGEGTFTSDLSKQLEEEAVQLFIEWLKAGGPSSGAPPPSGGGGGGGSGGGGSGGGGSADKTHTCPPCPAPEAAGGPSVFLFPPKPKDTLMISRTPEVTCVVVDVSHEDPEVKFNWYVDGVEVHNAKTKPREEQYNSTYRVVSVLTVLHQDWLNGKEYKCKVSNKALPAPIEKTISKAKGQPREPQVYTLPPSRDELTKNQVSLTCLVKGFYPSDIAVEWESNGQPENNYKTTPPVLDSDGSFFLYSKLTVDKSRWQQGNVFSCSVMHEALHNHYTQKSLSLSPGGGGSGSAHPIPDSSPLLQFGGQVRQRYLYTDDACQTEAHLEIREDGTVGGAADQSPESLLQLKALKPGVIQILGVKTSRFLCQRPDGALYGSLHFDPEACSFRELLLEDGYNVYQSEAHGLPLHLCGNKSPHRDPAPRGPARFLPLPGLPPAPPEPPGILAPQPPDVGSSDPLSMVGSQGRSPSYAS

SEQ ID NO: 1845 - protein, 473 aa, Artificial Sequence
  Fusion Protein
GHGEGTFTSDLSKQLEEEAVQLFIEWLKAGGPSSGAPPPSGGGGGGGSGGGGSGGGGSADKTHTCPPCPAPEAAGGPSVFLFPPKPKDTLMISRTPEVTCVVVDVSHEDPEVKFNWYVDGVEVHNAKTKPREEQYNSTYRVVSVLTVLHQDWLNGKEYKCKVSNKALPAPIEKTISKAKGQPREPQVYTLPPSRDELTKNQVSLTCLVKGFYPSDIAVEWESNGQPENNYKTTPPVLDSDGSFFLYSKLTVDKSRWQQGNVFSCSVMHEALHNHYTQKSLSLSPGGGGSGSAHPIPDSSPLLQFGGQVRQRYLYTDDACQTEAHLEIREDGTVGGAADQSPESLLQLKALKPGVIQILGVKTSRFLCQRPDGALYGSLHFDPEACSFRELLLEDGYNVYQSEAHGLPLHLCGNKSPHRDPAPRGPARFLPLPGLPPAPPEPPGILAPQPPDVGSSDPLSMVYPSQGRSPSYAS

SEQ ID NO: 1846 - protein, 472 aa, Artificial Sequence
  Fusion Protein
GHGEGTFTSDLSKQLEEEAVQLFIEWLKAGGPSSGAPPPSGGGGGGGSGGGGSGGGGSADKTHTCPPCPAPELLGGPSVFLFPPKPKDTLMISRTPEVTCVVVDVSHEDPEVKFNWYVDGVEVHNAKTKPREEQYNNASRVVSVLTVLHQDWLNGKEYKCKVSNKALPAPIEKTISKAKGQPREPQVYTLPPSRDELTKNQVSLTCLVKGFYPSDIAVEWESNGQPENNYKTTPPVLDSDGSFFLYSKLTVDKSRWQQGNVFSCSVMHEALHNHYTQKSLSLSPGGGGSGSAHPIPDSSPLLQFGGQVRQRYLYTDDACQTEAHLEIREDGTVGGAADQSPESLLQLKALKPGVIQILGVKTSRFLCQRPDGALYGSLHFDPEACSFRELLLEDGYNVYQSEAHGLPLHLPGCKSPHRDPAPRGPARFLPLPGLPPAPPEPPGILAPQPPDVGSSDPLSMVGSQGRSPSYAS

SEQ ID NO: 1847 - protein, 473 aa, Artificial Sequence
  Fusion Protein
GHGEGTFTSDLSKQLEEEAVQLFIEWLKAGGPSSGAPPPSGGGGGGGSGGGGSGGGGSADKTHTCPPCPAPELLGGPSVFLFPPKPKDTLMISRTPEVTCVVVDVSHEDPEVKFNWYVDGVEVHNAKTKPREEQYNNASRVVSVLTVLHQDWLNGKEYKCKVSNKALPAPIEKTISKAKGQPREPQVYTLPPSRDELTKNQVSLTCLVKGFYPSDIAVEWESNGQPENNYKTTPPVLDSDGSFFLYSKLTVDKSRWQQGNVFSCSVMHEALHNHYTQKSLSLSPGGGGSGSAHPIPDSSPLLQFGGQVRQRYLYTDDACQTEAHLEIREDGTVGGAADQSPESLLQLKALKPGVIQILGVKTSRFLCQRPDGALYGSLHFDPEACSFRELLLEDGYNVYQSEAHGLPLHLPGCKSPHRDPAPRGPARFLPLPGLPPAPPEPPGILAPQPPDVGSSDPLSMVYPSQGRSPSYAS

SEQ ID NO: 1848 - protein, 472 aa, Artificial Sequence
  Fusion Protein
GHGEGTFTSDLSKQLEEEAVQLFIEWLKAGGPSSGAPPPSGGGGGGGSGGGGSGGGGSADKTHTCPPCPAPELLGGPSVFLFPPKPKDTLMISRTPEVTCVVVDVSHEDPEVKFNWYVDGVEVHNAKTKPREEQYNNASRVVSVLTVLHQDWLNGKEYKCKVSNKALPAPIEKTISKAKGQPREPQVYTLPPSRDELTKNQVSLTCLVKGFYPSDIAVEWESNGQPENNYKTTPPVLDSDGSFFLYSKLTVDKSRWQQGNVFSCSVMHEALHNHYTQKSLSLSPGGGGSGSAHPIPDSSPLLQFGGQVRQRYLYTDDACQTEAHLEIREDGTVGGAADQSPESLLQLKALKPGVIQILGVKTSRFLCQRPDGALYGSLHFDPEACSFRELLLEDGYNVYQSEAHGLPLHLCGNKSPHRDPAPRGPARFLPLPGLPPAPPEPPGILAPQPPDVGSSDPLSMVGSQGRSPSYAS

SEQ ID NO: 1849 - protein, 473 aa, Artificial Sequence
  Fusion Protein
GHGEGTFTSDLSKQLEEEAVQLFIEWLKAGGPSSGAPPPSGGGGGGGSGGGGSGGGGSADKTHTCPPCPAPELLGGPSVFLFPPKPKDTLMISRTPEVTCVVVDVSHEDPEVKFNWYVDGVEVHNAKTKPREEQYNNASRVVSVLTVLHQDWLNGKEYKCKVSNKALPAPIEKTISKAKGQPREPQVYTLPPSRDELTKNQVSLTCLVKGFYPSDIAVEWESNGQPENNYKTTPPVLDSDGSFFLYSKLTVDKSRWQQGNVFSCSVMHEALHNHYTQKSLSLSPGGGGSGSAHPIPDSSPLLQFGGQVRQRYLYTDDACQTEAHLEIREDGTVGGAADQSPESLLQLKALKPGVIQILGVKTSRFLCQRPDGALYGSLHFDPEACSFRELLLEDGYNVYQSEAHGLPLHLCGNKSPHRDPAPRGPARFLPLPGLPPAPPEPPGILAPQPPDVGSSDPLSMVYPSQGRSPSYAS

SEQ ID NO: 1850 - protein, 474 aa, Artificial Sequence
  Fusion Protein
GHGEGTFTSDLSKQLEEEAVQLFIEWLKAGGPSSGAPPPSGGGGGGGSGGGGSGGGGSAESKYGPPCPPCPAPEFEGGPSVFLFPPKPKDTLMISRTPEVTCVVVDVSQEDPEVQFNWYVDGVEVHNAKTKPREEQFNSTYRVVSVLTVLHQDWLNGKEYKCKVSNKGLPSSIEKTISKAKGQPREPQVYTLPPSQEEMTKNQVSLTCLVKGFYPSDIAVEWESNGQPENNYKTTPPVLDSDGSFFLYSRLTVDKSRWQEGNVFSCSVMHEALHNHYTQKSLSLSLGGGGSGSAHPIPDSSPLLQFGGQVRQRYLYTDDACQTEAHLEIREDGTVGGAADQSPESLLQLKALKPGVIQILGVKTSRFLCQRPDGALYGSLHFDPEACSFRELLLEDGYNVYQSEAHGLPLHLPGCKSPHRDPAPRGPARFLPLPGLPPAPPEPPGILAPQPPDVGSSDPLSMVGSQGRSPSYAS

SEQ ID NO: 1851 - protein, 475 aa, Artificial Sequence
  Fusion Protein
GHGEGTFTSDLSKQLEEEAVQLFIEWLKAGGPSSGAPPPSGGGGGGGSGGGGSGGGGSAESKYGPPCPPCPAPEFEGGPSVFLFPPKPKDTLMISRTPEVTCVVVDVSQEDPEVQFNWYVDGVEVHNAKTKPREEQFNSTYRVVSVLTVLHQDWLNGKEYKCKVSNKGLPSSIEKTISKAKGQPREPQVYTLPPSQEEMTKNQVSLTCLVKGFYPSDIAVEWESNGQPENNYKTTPPVLDSDGSFFLYSRLTVDKSRWQEGNVFSCSVMHEALHNHYTQKSLSLSLGGGGSGSAHPIPDSSPLLQFGGQVRQRYLYTDDACQTEAHLEIREDGTVGGAADQSPESLLQLKALKPGVIQILGVKTSRFLCQRPDGALYGSLHFDPEACSFRELLLEDGYNVYQSEAHGLPLHLPGCKSPHRDPAPRGPARFLPLPGLPPAPPEPPGILAPQPPDVGSSDPLSMVYPSQGRSPSYAS

SEQ ID NO: 1852 - protein, 474 aa, Artificial Sequence
  Fusion Protein
GHGEGTFTSDLSKQLEEEAVQLFIEWLKAGGPSSGAPPPSGGGGGGGSGGGGSGGGGSAESKYGPPCPPCPAPEFEGGPSVFLFPPKPKDTLMISRTPEVTCVVVDVSQEDPEVQFNWYVDGVEVHNAKTKPREEQFNSTYRVVSVLTVLHQDWLNGKEYKCKVSNKGLPSSIEKTISKAKGQPREPQVYTLPPSQEEMTKNQVSLTCLVKGFYPSDIAVEWESNGQPENNYKTTPPVLDSDGSFFLYSRLTVDKSRWQEGNVFSCSVMHEALHNHYTQKSLSLSLGGGGSGSAHPIPDSSPLLQFGGQVRQRYLYTDDACQTEAHLEIREDGTVGGAADQSPESLLQLKALKPGVIQILGVKTSRFLCQRPDGALYGSLHFDPEACSFRELLLEDGYNVYQSEAHGLPLHLCGNKSPHRDPAPRGPARFLPLPGLPPAPPEPPGILAPQPPDVGSSDPLSMVGSQGRSPSYAS

SEQ ID NO: 1853 - protein, 475 aa, Artificial Sequence
  Fusion Protein
GHGEGTFTSDLSKQLEEEAVQLFIEWLKAGGPSSGAPPPSGGGGGGGSGGGGSGGGGSAESKYGPPCPPCPAPEFEGGPSVFLFPPKPKDTLMISRTPEVTCVVVDVSQEDPEVQFNWYVDGVEVHNAKTKPREEQFNSTYRVVSVLTVLHQDWLNGKEYKCKVSNKGLPSSIEKTISKAKGQPREPQVYTLPPSQEEMTKNQVSLTCLVKGFYPSDIAVEWESNGQPENNYKTTPPVLDSDGSFFLYSRLTVDKSRWQEGNVFSCSVMHEALHNHYTQKSLSLSLGGGGSGSAHPIPDSSPLLQFGGQVRQRYLYTDDACQTEAHLEIREDGTVGGAADQSPESLLQLKALKPGVIQILGVKTSRFLCQRPDGALYGSLHFDPEACSFRELLLEDGYNVYQSEAHGLPLHLCGNKSPHRDPAPRGPARFLPLPGLPPAPPEPPGILAPQPPDVGSSDPLSMVYPSQGRSPSYAS

SEQ ID NO: 1854 - protein, 472 aa, Artificial Sequence
  Fusion Protein
GHGEGTFTSDLSKQLEEEAVRLFIEWLKAGGPSSGAPPPSGGGGGGGSGGGGSGGGGSADKTHTCPPCPAPEAAGGPSVFLFPPKPKDTLMISRTPEVTCVVVDVSHEDPEVKFNWYVDGVEVHNAKTKPREEQYNSTYRVVSVLTVLHQDWLNGKEYKCKVSNKALPAPIEKTISKAKGQPREPQVYTLPPSRDELTKNQVSLTCLVKGFYPSDIAVEWESNGQPENNYKTTPPVLDSDGSFFLYSKLTVDKSRWQQGNVFSCSVMHEALHNHYTQKSLSLSPGGGGSGSAHPIPDSSPLLQFGGQVRQRYLYTDDACQTEAHLEIREDGTVGGAADQSPESLLQLKALKPGVIQILGVKTSRFLCQRPDGALYGSLHFDPEACSFRELLLEDGYNVYQSEAHGLPLHLPGCKSPHRDPAPRGPARFLPLPGLPPAPPEPPGILAPQPPDVGSSDPLSMVGSQGRSPSYAS

SEQ ID NO: 1855 - protein, 473 aa, Artificial Sequence
  Fusion Protein
GHGEGTFTSDLSKQLEEEAVRLFIEWLKAGGPSSGAPPPSGGGGGGGSGGGGSGGGGSADKTHTCPPCPAPEAAGGPSVFLFPPKPKDTLMISRTPEVTCVVVDVSHEDPEVKFNWYVDGVEVHNAKTKPREEQYNSTYRVVSVLTVLHQDWLNGKEYKCKVSNKALPAPIEKTISKAKGQPREPQVYTLPPSRDELTKNQVSLTCLVKGFYPSDIAVEWESNGQPENNYKTTPPVLDSDGSFFLYSKLTVDKSRWQQGNVFSCSVMHEALHNHYTQKSLSLSPGGGGSGSAHPIPDSSPLLQFGGQVRQRYLYTDDACQTEAHLEIREDGTVGGAADQSPESLLQLKALKPGVIQILGVKTSRFLCQRPDGALYGSLHFDPEACSFRELLLEDGYNVYQSEAHGLPLHLPGCKSPHRDPAPRGPARFLPLPGLPPAPPEPPGILAPQPPDVGSSDPLSMVYPSQGRSPSYAS

SEQ ID NO: 1856 - protein, 472 aa, Artificial Sequence
  Fusion Protein
GHGEGTFTSDLSKQLEEEAVRLFIEWLKAGGPSSGAPPPSGGGGGGGSGGGGSGGGGSADKTHTCPPCPAPEAAGGPSVFLFPPKPKDTLMISRTPEVTCVVVDVSHEDPEVKFNWYVDGVEVHNAKTKPREEQYNSTYRVVSVLTVLHQDWLNGKEYKCKVSNKALPAPIEKTISKAKGQPREPQVYTLPPSRDELTKNQVSLTCLVKGFYPSDIAVEWESNGQPENNYKTTPPVLDSDGSFFLYSKLTVDKSRWQQGNVFSCSVMHEALHNHYTQKSLSLSPGGGGSGSAHPIPDSSPLLQFGGQVRQRYLYTDDACQTEAHLEIREDGTVGGAADQSPESLLQLKALKPGVIQILGVKTSRFLCQRPDGALYGSLHFDPEACSFRELLLEDGYNVYQSEAHGLPLHLCGNKSPHRDPAPRGPARFLPLPGLPPAPPEPPGILAPQPPDVGSSDPLSMVGSQGRSPSYAS

SEQ ID NO: 1857 - protein, 473 aa, Artificial Sequence
  Fusion Protein
GHGEGTFTSDLSKQLEEEAVRLFIEWLKAGGPSSGAPPPSGGGGGGGSGGGGSGGGGSADKTHTCPPCPAPEAAGGPSVFLFPPKPKDTLMISRTPEVTCVVVDVSHEDPEVKFNWYVDGVEVHNAKTKPREEQYNSTYRVVSVLTVLHQDWLNGKEYKCKVSNKALPAPIEKTISKAKGQPREPQVYTLPPSRDELTKNQVSLTCLVKGFYPSDIAVEWESNGQPENNYKTTPPVLDSDGSFFLYSKLTVDKSRWQQGNVFSCSVMHEALHNHYTQKSLSLSPGGGGSGSAHPIPDSSPLLQFGGQVRQRYLYTDDACQTEAHLEIREDGTVGGAADQSPESLLQLKALKPGVIQILGVKTSRFLCQRPDGALYGSLHFDPEACSFRELLLEDGYNVYQSEAHGLPLHLCGNKSPHRDPAPRGPARFLPLPGLPPAPPEPPGILAPQPPDVGSSDPLSMVYPSQGRSPSYAS

SEQ ID NO: 1858 - protein, 472 aa, Artificial Sequence
  Fusion Protein
GHGEGTFTSDLSKQLEEEAVRLFIEWLKAGGPSSGAPPPSGGGGGGGSGGGGSGGGGSADKTHTCPPCPAPELLGGPSVFLFPPKPKDTLMISRTPEVTCVVVDVSHEDPEVKFNWYVDGVEVHNAKTKPREEQYNNASRVVSVLTVLHQDWLNGKEYKCKVSNKALPAPIEKTISKAKGQPREPQVYTLPPSRDELTKNQVSLTCLVKGFYPSDIAVEWESNGQPENNYKTTPPVLDSDGSFFLYSKLTVDKSRWQQGNVFSCSVMHEALHNHYTQKSLSLSPGGGGSGSAHPIPDSSPLLQFGGQVRQRYLYTDDACQTEAHLEIREDGTVGGAADQSPESLLQLKALKPGVIQILGVKTSRFLCQRPDGALYGSLHFDPEACSFRELLLEDGYNVYQSEAHGLPLHLPGCKSPHRDPAPRGPARFLPLPGLPPAPPEPPGILAPQPPDVGSSDPLSMVGSQGRSPSYAS

SEQ ID NO: 1859 - protein, 473 aa, Artificial Sequence
  Fusion Protein
GHGEGTFTSDLSKQLEEEAVRLFIEWLKAGGPSSGAPPPSGGGGGGGSGGGGSGGGGSADKTHTCPPCPAPELLGGPSVFLFPPKPKDTLMISRTPEVTCVVVDVSHEDPEVKFNWYVDGVEVHNAKTKPREEQYNNASRVVSVLTVLHQDWLNGKEYKCKVSNKALPAPIEKTISKAKGQPREPQVYTLPPSRDELTKNQVSLTCLVKGFYPSDIAVEWESNGQPENNYKTTPPVLDSDGSFFLYSKLTVDKSRWQQGNVFSCSVMHEALHNHYTQKSLSLSPGGGGSGSAHPIPDSSPLLQFGGQVRQRYLYTDDACQTEAHLEIREDGTVGGAADQSPESLLQLKALKPGVIQILGVKTSRFLCQRPDGALYGSLHFDPEACSFRELLLEDGYNVYQSEAHGLPLHLPGCKSPHRDPAPRGPARFLPLPGLPPAPPEPPGILAPQPPDVGSSDPLSMVYPSQGRSPSYAS

SEQ ID NO: 1860 - protein, 472 aa, Artificial Sequence
  Fusion Protein
GHGEGTFTSDLSKQLEEEAVRLFIEWLKAGGPSSGAPPPSGGGGGGGSGGGGSGGGGSADKTHTCPPCPAPELLGGPSVFLFPPKPKDTLMISRTPEVTCVVVDVSHEDPEVKFNWYVDGVEVHNAKTKPREEQYNNASRVVSVLTVLHQDWLNGKEYKCKVSNKALPAPIEKTISKAKGQPREPQVYTLPPSRDELTKNQVSLTCLVKGFYPSDIAVEWESNGQPENNYKTTPPVLDSDGSFFLYSKLTVDKSRWQQGNVFSCSVMHEALHNHYTQKSLSLSPGGGGSGSAHPIPDSSPLLQFGGQVRQRYLYTDDACQTEAHLEIREDGTVGGAADQSPESLLQLKALKPGVIQILGVKTSRFLCQRPDGALYGSLHFDPEACSFRELLLEDGYNVYQSEAHGLPLHLCGNKSPHRDPAPRGPARFLPLPGLPPAPPEPPGILAPQPPDVGSSDPLSMVGSQGRSPSYAS

SEQ ID NO: 1861 - protein, 473 aa, Artificial Sequence
  Fusion Protein
GHGEGTFTSDLSKQLEEEAVRLFIEWLKAGGPSSGAPPPSGGGGGGGSGGGGSGGGGSADKTHTCPPCPAPELLGGPSVFLFPPKPKDTLMISRTPEVTCVVVDVSHEDPEVKFNWYVDGVEVHNAKTKPREEQYNNASRVVSVLTVLHQDWLNGKEYKCKVSNKALPAPIEKTISKAKGQPREPQVYTLPPSRDELTKNQVSLTCLVKGFYPSDIAVEWESNGQPENNYKTTPPVLDSDGSFFLYSKLTVDKSRWQQGNVFSCSVMHEALHNHYTQKSLSLSPGGGGSGSAHPIPDSSPLLQFGGQVRQRYLYTDDACQTEAHLEIREDGTVGGAADQSPESLLQLKALKPGVIQILGVKTSRFLCQRPDGALYGSLHFDPEACSFRELLLEDGYNVYQSEAHGLPLHLCGNKSPHRDPAPRGPARFLPLPGLPPAPPEPPGILAPQPPDVGSSDPLSMVYPSQGRSPSYAS

SEQ ID NO: 1862 - protein, 474 aa, Artificial Sequence
  Fusion Protein
GHGEGTFTSDLSKQLEEEAVRLFIEWLKAGGPSSGAPPPSGGGGGGGSGGGGSGGGGSAESKYGPPCPPCPAPEFEGGPSVFLFPPKPKDTLMISRTPEVTCVVVDVSQEDPEVQFNWYVDGVEVHNAKTKPREEQFNSTYRVVSVLTVLHQDWLNGKEYKCKVSNKGLPSSIEKTISKAKGQPREPQVYTLPPSQEEMTKNQVSLTCLVKGFYPSDIAVEWESNGQPENNYKTTPPVLDSDGSFFLYSRLTVDKSRWQEGNVFSCSVMHEALHNHYTQKSLSLSLGGGGSGSAHPIPDSSPLLQFGGQVRQRYLYTDDACQTEAHLEIREDGTVGGAADQSPESLLQLKALKPGVIQILGVKTSRFLCQRPDGALYGSLHFDPEACSFRELLLEDGYNVYQSEAHGLPLHLPGCKSPHRDPAPRGPARFLPLPGLPPAPPEPPGILAPQPPDVGSSDPLSMVGSQGRSPSYAS

SEQ ID NO: 1863 - protein, 475 aa, Artificial Sequence
  Fusion Protein
GHGEGTFTSDLSKQLEEEAVRLFIEWLKAGGPSSGAPPPSGGGGGGGSGGGGSGGGGSAESKYGPPCPPCPAPEFEGGPSVFLFPPKPKDTLMISRTPEVTCVVVDVSQEDPEVQFNWYVDGVEVHNAKTKPREEQFNSTYRVVSVLTVLHQDWLNGKEYKCKVSNKGLPSSIEKTISKAKGQPREPQVYTLPPSQEEMTKNQVSLTCLVKGFYPSDIAVEWESNGQPENNYKTTPPVLDSDGSFFLYSRLTVDKSRWQEGNVFSCSVMHEALHNHYTQKSLSLSLGGGGSGSAHPIPDSSPLLQFGGQVRQRYLYTDDACQTEAHLEIREDGTVGGAADQSPESLLQLKALKPGVIQILGVKTSRFLCQRPDGALYGSLHFDPEACSFRELLLEDGYNVYQSEAHGLPLHLPGCKSPHRDPAPRGPARFLPLPGLPPAPPEPPGILAPQPPDVGSSDPLSMVYPSQGRSPSYAS

SEQ ID NO: 1864 - protein, 474 aa, Artificial Sequence
  Fusion Protein
GHGEGTFTSDLSKQLEEEAVRLFIEWLKAGGPSSGAPPPSGGGGGGGSGGGGSGGGGSAESKYGPPCPPCPAPEFEGGPSVFLFPPKPKDTLMISRTPEVTCVVVDVSQEDPEVQFNWYVDGVEVHNAKTKPREEQFNSTYRVVSVLTVLHQDWLNGKEYKCKVSNKGLPSSIEKTISKAKGQPREPQVYTLPPSQEEMTKNQVSLTCLVKGFYPSDIAVEWESNGQPENNYKTTPPVLDSDGSFFLYSRLTVDKSRWQEGNVFSCSVMHEALHNHYTQKSLSLSLGGGGSGSAHPIPDSSPLLQFGGQVRQRYLYTDDACQTEAHLEIREDGTVGGAADQSPESLLQLKALKPGVIQILGVKTSRFLCQRPDGALYGSLHFDPEACSFRELLLEDGYNVYQSEAHGLPLHLCGNKSPHRDPAPRGPARFLPLPGLPPAPPEPPGILAPQPPDVGSSDPLSMVGSQGRSPSYAS

SEQ ID NO: 1865 - protein, 475 aa, Artificial Sequence
  Fusion Protein
GHGEGTFTSDLSKQLEEEAVRLFIEWLKAGGPSSGAPPPSGGGGGGGSGGGGSGGGGSAESKYGPPCPPCPAPEFEGGPSVFLFPPKPKDTLMISRTPEVTCVVVDVSQEDPEVQFNWYVDGVEVHNAKTKPREEQFNSTYRVVSVLTVLHQDWLNGKEYKCKVSNKGLPSSIEKTISKAKGQPREPQVYTLPPSQEEMTKNQVSLTCLVKGFYPSDIAVEWESNGQPENNYKTTPPVLDSDGSFFLYSRLTVDKSRWQEGNVFSCSVMHEALHNHYTQKSLSLSLGGGGSGSAHPIPDSSPLLQFGGQVRQRYLYTDDACQTEAHLEIREDGTVGGAADQSPESLLQLKALKPGVIQILGVKTSRFLCQRPDGALYGSLHFDPEACSFRELLLEDGYNVYQSEAHGLPLHLCGNKSPHRDPAPRGPARFLPLPGLPPAPPEPPGILAPQPPDVGSSDPLSMVYPSQGRSPSYAS

SEQ ID NO: 1866 - protein, 472 aa, Artificial Sequence
  Fusion Protein
GHGEGTFTSDKSKQLEEEAVRLFIEWLKAGGPSSGAPPPSGGGGGGGSGGGGSGGGGSADKTHTCPPCPAPEAAGGPSVFLFPPKPKDTLMISRTPEVTCVVVDVSHEDPEVKFNWYVDGVEVHNAKTKPREEQYNSTYRVVSVLTVLHQDWLNGKEYKCKVSNKALPAPIEKTISKAKGQPREPQVYTLPPSRDELTKNQVSLTCLVKGFYPSDIAVEWESNGQPENNYKTTPPVLDSDGSFFLYSKLTVDKSRWQQGNVFSCSVMHEALHNHYTQKSLSLSPGGGGSGSAHPIPDSSPLLQFGGQVRQRYLYTDDACQTEAHLEIREDGTVGGAADQSPESLLQLKALKPGVIQILGVKTSRFLCQRPDGALYGSLHFDPEACSFRELLLEDGYNVYQSEAHGLPLHLPGCKSPHRDPAPRGPARFLPLPGLPPAPPEPPGILAPQPPDVGSSDPLSMVGSQGRSPSYAS

SEQ ID NO: 1867 - protein, 473 aa, Artificial Sequence
  Fusion Protein
GHGEGTFTSDKSKQLEEEAVRLFIEWLKAGGPSSGAPPPSGGGGGGGSGGGGSGGGGSADKTHTCPPCPAPEAAGGPSVFLFPPKPKDTLMISRTPEVTCVVVDVSHEDPEVKFNWYVDGVEVHNAKTKPREEQYNSTYRVVSVLTVLHQDWLNGKEYKCKVSNKALPAPIEKTISKAKGQPREPQVYTLPPSRDELTKNQVSLTCLVKGFYPSDIAVEWESNGQPENNYKTTPPVLDSDGSFFLYSKLTVDKSRWQQGNVFSCSVMHEALHNHYTQKSLSLSPGGGGSGSAHPIPDSSPLLQFGGQVRQRYLYTDDACQTEAHLEIREDGTVGGAADQSPESLLQLKALKPGVIQILGVKTSRFLCQRPDGALYGSLHFDPEACSFRELLLEDGYNVYQSEAHGLPLHLPGCKSPHRDPAPRGPARFLPLPGLPPAPPEPPGILAPQPPDVGSSDPLSMVYPSQGRSPSYAS

SEQ ID NO: 1868 - protein, 472 aa, Artificial Sequence
  Fusion Protein
GHGEGTFTSDKSKQLEEEAVRLFIEWLKAGGPSSGAPPPSGGGGGGGSGGGGSGGGGSADKTHTCPPCPAPEAAGGPSVFLFPPKPKDTLMISRTPEVTCVVVDVSHEDPEVKFNWYVDGVEVHNAKTKPREEQYNSTYRVVSVLTVLHQDWLNGKEYKCKVSNKALPAPIEKTISKAKGQPREPQVYTLPPSRDELTKNQVSLTCLVKGFYPSDIAVEWESNGQPENNYKTTPPVLDSDGSFFLYSKLTVDKSRWQQGNVFSCSVMHEALHNHYTQKSLSLSPGGGGSGSAHPIPDSSPLLQFGGQVRQRYLYTDDACQTEAHLEIREDGTVGGAADQSPESLLQLKALKPGVIQILGVKTSRFLCQRPDGALYGSLHFDPEACSFRELLLEDGYNVYQSEAHGLPLHLCGNKSPHRDPAPRGPARFLPLPGLPPAPPEPPGILAPQPPDVGSSDPLSMVGSQGRSPSYAS

SEQ ID NO: 1869 - protein, 473 aa, Artificial Sequence
  Fusion Protein
GHGEGTFTSDKSKQLEEEAVRLFIEWLKAGGPSSGAPPPSGGGGGGGSGGGGSGGGGSADKTHTCPPCPAPEAAGGPSVFLFPPKPKDTLMISRTPEVTCVVVDVSHEDPEVKFNWYVDGVEVHNAKTKPREEQYNSTYRVVSVLTVLHQDWLNGKEYKCKVSNKALPAPIEKTISKAKGQPREPQVYTLPPSRDELTKNQVSLTCLVKGFYPSDIAVEWESNGQPENNYKTTPPVLDSDGSFFLYSKLTVDKSRWQQGNVFSCSVMHEALHNHYTQKSLSLSPGGGGSGSAHPIPDSSPLLQFGGQVRQRYLYTDDACQTEAHLEIREDGTVGGAADQSPESLLQLKALKPGVIQILGVKTSRFLCQRPDGALYGSLHFDPEACSFRELLLEDGYNVYQSEAHGLPLHLCGNKSPHRDPAPRGPARFLPLPGLPPAPPEPPGILAPQPPDVGSSDPLSMVYPSQGRSPSYAS

SEQ ID NO: 1870 - protein, 472 aa, Artificial Sequence
  Fusion Protein
GHGEGTFTSDKSKQLEEEAVRLFIEWLKAGGPSSGAPPPSGGGGGGGSGGGGSGGGGSADKTHTCPPCPAPELLGGPSVFLFPPKPKDTLMISRTPEVTCVVVDVSHEDPEVKFNWYVDGVEVHNAKTKPREEQYNNASRVVSVLTVLHQDWLNGKEYKCKVSNKALPAPIEKTISKAKGQPREPQVYTLPPSRDELTKNQVSLTCLVKGFYPSDIAVEWESNGQPENNYKTTPPVLDSDGSFFLYSKLTVDKSRWQQGNVFSCSVMHEALHNHYTQKSLSLSPGGGGSGSAHPIPDSSPLLQFGGQVRQRYLYTDDACQTEAHLEIREDGTVGGAADQSPESLLQLKALKPGVIQILGVKTSRFLCQRPDGALYGSLHFDPEACSFRELLLEDGYNVYQSEAHGLPLHLPGCKSPHRDPAPRGPARFLPLPGLPPAPPEPPGILAPQPPDVGSSDPLSMVGSQGRSPSYAS

SEQ ID NO: 1871 - protein, 473 aa, Artificial Sequence
  Fusion Protein
GHGEGTFTSDKSKQLEEEAVRLFIEWLKAGGPSSGAPPPSGGGGGGGSGGGGSGGGGSADKTHTCPPCPAPELLGGPSVFLFPPKPKDTLMISRTPEVTCVVVDVSHEDPEVKFNWYVDGVEVHNAKTKPREEQYNNASRVVSVLTVLHQDWLNGKEYKCKVSNKALPAPIEKTISKAKGQPREPQVYTLPPSRDELTKNQVSLTCLVKGFYPSDIAVEWESNGQPENNYKTTPPVLDSDGSFFLYSKLTVDKSRWQQGNVFSCSVMHEALHNHYTQKSLSLSPGGGGSGSAHPIPDSSPLLQFGGQVRQRYLYTDDACQTEAHLEIREDGTVGGAADQSPESLLQLKALKPGVIQILGVKTSRFLCQRPDGALYGSLHFDPEACSFRELLLEDGYNVYQSEAHGLPLHLPGCKSPHRDPAPRGPARFLPLPGLPPAPPEPPGILAPQPPDVGSSDPLSMVYPSQGRSPSYAS

SEQ ID NO: 1872 - protein, 472 aa, Artificial Sequence
  Fusion Protein
GHGEGTFTSDKSKQLEEEAVRLFIEWLKAGGPSSGAPPPSGGGGGGGSGGGGSGGGGSADKTHTCPPCPAPELLGGPSVFLFPPKPKDTLMISRTPEVTCVVVDVSHEDPEVKFNWYVDGVEVHNAKTKPREEQYNNASRVVSVLTVLHQDWLNGKEYKCKVSNKALPAPIEKTISKAKGQPREPQVYTLPPSRDELTKNQVSLTCLVKGFYPSDIAVEWESNGQPENNYKTTPPVLDSDGSFFLYSKLTVDKSRWQQGNVFSCSVMHEALHNHYTQKSLSLSPGGGGSGSAHPIPDSSPLLQFGGQVRQRYLYTDDACQTEAHLEIREDGTVGGAADQSPESLLQLKALKPGVIQILGVKTSRFLCQRPDGALYGSLHFDPEACSFRELLLEDGYNVYQSEAHGLPLHLCGNKSPHRDPAPRGPARFLPLPGLPPAPPEPPGILAPQPPDVGSSDPLSMVGSQGRSPSYAS

SEQ ID NO: 1873 - protein, 473 aa, Artificial Sequence
  Fusion Protein
GHGEGTFTSDKSKQLEEEAVRLFIEWLKAGGPSSGAPPPSGGGGGGGSGGGGSGGGGSADKTHTCPPCPAPELLGGPSVFLFPPKPKDTLMISRTPEVTCVVVDVSHEDPEVKFNWYVDGVEVHNAKTKPREEQYNNASRVVSVLTVLHQDWLNGKEYKCKVSNKALPAPIEKTISKAKGQPREPQVYTLPPSRDELTKNQVSLTCLVKGFYPSDIAVEWESNGQPENNYKTTPPVLDSDGSFFLYSKLTVDKSRWQQGNVFSCSVMHEALHNHYTQKSLSLSPGGGGSGSAHPIPDSSPLLQFGGQVRQRYLYTDDACQTEAHLEIREDGTVGGAADQSPESLLQLKALKPGVIQILGVKTSRFLCQRPDGALYGSLHFDPEACSFRELLLEDGYNVYQSEAHGLPLHLCGNKSPHRDPAPRGPARFLPLPGLPPAPPEPPGILAPQPPDVGSSDPLSMVYPSQGRSPSYAS

SEQ ID NO: 1874 - protein, 474 aa, Artificial Sequence
  Fusion Protein
GHGEGTFTSDKSKQLEEEAVRLFIEWLKAGGPSSGAPPPSGGGGGGGSGGGGSGGGGSAESKYGPPCPPCPAPEFEGGPSVFLFPPKPKDTLMISRTPEVTCVVVDVSQEDPEVQFNWYVDGVEVHNAKTKPREEQFNSTYRVVSVLTVLHQDWLNGKEYKCKVSNKGLPSSIEKTISKAKGQPREPQVYTLPPSQEEMTKNQVSLTCLVKGFYPSDIAVEWESNGQPENNYKTTPPVLDSDGSFFLYSRLTVDKSRWQEGNVFSCSVMHEALHNHYTQKSLSLSLGGGGSGSAHPIPDSSPLLQFGGQVRQRYLYTDDACQTEAHLEIREDGTVGGAADQSPESLLQLKALKPGVIQILGVKTSRFLCQRPDGALYGSLHFDPEACSFRELLLEDGYNVYQSEAHGLPLHLPGCKSPHRDPAPRGPARFLPLPGLPPAPPEPPGILAPQPPDVGSSDPLSMVGSQGRSPSYAS

SEQ ID NO: 1875 - protein, 475 aa, Artificial Sequence
  Fusion Protein
GHGEGTFTSDKSKQLEEEAVRLFIEWLKAGGPSSGAPPPSGGGGGGGSGGGGSGGGGSAESKYGPPCPPCPAPEFEGGPSVFLFPPKPKDTLMISRTPEVTCVVVDVSQEDPEVQFNWYVDGVEVHNAKTKPREEQFNSTYRVVSVLTVLHQDWLNGKEYKCKVSNKGLPSSIEKTISKAKGQPREPQVYTLPPSQEEMTKNQVSLTCLVKGFYPSDIAVEWESNGQPENNYKTTPPVLDSDGSFFLYSRLTVDKSRWQEGNVFSCSVMHEALHNHYTQKSLSLSLGGGGSGSAHPIPDSSPLLQFGGQVRQRYLYTDDACQTEAHLEIREDGTVGGAADQSPESLLQLKALKPGVIQILGVKTSRFLCQRPDGALYGSLHFDPEACSFRELLLEDGYNVYQSEAHGLPLHLPGCKSPHRDPAPRGPARFLPLPGLPPAPPEPPGILAPQPPDVGSSDPLSMVYPSQGRSPSYAS

SEQ ID NO: 1876 - protein, 474 aa, Artificial Sequence
  Fusion Protein
GHGEGTFTSDKSKQLEEEAVRLFIEWLKAGGPSSGAPPPSGGGGGGGSGGGGSGGGGSAESKYGPPCPPCPAPEFEGGPSVFLFPPKPKDTLMISRTPEVTCVVVDVSQEDPEVQFNWYVDGVEVHNAKTKPREEQFNSTYRVVSVLTVLHQDWLNGKEYKCKVSNKGLPSSIEKTISKAKGQPREPQVYTLPPSQEEMTKNQVSLTCLVKGFYPSDIAVEWESNGQPENNYKTTPPVLDSDGSFFLYSRLTVDKSRWQEGNVFSCSVMHEALHNHYTQKSLSLSLGGGGSGSAHPIPDSSPLLQFGGQVRQRYLYTDDACQTEAHLEIREDGTVGGAADQSPESLLQLKALKPGVIQILGVKTSRFLCQRPDGALYGSLHFDPEACSFRELLLEDGYNVYQSEAHGLPLHLCGNKSPHRDPAPRGPARFLPLPGLPPAPPEPPGILAPQPPDVGSSDPLSMVGSQGRSPSYAS

SEQ ID NO: 1877 - protein, 475 aa, Artificial Sequence
  Fusion Protein
GHGEGTFTSDKSKQLEEEAVRLFIEWLKAGGPSSGAPPPSGGGGGGGSGGGGSGGGGSAESKYGPPCPPCPAPEFEGGPSVFLFPPKPKDTLMISRTPEVTCVVVDVSQEDPEVQFNWYVDGVEVHNAKTKPREEQFNSTYRVVSVLTVLHQDWLNGKEYKCKVSNKGLPSSIEKTISKAKGQPREPQVYTLPPSQEEMTKNQVSLTCLVKGFYPSDIAVEWESNGQPENNYKTTPPVLDSDGSFFLYSRLTVDKSRWQEGNVFSCSVMHEALHNHYTQKSLSLSLGGGGSGSAHPIPDSSPLLQFGGQVRQRYLYTDDACQTEAHLEIREDGTVGGAADQSPESLLQLKALKPGVIQILGVKTSRFLCQRPDGALYGSLHFDPEACSFRELLLEDGYNVYQSEAHGLPLHLCGNKSPHRDPAPRGPARFLPLPGLPPAPPEPPGILAPQPPDVGSSDPLSMVYPSQGRSPSYAS

SEQ ID NO: 1878 - protein, 471 aa, Artificial Sequence
  Fusion Protein
HGEGTFTSDKSKQLEEEAVRLFIEWLKAGGPSSGAPPPSGGGGGGGSGGGGSGGGGSADKTHTCPPCPAPEAAGGPSVFLFPPKPKDTLMISRTPEVTCVVVDVSHEDPEVKFNWYVDGVEVHNAKTKPREEQYNSTYRVVSVLTVLHQDWLNGKEYKCKVSNKALPAPIEKTISKAKGQPREPQVYTLPPSRDELTKNQVSLTCLVKGFYPSDIAVEWESNGQPENNYKTTPPVLDSDGSFFLYSKLTVDKSRWQQGNVFSCSVMHEALHNHYTQKSLSLSPGGGGSGSAHPIPDSSPLLQFGGQVRQRYLYTDDACQTEAHLEIREDGTVGGAADQSPESLLQLKALKPGVIQILGVKTSRFLCQRPDGALYGSLHFDPEACSFRELLLEDGYNVYQSEAHGLPLHLPGCKSPHRDPAPRGPARFLPLPGLPPAPPEPPGILAPQPPDVGSSDPLSMVGSQGRSPSYAS

SEQ ID NO: 1879 - protein, 472 aa, Artificial Sequence
  Fusion Protein
HGEGTFTSDKSKQLEEEAVRLFIEWLKAGGPSSGAPPPSGGGGGGGSGGGGSGGGGSADKTHTCPPCPAPEAAGGPSVFLFPPKPKDTLMISRTPEVTCVVVDVSHEDPEVKFNWYVDGVEVHNAKTKPREEQYNSTYRVVSVLTVLHQDWLNGKEYKCKVSNKALPAPIEKTISKAKGQPREPQVYTLPPSRDELTKNQVSLTCLVKGFYPSDIAVEWESNGQPENNYKTTPPVLDSDGSFFLYSKLTVDKSRWQQGNVFSCSVMHEALHNHYTQKSLSLSPGGGGSGSAHPIPDSSPLLQFGGQVRQRYLYTDDACQTEAHLEIREDGTVGGAADQSPESLLQLKALKPGVIQILGVKTSRFLCQRPDGALYGSLHFDPEACSFRELLLEDGYNVYQSEAHGLPLHLPGCKSPHRDPAPRGPARFLPLPGLPPAPPEPPGILAPQPPDVGSSDPLSMVYPSQGRSPSYAS

SEQ ID NO: 1880 - protein, 471 aa, Artificial Sequence
  Fusion Protein
HGEGTFTSDKSKQLEEEAVRLFIEWLKAGGPSSGAPPPSGGGGGGGSGGGGSGGGGSADKTHTCPPCPAPEAAGGPSVFLFPPKPKDTLMISRTPEVTCVVVDVSHEDPEVKFNWYVDGVEVHNAKTKPREEQYNSTYRVVSVLTVLHQDWLNGKEYKCKVSNKALPAPIEKTISKAKGQPREPQVYTLPPSRDELTKNQVSLTCLVKGFYPSDIAVEWESNGQPENNYKTTPPVLDSDGSFFLYSKLTVDKSRWQQGNVFSCSVMHEALHNHYTQKSLSLSPGGGGSGSAHPIPDSSPLLQFGGQVRQRYLYTDDACQTEAHLEIREDGTVGGAADQSPESLLQLKALKPGVIQILGVKTSRFLCQRPDGALYGSLHFDPEACSFRELLLEDGYNVYQSEAHGLPLHLCGNKSPHRDPAPRGPARFLPLPGLPPAPPEPPGILAPQPPDVGSSDPLSMVGSQGRSPSYAS

SEQ ID NO: 1881 - protein, 472 aa, Artificial Sequence
  Fusion Protein
HGEGTFTSDKSKQLEEEAVRLFIEWLKAGGPSSGAPPPSGGGGGGGSGGGGSGGGGSADKTHTCPPCPAPEAAGGPSVFLFPPKPKDTLMISRTPEVTCVVVDVSHEDPEVKFNWYVDGVEVHNAKTKPREEQYNSTYRVVSVLTVLHQDWLNGKEYKCKVSNKALPAPIEKTISKAKGQPREPQVYTLPPSRDELTKNQVSLTCLVKGFYPSDIAVEWESNGQPENNYKTTPPVLDSDGSFFLYSKLTVDKSRWQQGNVFSCSVMHEALHNHYTQKSLSLSPGGGGSGSAHPIPDSSPLLQFGGQVRQRYLYTDDACQTEAHLEIREDGTVGGAADQSPESLLQLKALKPGVIQILGVKTSRFLCQRPDGALYGSLHFDPEACSFRELLLEDGYNVYQSEAHGLPLHLCGNKSPHRDPAPRGPARFLPLPGLPPAPPEPPGILAPQPPDVGSSDPLSMVYPSQGRSPSYAS

SEQ ID NO: 1882 - protein, 471 aa, Artificial Sequence
  Fusion Protein
HGEGTFTSDKSKQLEEEAVRLFIEWLKAGGPSSGAPPPSGGGGGGGSGGGGSGGGGSADKTHTCPPCPAPELLGGPSVFLFPPKPKDTLMISRTPEVTCVVVDVSHEDPEVKFNWYVDGVEVHNAKTKPREEQYNNASRVVSVLTVLHQDWLNGKEYKCKVSNKALPAPIEKTISKAKGQPREPQVYTLPPSRDELTKNQVSLTCLVKGFYPSDIAVEWESNGQPENNYKTTPPVLDSDGSFFLYSKLTVDKSRWQQGNVFSCSVMHEALHNHYTQKSLSLSPGGGGSGSAHPIPDSSPLLQFGGQVRQRYLYTDDACQTEAHLEIREDGTVGGAADQSPESLLQLKALKPGVIQILGVKTSRFLCQRPDGALYGSLHFDPEACSFRELLLEDGYNVYQSEAHGLPLHLPGCKSPHRDPAPRGPARFLPLPGLPPAPPEPPGILAPQPPDVGSSDPLSMVGSQGRSPSYAS

SEQ ID NO: 1883 - protein, 472 aa, Artificial Sequence
  Fusion Protein
HGEGTFTSDKSKQLEEEAVRLFIEWLKAGGPSSGAPPPSGGGGGGGSGGGGSGGGGSADKTHTCPPCPAPELLGGPSVFLFPPKPKDTLMISRTPEVTCVVVDVSHEDPEVKFNWYVDGVEVHNAKTKPREEQYNNASRVVSVLTVLHQDWLNGKEYKCKVSNKALPAPIEKTISKAKGQPREPQVYTLPPSRDELTKNQVSLTCLVKGFYPSDIAVEWESNGQPENNYKTTPPVLDSDGSFFLYSKLTVDKSRWQQGNVFSCSVMHEALHNHYTQKSLSLSPGGGGSGSAHPIPDSSPLLQFGGQVRQRYLYTDDACQTEAHLEIREDGTVGGAADQSPESLLQLKALKPGVIQILGVKTSRFLCQRPDGALYGSLHFDPEACSFRELLLEDGYNVYQSEAHGLPLHLPGCKSPHRDPAPRGPARFLPLPGLPPAPPEPPGILAPQPPDVGSSDPLSMVYPSQGRSPSYAS

SEQ ID NO: 1884 - protein, 471 aa, Artificial Sequence
  Fusion Protein
HGEGTFTSDKSKQLEEEAVRLFIEWLKAGGPSSGAPPPSGGGGGGGSGGGGSGGGGSADKTHTCPPCPAPELLGGPSVFLFPPKPKDTLMISRTPEVTCVVVDVSHEDPEVKFNWYVDGVEVHNAKTKPREEQYNNASRVVSVLTVLHQDWLNGKEYKCKVSNKALPAPIEKTISKAKGQPREPQVYTLPPSRDELTKNQVSLTCLVKGFYPSDIAVEWESNGQPENNYKTTPPVLDSDGSFFLYSKLTVDKSRWQQGNVFSCSVMHEALHNHYTQKSLSLSPGGGGSGSAHPIPDSSPLLQFGGQVRQRYLYTDDACQTEAHLEIREDGTVGGAADQSPESLLQLKALKPGVIQILGVKTSRFLCQRPDGALYGSLHFDPEACSFRELLLEDGYNVYQSEAHGLPLHLCGNKSPHRDPAPRGPARFLPLPGLPPAPPEPPGILAPQPPDVGSSDPLSMVGSQGRSPSYAS

SEQ ID NO: 1885 - protein, 472 aa, Artificial Sequence
  Fusion Protein
HGEGTFTSDKSKQLEEEAVRLFIEWLKAGGPSSGAPPPSGGGGGGGSGGGGSGGGGSADKTHTCPPCPAPELLGGPSVFLFPPKPKDTLMISRTPEVTCVVVDVSHEDPEVKFNWYVDGVEVHNAKTKPREEQYNNASRVVSVLTVLHQDWLNGKEYKCKVSNKALPAPIEKTISKAKGQPREPQVYTLPPSRDELTKNQVSLTCLVKGFYPSDIAVEWESNGQPENNYKTTPPVLDSDGSFFLYSKLTVDKSRWQQGNVFSCSVMHEALHNHYTQKSLSLSPGGGGSGSAHPIPDSSPLLQFGGQVRQRYLYTDDACQTEAHLEIREDGTVGGAADQSPESLLQLKALKPGVIQILGVKTSRFLCQRPDGALYGSLHFDPEACSFRELLLEDGYNVYQSEAHGLPLHLCGNKSPHRDPAPRGPARFLPLPGLPPAPPEPPGILAPQPPDVGSSDPLSMVYPSQGRSPSYAS

SEQ ID NO: 1886 - protein, 473 aa, Artificial Sequence
  Fusion Protein
HGEGTFTSDKSKQLEEEAVRLFIEWLKAGGPSSGAPPPSGGGGGGGSGGGGSGGGGSAESKYGPPCPPCPAPEFEGGPSVFLFPPKPKDTLMISRTPEVTCVVVDVSQEDPEVQFNWYVDGVEVHNAKTKPREEQFNSTYRVVSVLTVLHQDWLNGKEYKCKVSNKGLPSSIEKTISKAKGQPREPQVYTLPPSQEEMTKNQVSLTCLVKGFYPSDIAVEWESNGQPENNYKTTPPVLDSDGSFFLYSRLTVDKSRWQEGNVFSCSVMHEALHNHYTQKSLSLSLGGGGSGSAHPIPDSSPLLQFGGQVRQRYLYTDDACQTEAHLEIREDGTVGGAADQSPESLLQLKALKPGVIQILGVKTSRFLCQRPDGALYGSLHFDPEACSFRELLLEDGYNVYQSEAHGLPLHLPGCKSPHRDPAPRGPARFLPLPGLPPAPPEPPGILAPQPPDVGSSDPLSMVGSQGRSPSYAS

SEQ ID NO: 1887 - protein, 474 aa, Artificial Sequence
  Fusion Protein
HGEGTFTSDKSKQLEEEAVRLFIEWLKAGGPSSGAPPPSGGGGGGGSGGGGSGGGGSAESKYGPPCPPCPAPEFEGGPSVFLFPPKPKDTLMISRTPEVTCVVVDVSQEDPEVQFNWYVDGVEVHNAKTKPREEQFNSTYRVVSVLTVLHQDWLNGKEYKCKVSNKGLPSSIEKTISKAKGQPREPQVYTLPPSQEEMTKNQVSLTCLVKGFYPSDIAVEWESNGQPENNYKTTPPVLDSDGSFFLYSRLTVDKSRWQEGNVFSCSVMHEALHNHYTQKSLSLSLGGGGSGSAHPIPDSSPLLQFGGQVRQRYLYTDDACQTEAHLEIREDGTVGGAADQSPESLLQLKALKPGVIQILGVKTSRFLCQRPDGALYGSLHFDPEACSFRELLLEDGYNVYQSEAHGLPLHLPGCKSPHRDPAPRGPARFLPLPGLPPAPPEPPGILAPQPPDVGSSDPLSMVYPSQGRSPSYAS

SEQ ID NO: 1888 - protein, 473 aa, Artificial Sequence
  Fusion Protein
HGEGTFTSDKSKQLEEEAVRLFIEWLKAGGPSSGAPPPSGGGGGGGSGGGGSGGGGSAESKYGPPCPPCPAPEFEGGPSVFLFPPKPKDTLMISRTPEVTCVVVDVSQEDPEVQFNWYVDGVEVHNAKTKPREEQFNSTYRVVSVLTVLHQDWLNGKEYKCKVSNKGLPSSIEKTISKAKGQPREPQVYTLPPSQEEMTKNQVSLTCLVKGFYPSDIAVEWESNGQPENNYKTTPPVLDSDGSFFLYSRLTVDKSRWQEGNVFSCSVMHEALHNHYTQKSLSLSLGGGGSGSAHPIPDSSPLLQFGGQVRQRYLYTDDACQTEAHLEIREDGTVGGAADQSPESLLQLKALKPGVIQILGVKTSRFLCQRPDGALYGSLHFDPEACSFRELLLEDGYNVYQSEAHGLPLHLCGNKSPHRDPAPRGPARFLPLPGLPPAPPEPPGILAPQPPDVGSSDPLSMVGSQGRSPSYAS

SEQ ID NO: 1889 - protein, 474 aa, Artificial Sequence
  Fusion Protein
HGEGTFTSDKSKQLEEEAVRLFIEWLKAGGPSSGAPPPSGGGGGGGSGGGGSGGGGSAESKYGPPCPPCPAPEFEGGPSVFLFPPKPKDTLMISRTPEVTCVVVDVSQEDPEVQFNWYVDGVEVHNAKTKPREEQFNSTYRVVSVLTVLHQDWLNGKEYKCKVSNKGLPSSIEKTISKAKGQPREPQVYTLPPSQEEMTKNQVSLTCLVKGFYPSDIAVEWESNGQPENNYKTTPPVLDSDGSFFLYSRLTVDKSRWQEGNVFSCSVMHEALHNHYTQKSLSLSLGGGGSGSAHPIPDSSPLLQFGGQVRQRYLYTDDACQTEAHLEIREDGTVGGAADQSPESLLQLKALKPGVIQILGVKTSRFLCQRPDGALYGSLHFDPEACSFRELLLEDGYNVYQSEAHGLPLHLCGNKSPHRDPAPRGPARFLPLPGLPPAPPEPPGILAPQPPDVGSSDPLSMVYPSQGRSPSYAS

SEQ ID NO: 1890 - protein, 464 aa, Artificial Sequence
  Fusion Protein
GHGEGTFTSDKSKQLEEEAVRLFIEWLKAGGPGGGGGGGSGGGGSGGGGSADKTHTCPPCPAPEAAGGPSVFLFPPKPKDTLMISRTPEVTCVVVDVSHEDPEVKFNWYVDGVEVHNAKTKPREEQYNSTYRVVSVLTVLHQDWLNGKEYKCKVSNKALPAPIEKTISKAKGQPREPQVYTLPPSRDELTKNQVSLTCLVKGFYPSDIAVEWESNGQPENNYKTTPPVLDSDGSFFLYSKLTVDKSRWQQGNVFSCSVMHEALHNHYTQKSLSLSPGGGGSGSAHPIPDSSPLLQFGGQVRQRYLYTDDACQTEAHLEIREDGTVGGAADQSPESLLQLKALKPGVIQILGVKTSRFLCQRPDGALYGSLHFDPEACSFRELLLEDGYNVYQSEAHGLPLHLPGCKSPHRDPAPRGPARFLPLPGLPPAPPEPPGILAPQPPDVGSSDPLSMVGSQGRSPSYAS

SEQ ID NO: 1891 - protein, 465 aa, Artificial Sequence
  Fusion Protein
GHGEGTFTSDKSKQLEEEAVRLFIEWLKAGGPGGGGGGGSGGGGSGGGGSADKTHTCPPCPAPEAAGGPSVFLFPPKPKDTLMISRTPEVTCVVVDVSHEDPEVKFNWYVDGVEVHNAKTKPREEQYNSTYRVVSVLTVLHQDWLNGKEYKCKVSNKALPAPIEKTISKAKGQPREPQVYTLPPSRDELTKNQVSLTCLVKGFYPSDIAVEWESNGQPENNYKTTPPVLDSDGSFFLYSKLTVDKSRWQQGNVFSCSVMHEALHNHYTQKSLSLSPGGGGSGSAHPIPDSSPLLQFGGQVRQRYLYTDDACQTEAHLEIREDGTVGGAADQSPESLLQLKALKPGVIQILGVKTSRFLCQRPDGALYGSLHFDPEACSFRELLLEDGYNVYQSEAHGLPLHLPGCKSPHRDPAPRGPARFLPLPGLPPAPPEPPGILAPQPPDVGSSDPLSMVYPSQGRSPSYAS

SEQ ID NO: 1892 - protein, 464 aa, Artificial Sequence
  Fusion Protein
GHGEGTFTSDKSKQLEEEAVRLFIEWLKAGGPGGGGGGGSGGGGSGGGGSADKTHTCPPCPAPEAAGGPSVFLFPPKPKDTLMISRTPEVTCVVVDVSHEDPEVKFNWYVDGVEVHNAKTKPREEQYNSTYRVVSVLTVLHQDWLNGKEYKCKVSNKALPAPIEKTISKAKGQPREPQVYTLPPSRDELTKNQVSLTCLVKGFYPSDIAVEWESNGQPENNYKTTPPVLDSDGSFFLYSKLTVDKSRWQQGNVFSCSVMHEALHNHYTQKSLSLSPGGGGSGSAHPIPDSSPLLQFGGQVRQRYLYTDDACQTEAHLEIREDGTVGGAADQSPESLLQLKALKPGVIQILGVKTSRFLCQRPDGALYGSLHFDPEACSFRELLLEDGYNVYQSEAHGLPLHLCGNKSPHRDPAPRGPARFLPLPGLPPAPPEPPGILAPQPPDVGSSDPLSMVGSQGRSPSYAS

SEQ ID NO: 1893 - protein, 465 aa, Artificial Sequence
  Fusion Protein
GHGEGTFTSDKSKQLEEEAVRLFIEWLKAGGPGGGGGGGSGGGGSGGGGSADKTHTCPPCPAPEAAGGPSVFLFPPKPKDTLMISRTPEVTCVVVDVSHEDPEVKFNWYVDGVEVHNAKTKPREEQYNSTYRVVSVLTVLHQDWLNGKEYKCKVSNKALPAPIEKTISKAKGQPREPQVYTLPPSRDELTKNQVSLTCLVKGFYPSDIAVEWESNGQPENNYKTTPPVLDSDGSFFLYSKLTVDKSRWQQGNVFSCSVMHEALHNHYTQKSLSLSPGGGGSGSAHPIPDSSPLLQFGGQVRQRYLYTDDACQTEAHLEIREDGTVGGAADQSPESLLQLKALKPGVIQILGVKTSRFLCQRPDGALYGSLHFDPEACSFRELLLEDGYNVYQSEAHGLPLHLCGNKSPHRDPAPRGPARFLPLPGLPPAPPEPPGILAPQPPDVGSSDPLSMVYPSQGRSPSYAS

SEQ ID NO: 1894 - protein, 464 aa, Artificial Sequence
  Fusion Protein
GHGEGTFTSDKSKQLEEEAVRLFIEWLKAGGPGGGGGGGSGGGGSGGGGSADKTHTCPPCPAPELLGGPSVFLFPPKPKDTLMISRTPEVTCVVVDVSHEDPEVKFNWYVDGVEVHNAKTKPREEQYNNASRVVSVLTVLHQDWLNGKEYKCKVSNKALPAPIEKTISKAKGQPREPQVYTLPPSRDELTKNQVSLTCLVKGFYPSDIAVEWESNGQPENNYKTTPPVLDSDGSFFLYSKLTVDKSRWQQGNVFSCSVMHEALHNHYTQKSLSLSPGGGGSGSAHPIPDSSPLLQFGGQVRQRYLYTDDACQTEAHLEIREDGTVGGAADQSPESLLQLKALKPGVIQILGVKTSRFLCQRPDGALYGSLHFDPEACSFRELLLEDGYNVYQSEAHGLPLHLPGCKSPHRDPAPRGPARFLPLPGLPPAPPEPPGILAPQPPDVGSSDPLSMVGSQGRSPSYAS

SEQ ID NO: 1895 - protein, 465 aa, Artificial Sequence
  Fusion Protein
GHGEGTFTSDKSKQLEEEAVRLFIEWLKAGGPGGGGGGGSGGGGSGGGGSADKTHTCPPCPAPELLGGPSVFLFPPKPKDTLMISRTPEVTCVVVDVSHEDPEVKFNWYVDGVEVHNAKTKPREEQYNNASRVVSVLTVLHQDWLNGKEYKCKVSNKALPAPIEKTISKAKGQPREPQVYTLPPSRDELTKNQVSLTCLVKGFYPSDIAVEWESNGQPENNYKTTPPVLDSDGSFFLYSKLTVDKSRWQQGNVFSCSVMHEALHNHYTQKSLSLSPGGGGSGSAHPIPDSSPLLQFGGQVRQRYLYTDDACQTEAHLEIREDGTVGGAADQSPESLLQLKALKPGVIQILGVKTSRFLCQRPDGALYGSLHFDPEACSFRELLLEDGYNVYQSEAHGLPLHLPGCKSPHRDPAPRGPARFLPLPGLPPAPPEPPGILAPQPPDVGSSDPLSMVYPSQGRSPSYAS

SEQ ID NO: 1896 - protein, 464 aa, Artificial Sequence
  Fusion Protein
GHGEGTFTSDKSKQLEEEAVRLFIEWLKAGGPGGGGGGGSGGGGSGGGGSADKTHTCPPCPAPELLGGPSVFLFPPKPKDTLMISRTPEVTCVVVDVSHEDPEVKFNWYVDGVEVHNAKTKPREEQYNNASRVVSVLTVLHQDWLNGKEYKCKVSNKALPAPIEKTISKAKGQPREPQVYTLPPSRDELTKNQVSLTCLVKGFYPSDIAVEWESNGQPENNYKTTPPVLDSDGSFFLYSKLTVDKSRWQQGNVFSCSVMHEALHNHYTQKSLSLSPGGGGSGSAHPIPDSSPLLQFGGQVRQRYLYTDDACQTEAHLEIREDGTVGGAADQSPESLLQLKALKPGVIQILGVKTSRFLCQRPDGALYGSLHFDPEACSFRELLLEDGYNVYQSEAHGLPLHLCGNKSPHRDPAPRGPARFLPLPGLPPAPPEPPGILAPQPPDVGSSDPLSMVGSQGRSPSYAS

SEQ ID NO: 1897 - protein, 465 aa, Artificial Sequence
  Fusion Protein
GHGEGTFTSDKSKQLEEEAVRLFIEWLKAGGPGGGGGGGSGGGGSGGGGSADKTHTCPPCPAPELLGGPSVFLFPPKPKDTLMISRTPEVTCVVVDVSHEDPEVKFNWYVDGVEVHNAKTKPREEQYNNASRVVSVLTVLHQDWLNGKEYKCKVSNKALPAPIEKTISKAKGQPREPQVYTLPPSRDELTKNQVSLTCLVKGFYPSDIAVEWESNGQPENNYKTTPPVLDSDGSFFLYSKLTVDKSRWQQGNVFSCSVMHEALHNHYTQKSLSLSPGGGGSGSAHPIPDSSPLLQFGGQVRQRYLYTDDACQTEAHLEIREDGTVGGAADQSPESLLQLKALKPGVIQILGVKTSRFLCQRPDGALYGSLHFDPEACSFRELLLEDGYNVYQSEAHGLPLHLCGNKSPHRDPAPRGPARFLPLPGLPPAPPEPPGILAPQPPDVGSSDPLSMVYPSQGRSPSYAS

SEQ ID NO: 1898 - protein, 466 aa, Artificial Sequence
  Fusion Protein
GHGEGTFTSDKSKQLEEEAVRLFIEWLKAGGPGGGGGGGSGGGGSGGGGSAESKYGPPCPPCPAPEFEGGPSVFLFPPKPKDTLMISRTPEVTCVVVDVSQEDPEVQFNWYVDGVEVHNAKTKPREEQFNSTYRVVSVLTVLHQDWLNGKEYKCKVSNKGLPSSIEKTISKAKGQPREPQVYTLPPSQEEMTKNQVSLTCLVKGFYPSDIAVEWESNGQPENNYKTTPPVLDSDGSFFLYSRLTVDKSRWQEGNVFSCSVMHEALHNHYTQKSLSLSLGGGGSGSAHPIPDSSPLLQFGGQVRQRYLYTDDACQTEAHLEIREDGTVGGAADQSPESLLQLKALKPGVIQILGVKTSRFLCQRPDGALYGSLHFDPEACSFRELLLEDGYNVYQSEAHGLPLHLPGCKSPHRDPAPRGPARFLPLPGLPPAPPEPPGILAPQPPDVGSSDPLSMVGSQGRSPSYAS

SEQ ID NO: 1899 - protein, 467 aa, Artificial Sequence
  Fusion Protein
GHGEGTFTSDKSKQLEEEAVRLFIEWLKAGGPGGGGGGGSGGGGSGGGGSAESKYGPPCPPCPAPEFEGGPSVFLFPPKPKDTLMISRTPEVTCVVVDVSQEDPEVQFNWYVDGVEVHNAKTKPREEQFNSTYRVVSVLTVLHQDWLNGKEYKCKVSNKGLPSSIEKTISKAKGQPREPQVYTLPPSQEEMTKNQVSLTCLVKGFYPSDIAVEWESNGQPENNYKTTPPVLDSDGSFFLYSRLTVDKSRWQEGNVFSCSVMHEALHNHYTQKSLSLSLGGGGSGSAHPIPDSSPLLQFGGQVRQRYLYTDDACQTEAHLEIREDGTVGGAADQSPESLLQLKALKPGVIQILGVKTSRFLCQRPDGALYGSLHFDPEACSFRELLLEDGYNVYQSEAHGLPLHLPGCKSPHRDPAPRGPARFLPLPGLPPAPPEPPGILAPQPPDVGSSDPLSMVYPSQGRSPSYAS

SEQ ID NO: 1900 - protein, 466 aa, Artificial Sequence
  Fusion Protein
GHGEGTFTSDKSKQLEEEAVRLFIEWLKAGGPGGGGGGGSGGGGSGGGGSAESKYGPPCPPCPAPEFEGGPSVFLFPPKPKDTLMISRTPEVTCVVVDVSQEDPEVQFNWYVDGVEVHNAKTKPREEQFNSTYRVVSVLTVLHQDWLNGKEYKCKVSNKGLPSSIEKTISKAKGQPREPQVYTLPPSQEEMTKNQVSLTCLVKGFYPSDIAVEWESNGQPENNYKTTPPVLDSDGSFFLYSRLTVDKSRWQEGNVFSCSVMHEALHNHYTQKSLSLSLGGGGSGSAHPIPDSSPLLQFGGQVRQRYLYTDDACQTEAHLEIREDGTVGGAADQSPESLLQLKALKPGVIQILGVKTSRFLCQRPDGALYGSLHFDPEACSFRELLLEDGYNVYQSEAHGLPLHLCGNKSPHRDPAPRGPARFLPLPGLPPAPPEPPGILAPQPPDVGSSDPLSMVGSQGRSPSYAS

SEQ ID NO: 1901 - protein, 467 aa, Artificial Sequence
  Fusion Protein
GHGEGTFTSDKSKQLEEEAVRLFIEWLKAGGPGGGGGGGSGGGGSGGGGSAESKYGPPCPPCPAPEFEGGPSVFLFPPKPKDTLMISRTPEVTCVVVDVSQEDPEVQFNWYVDGVEVHNAKTKPREEQFNSTYRVVSVLTVLHQDWLNGKEYKCKVSNKGLPSSIEKTISKAKGQPREPQVYTLPPSQEEMTKNQVSLTCLVKGFYPSDIAVEWESNGQPENNYKTTPPVLDSDGSFFLYSRLTVDKSRWQEGNVFSCSVMHEALHNHYTQKSLSLSLGGGGSGSAHPIPDSSPLLQFGGQVRQRYLYTDDACQTEAHLEIREDGTVGGAADQSPESLLQLKALKPGVIQILGVKTSRFLCQRPDGALYGSLHFDPEACSFRELLLEDGYNVYQSEAHGLPLHLCGNKSPHRDPAPRGPARFLPLPGLPPAPPEPPGILAPQPPDVGSSDPLSMVYPSQGRSPSYAS

SEQ ID NO: 1902 - protein, 472 aa, Artificial Sequence
  Fusion Protein
GHGEGTFTSDLSKQLEEERVQLFIEWLKAGGPSSGAPPPSGGGGGGGSGGGGSGGGGSADKTHTCPPCPAPEAAGGPSVFLFPPKPKDTLMISRTPEVTCVVVDVSHEDPEVKFNWYVDGVEVHNAKTKPREEQYNSTYRVVSVLTVLHQDWLNGKEYKCKVSNKALPAPIEKTISKAKGQPREPQVYTLPPSRDELTKNQVSLTCLVKGFYPSDIAVEWESNGQPENNYKTTPPVLDSDGSFFLYSKLTVDKSRWQQGNVFSCSVMHEALHNHYTQKSLSLSPGGGGSGSAHPIPDSSPLLQFGGQVRQRYLYTDDACQTEAHLEIREDGTVGGAADQSPESLLQLKALKPGVIQILGVKTSRFLCQRPDGALYGSLHFDPEACSFRELLLEDGYNVYQSEAHGLPLHLPGCKSPHRDPAPRGPARFLPLPGLPPAPPEPPGILAPQPPDVGSSDPLSMVGSQGRSPSYAS

SEQ ID NO: 1903 - protein, 473 aa, Artificial Sequence
  Fusion Protein
GHGEGTFTSDLSKQLEEERVQLFIEWLKAGGPSSGAPPPSGGGGGGGSGGGGSGGGGSADKTHTCPPCPAPEAAGGPSVFLFPPKPKDTLMISRTPEVTCVVVDVSHEDPEVKFNWYVDGVEVHNAKTKPREEQYNSTYRVVSVLTVLHQDWLNGKEYKCKVSNKALPAPIEKTISKAKGQPREPQVYTLPPSRDELTKNQVSLTCLVKGFYPSDIAVEWESNGQPENNYKTTPPVLDSDGSFFLYSKLTVDKSRWQQGNVFSCSVMHEALHNHYTQKSLSLSPGGGGSGSAHPIPDSSPLLQFGGQVRQRYLYTDDACQTEAHLEIREDGTVGGAADQSPESLLQLKALKPGVIQILGVKTSRFLCQRPDGALYGSLHFDPEACSFRELLLEDGYNVYQSEAHGLPLHLPGCKSPHRDPAPRGPARFLPLPGLPPAPPEPPGILAPQPPDVGSSDPLSMVYPSQGRSPSYAS

SEQ ID NO: 1904 - protein, 472 aa, Artificial Sequence
  Fusion Protein
GHGEGTFTSDLSKQLEEERVQLFIEWLKAGGPSSGAPPPSGGGGGGGSGGGGSGGGGSADKTHTCPPCPAPEAAGGPSVFLFPPKPKDTLMISRTPEVTCVVVDVSHEDPEVKFNWYVDGVEVHNAKTKPREEQYNSTYRVVSVLTVLHQDWLNGKEYKCKVSNKALPAPIEKTISKAKGQPREPQVYTLPPSRDELTKNQVSLTCLVKGFYPSDIAVEWESNGQPENNYKTTPPVLDSDGSFFLYSKLTVDKSRWQQGNVFSCSVMHEALHNHYTQKSLSLSPGGGGSGSAHPIPDSSPLLQFGGQVRQRYLYTDDACQTEAHLEIREDGTVGGAADQSPESLLQLKALKPGVIQILGVKTSRFLCQRPDGALYGSLHFDPEACSFRELLLEDGYNVYQSEAHGLPLHLCGNKSPHRDPAPRGPARFLPLPGLPPAPPEPPGILAPQPPDVGSSDPLSMVGSQGRSPSYAS

SEQ ID NO: 1905 - protein, 473 aa, Artificial Sequence
  Fusion Protein
GHGEGTFTSDLSKQLEEERVQLFIEWLKAGGPSSGAPPPSGGGGGGGSGGGGSGGGGSADKTHTCPPCPAPEAAGGPSVFLFPPKPKDTLMISRTPEVTCVVVDVSHEDPEVKFNWYVDGVEVHNAKTKPREEQYNSTYRVVSVLTVLHQDWLNGKEYKCKVSNKALPAPIEKTISKAKGQPREPQVYTLPPSRDELTKNQVSLTCLVKGFYPSDIAVEWESNGQPENNYKTTPPVLDSDGSFFLYSKLTVDKSRWQQGNVFSCSVMHEALHNHYTQKSLSLSPGGGGSGSAHPIPDSSPLLQFGGQVRQRYLYTDDACQTEAHLEIREDGTVGGAADQSPESLLQLKALKPGVIQILGVKTSRFLCQRPDGALYGSLHFDPEACSFRELLLEDGYNVYQSEAHGLPLHLCGNKSPHRDPAPRGPARFLPLPGLPPAPPEPPGILAPQPPDVGSSDPLSMVYPSQGRSPSYAS

SEQ ID NO: 1906 - protein, 472 aa, Artificial Sequence
  Fusion Protein
GHGEGTFTSDLSKQLEEERVQLFIEWLKAGGPSSGAPPPSGGGGGGGSGGGGSGGGGSADKTHTCPPCPAPELLGGPSVFLFPPKPKDTLMISRTPEVTCVVVDVSHEDPEVKFNWYVDGVEVHNAKTKPREEQYNNASRVVSVLTVLHQDWLNGKEYKCKVSNKALPAPIEKTISKAKGQPREPQVYTLPPSRDELTKNQVSLTCLVKGFYPSDIAVEWESNGQPENNYKTTPPVLDSDGSFFLYSKLTVDKSRWQQGNVFSCSVMHEALHNHYTQKSLSLSPGGGGSGSAHPIPDSSPLLQFGGQVRQRYLYTDDACQTEAHLEIREDGTVGGAADQSPESLLQLKALKPGVIQILGVKTSRFLCQRPDGALYGSLHFDPEACSFRELLLEDGYNVYQSEAHGLPLHLPGCKSPHRDPAPRGPARFLPLPGLPPAPPEPPGILAPQPPDVGSSDPLSMVGSQGRSPSYAS

SEQ ID NO: 1907 - protein, 473 aa, Artificial Sequence
  Fusion Protein
GHGEGTFTSDLSKQLEEERVQLFIEWLKAGGPSSGAPPPSGGGGGGGSGGGGSGGGGSADKTHTCPPCPAPELLGGPSVFLFPPKPKDTLMISRTPEVTCVVVDVSHEDPEVKFNWYVDGVEVHNAKTKPREEQYNNASRVVSVLTVLHQDWLNGKEYKCKVSNKALPAPIEKTISKAKGQPREPQVYTLPPSRDELTKNQVSLTCLVKGFYPSDIAVEWESNGQPENNYKTTPPVLDSDGSFFLYSKLTVDKSRWQQGNVFSCSVMHEALHNHYTQKSLSLSPGGGGSGSAHPIPDSSPLLQFGGQVRQRYLYTDDACQTEAHLEIREDGTVGGAADQSPESLLQLKALKPGVIQILGVKTSRFLCQRPDGALYGSLHFDPEACSFRELLLEDGYNVYQSEAHGLPLHLPGCKSPHRDPAPRGPARFLPLPGLPPAPPEPPGILAPQPPDVGSSDPLSMVYPSQGRSPSYAS

SEQ ID NO: 1908 - protein, 472 aa, Artificial Sequence
  Fusion Protein
GHGEGTFTSDLSKQLEEERVQLFIEWLKAGGPSSGAPPPSGGGGGGGSGGGGSGGGGSADKTHTCPPCPAPELLGGPSVFLFPPKPKDTLMISRTPEVTCVVVDVSHEDPEVKFNWYVDGVEVHNAKTKPREEQYNNASRVVSVLTVLHQDWLNGKEYKCKVSNKALPAPIEKTISKAKGQPREPQVYTLPPSRDELTKNQVSLTCLVKGFYPSDIAVEWESNGQPENNYKTTPPVLDSDGSFFLYSKLTVDKSRWQQGNVFSCSVMHEALHNHYTQKSLSLSPGGGGSGSAHPIPDSSPLLQFGGQVRQRYLYTDDACQTEAHLEIREDGTVGGAADQSPESLLQLKALKPGVIQILGVKTSRFLCQRPDGALYGSLHFDPEACSFRELLLEDGYNVYQSEAHGLPLHLCGNKSPHRDPAPRGPARFLPLPGLPPAPPEPPGILAPQPPDVGSSDPLSMVGSQGRSPSYAS

SEQ ID NO: 1909 - protein, 473 aa, Artificial Sequence
  Fusion Protein
GHGEGTFTSDLSKQLEEERVQLFIEWLKAGGPSSGAPPPSGGGGGGGSGGGGSGGGGSADKTHTCPPCPAPELLGGPSVFLFPPKPKDTLMISRTPEVTCVVVDVSHEDPEVKFNWYVDGVEVHNAKTKPREEQYNNASRVVSVLTVLHQDWLNGKEYKCKVSNKALPAPIEKTISKAKGQPREPQVYTLPPSRDELTKNQVSLTCLVKGFYPSDIAVEWESNGQPENNYKTTPPVLDSDGSFFLYSKLTVDKSRWQQGNVFSCSVMHEALHNHYTQKSLSLSPGGGGSGSAHPIPDSSPLLQFGGQVRQRYLYTDDACQTEAHLEIREDGTVGGAADQSPESLLQLKALKPGVIQILGVKTSRFLCQRPDGALYGSLHFDPEACSFRELLLEDGYNVYQSEAHGLPLHLCGNKSPHRDPAPRGPARFLPLPGLPPAPPEPPGILAPQPPDVGSSDPLSMVYPSQGRSPSYAS

SEQ ID NO: 1910 - protein, 474 aa, Artificial Sequence
  Fusion Protein
GHGEGTFTSDLSKQLEEERVQLFIEWLKAGGPSSGAPPPSGGGGGGGSGGGGSGGGGSAESKYGPPCPPCPAPEFEGGPSVFLFPPKPKDTLMISRTPEVTCVVVDVSQEDPEVQFNWYVDGVEVHNAKTKPREEQFNSTYRVVSVLTVLHQDWLNGKEYKCKVSNKGLPSSIEKTISKAKGQPREPQVYTLPPSQEEMTKNQVSLTCLVKGFYPSDIAVEWESNGQPENNYKTTPPVLDSDGSFFLYSRLTVDKSRWQEGNVFSCSVMHEALHNHYTQKSLSLSLGGGGSGSAHPIPDSSPLLQFGGQVRQRYLYTDDACQTEAHLEIREDGTVGGAADQSPESLLQLKALKPGVIQILGVKTSRFLCQRPDGALYGSLHFDPEACSFRELLLEDGYNVYQSEAHGLPLHLPGCKSPHRDPAPRGPARFLPLPGLPPAPPEPPGILAPQPPDVGSSDPLSMVGSQGRSPSYAS

SEQ ID NO: 1911 - protein, 475 aa, Artificial Sequence
  Fusion Protein
GHGEGTFTSDLSKQLEEERVQLFIEWLKAGGPSSGAPPPSGGGGGGGSGGGGSGGGGSAESKYGPPCPPCPAPEFEGGPSVFLFPPKPKDTLMISRTPEVTCVVVDVSQEDPEVQFNWYVDGVEVHNAKTKPREEQFNSTYRVVSVLTVLHQDWLNGKEYKCKVSNKGLPSSIEKTISKAKGQPREPQVYTLPPSQEEMTKNQVSLTCLVKGFYPSDIAVEWESNGQPENNYKTTPPVLDSDGSFFLYSRLTVDKSRWQEGNVFSCSVMHEALHNHYTQKSLSLSLGGGGSGSAHPIPDSSPLLQFGGQVRQRYLYTDDACQTEAHLEIREDGTVGGAADQSPESLLQLKALKPGVIQILGVKTSRFLCQRPDGALYGSLHFDPEACSFRELLLEDGYNVYQSEAHGLPLHLPGCKSPHRDPAPRGPARFLPLPGLPPAPPEPPGILAPQPPDVGSSDPLSMVYPSQGRSPSYAS

SEQ ID NO: 1912 - protein, 474 aa, Artificial Sequence
  Fusion Protein
GHGEGTFTSDLSKQLEEERVQLFIEWLKAGGPSSGAPPPSGGGGGGGSGGGGSGGGGSAESKYGPPCPPCPAPEFEGGPSVFLFPPKPKDTLMISRTPEVTCVVVDVSQEDPEVQFNWYVDGVEVHNAKTKPREEQFNSTYRVVSVLTVLHQDWLNGKEYKCKVSNKGLPSSIEKTISKAKGQPREPQVYTLPPSQEEMTKNQVSLTCLVKGFYPSDIAVEWESNGQPENNYKTTPPVLDSDGSFFLYSRLTVDKSRWQEGNVFSCSVMHEALHNHYTQKSLSLSLGGGGSGSAHPIPDSSPLLQFGGQVRQRYLYTDDACQTEAHLEIREDGTVGGAADQSPESLLQLKALKPGVIQILGVKTSRFLCQRPDGALYGSLHFDPEACSFRELLLEDGYNVYQSEAHGLPLHLCGNKSPHRDPAPRGPARFLPLPGLPPAPPEPPGILAPQPPDVGSSDPLSMVGSQGRSPSYAS

SEQ ID NO: 1913 - protein, 475 aa, Artificial Sequence
  Fusion Protein
GHGEGTFTSDLSKQLEEERVQLFIEWLKAGGPSSGAPPPSGGGGGGGSGGGGSGGGGSAESKYGPPCPPCPAPEFEGGPSVFLFPPKPKDTLMISRTPEVTCVVVDVSQEDPEVQFNWYVDGVEVHNAKTKPREEQFNSTYRVVSVLTVLHQDWLNGKEYKCKVSNKGLPSSIEKTISKAKGQPREPQVYTLPPSQEEMTKNQVSLTCLVKGFYPSDIAVEWESNGQPENNYKTTPPVLDSDGSFFLYSRLTVDKSRWQEGNVFSCSVMHEALHNHYTQKSLSLSLGGGGSGSAHPIPDSSPLLQFGGQVRQRYLYTDDACQTEAHLEIREDGTVGGAADQSPESLLQLKALKPGVIQILGVKTSRFLCQRPDGALYGSLHFDPEACSFRELLLEDGYNVYQSEAHGLPLHLCGNKSPHRDPAPRGPARFLPLPGLPPAPPEPPGILAPQPPDVGSSDPLSMVYPSQGRSPSYAS

SEQ ID NO: 1914 - protein, 471 aa, Artificial Sequence
  Fusion Protein
HAQGTFTSDLSKQLESRRAQEFIEWLLATGPESGAPPPSGGGGGGGSGGGGSGGGGSADKTHTCPPCPAPEAAGGPSVFLFPPKPKDTLMISRTPEVTCVVVDVSHEDPEVKFNWYVDGVEVHNAKTKPREEQYNSTYRVVSVLTVLHQDWLNGKEYKCKVSNKALPAPIEKTISKAKGQPREPQVYTLPPSRDELTKNQVSLTCLVKGFYPSDIAVEWESNGQPENNYKTTPPVLDSDGSFFLYSKLTVDKSRWQQGNVFSCSVMHEALHNHYTQKSLSLSPGGGGSGSAHPIPDSSPLLQFGGQVRQRYLYTDDACQTEAHLEIREDGTVGGAADQSPESLLQLKALKPGVIQILGVKTSRFLCQRPDGALYGSLHFDPEACSFRELLLEDGYNVYQSEAHGLPLHLPGCKSPHRDPAPRGPARFLPLPGLPPAPPEPPGILAPQPPDVGSSDPLSMVGSQGRSPSYAS

SEQ ID NO: 1915 - protein, 472 aa, Artificial Sequence
  Fusion Protein
HAQGTFTSDLSKQLESRRAQEFIEWLLATGPESGAPPPSGGGGGGGSGGGGSGGGGSADKTHTCPPCPAPEAAGGPSVFLFPPKPKDTLMISRTPEVTCVVVDVSHEDPEVKFNWYVDGVEVHNAKTKPREEQYNSTYRVVSVLTVLHQDWLNGKEYKCKVSNKALPAPIEKTISKAKGQPREPQVYTLPPSRDELTKNQVSLTCLVKGFYPSDIAVEWESNGQPENNYKTTPPVLDSDGSFFLYSKLTVDKSRWQQGNVFSCSVMHEALHNHYTQKSLSLSPGGGGSGSAHPIPDSSPLLQFGGQVRQRYLYTDDACQTEAHLEIREDGTVGGAADQSPESLLQLKALKPGVIQILGVKTSRFLCQRPDGALYGSLHFDPEACSFRELLLEDGYNVYQSEAHGLPLHLPGCKSPHRDPAPRGPARFLPLPGLPPAPPEPPGILAPQPPDVGSSDPLSMVYPSQGRSPSYAS

SEQ ID NO: 1916 - protein, 471 aa, Artificial Sequence
  Fusion Protein
HAQGTFTSDLSKQLESRRAQEFIEWLLATGPESGAPPPSGGGGGGGSGGGGSGGGGSADKTHTCPPCPAPEAAGGPSVFLFPPKPKDTLMISRTPEVTCVVVDVSHEDPEVKFNWYVDGVEVHNAKTKPREEQYNSTYRVVSVLTVLHQDWLNGKEYKCKVSNKALPAPIEKTISKAKGQPREPQVYTLPPSRDELTKNQVSLTCLVKGFYPSDIAVEWESNGQPENNYKTTPPVLDSDGSFFLYSKLTVDKSRWQQGNVFSCSVMHEALHNHYTQKSLSLSPGGGGSGSAHPIPDSSPLLQFGGQVRQRYLYTDDACQTEAHLEIREDGTVGGAADQSPESLLQLKALKPGVIQILGVKTSRFLCQRPDGALYGSLHFDPEACSFRELLLEDGYNVYQSEAHGLPLHLCGNKSPHRDPAPRGPARFLPLPGLPPAPPEPPGILAPQPPDVGSSDPLSMVGSQGRSPSYAS

SEQ ID NO: 1917 - protein, 472 aa, Artificial Sequence
  Fusion Protein
HAQGTFTSDLSKQLESRRAQEFIEWLLATGPESGAPPPSGGGGGGGSGGGGSGGGGSADKTHTCPPCPAPEAAGGPSVFLFPPKPKDTLMISRTPEVTCVVVDVSHEDPEVKFNWYVDGVEVHNAKTKPREEQYNSTYRVVSVLTVLHQDWLNGKEYKCKVSNKALPAPIEKTISKAKGQPREPQVYTLPPSRDELTKNQVSLTCLVKGFYPSDIAVEWESNGQPENNYKTTPPVLDSDGSFFLYSKLTVDKSRWQQGNVFSCSVMHEALHNHYTQKSLSLSPGGGGSGSAHPIPDSSPLLQFGGQVRQRYLYTDDACQTEAHLEIREDGTVGGAADQSPESLLQLKALKPGVIQILGVKTSRFLCQRPDGALYGSLHFDPEACSFRELLLEDGYNVYQSEAHGLPLHLCGNKSPHRDPAPRGPARFLPLPGLPPAPPEPPGILAPQPPDVGSSDPLSMVYPSQGRSPSYAS

SEQ ID NO: 1918 - protein, 471 aa, Artificial Sequence
  Fusion Protein
HAQGTFTSDLSKQLESRRAQEFIEWLLATGPESGAPPPSGGGGGGGSGGGGSGGGGSADKTHTCPPCPAPELLGGPSVFLFPPKPKDTLMISRTPEVTCVVVDVSHEDPEVKFNWYVDGVEVHNAKTKPREEQYNNASRVVSVLTVLHQDWLNGKEYKCKVSNKALPAPIEKTISKAKGQPREPQVYTLPPSRDELTKNQVSLTCLVKGFYPSDIAVEWESNGQPENNYKTTPPVLDSDGSFFLYSKLTVDKSRWQQGNVFSCSVMHEALHNHYTQKSLSLSPGGGGSGSAHPIPDSSPLLQFGGQVRQRYLYTDDACQTEAHLEIREDGTVGGAADQSPESLLQLKALKPGVIQILGVKTSRFLCQRPDGALYGSLHFDPEACSFRELLLEDGYNVYQSEAHGLPLHLPGCKSPHRDPAPRGPARFLPLPGLPPAPPEPPGILAPQPPDVGSSDPLSMVGSQGRSPSYAS

SEQ ID NO: 1919 - protein, 472 aa, Artificial Sequence
  Fusion Protein
HAQGTFTSDLSKQLESRRAQEFIEWLLATGPESGAPPPSGGGGGGGSGGGGSGGGGSADKTHTCPPCPAPELLGGPSVFLFPPKPKDTLMISRTPEVTCVVVDVSHEDPEVKFNWYVDGVEVHNAKTKPREEQYNNASRVVSVLTVLHQDWLNGKEYKCKVSNKALPAPIEKTISKAKGQPREPQVYTLPPSRDELTKNQVSLTCLVKGFYPSDIAVEWESNGQPENNYKTTPPVLDSDGSFFLYSKLTVDKSRWQQGNVFSCSVMHEALHNHYTQKSLSLSPGGGGSGSAHPIPDSSPLLQFGGQVRQRYLYTDDACQTEAHLEIREDGTVGGAADQSPESLLQLKALKPGVIQILGVKTSRFLCQRPDGALYGSLHFDPEACSFRELLLEDGYNVYQSEAHGLPLHLPGCKSPHRDPAPRGPARFLPLPGLPPAPPEPPGILAPQPPDVGSSDPLSMVYPSQGRSPSYAS

SEQ ID NO: 1920 - protein, 471 aa, Artificial Sequence
  Fusion Protein
HAQGTFTSDLSKQLESRRAQEFIEWLLATGPESGAPPPSGGGGGGGSGGGGSGGGGSADKTHTCPPCPAPELLGGPSVFLFPPKPKDTLMISRTPEVTCVVVDVSHEDPEVKFNWYVDGVEVHNAKTKPREEQYNNASRVVSVLTVLHQDWLNGKEYKCKVSNKALPAPIEKTISKAKGQPREPQVYTLPPSRDELTKNQVSLTCLVKGFYPSDIAVEWESNGQPENNYKTTPPVLDSDGSFFLYSKLTVDKSRWQQGNVFSCSVMHEALHNHYTQKSLSLSPGGGGSGSAHPIPDSSPLLQFGGQVRQRYLYTDDACQTEAHLEIREDGTVGGAADQSPESLLQLKALKPGVIQILGVKTSRFLCQRPDGALYGSLHFDPEACSFRELLLEDGYNVYQSEAHGLPLHLCGNKSPHRDPAPRGPARFLPLPGLPPAPPEPPGILAPQPPDVGSSDPLSMVGSQGRSPSYAS

SEQ ID NO: 1921 - protein, 472 aa, Artificial Sequence
  Fusion Protein
HAQGTFTSDLSKQLESRRAQEFIEWLLATGPESGAPPPSGGGGGGGSGGGGSGGGGSADKTHTCPPCPAPELLGGPSVFLFPPKPKDTLMISRTPEVTCVVVDVSHEDPEVKFNWYVDGVEVHNAKTKPREEQYNNASRVVSVLTVLHQDWLNGKEYKCKVSNKALPAPIEKTISKAKGQPREPQVYTLPPSRDELTKNQVSLTCLVKGFYPSDIAVEWESNGQPENNYKTTPPVLDSDGSFFLYSKLTVDKSRWQQGNVFSCSVMHEALHNHYTQKSLSLSPGGGGSGSAHPIPDSSPLLQFGGQVRQRYLYTDDACQTEAHLEIREDGTVGGAADQSPESLLQLKALKPGVIQILGVKTSRFLCQRPDGALYGSLHFDPEACSFRELLLEDGYNVYQSEAHGLPLHLCGNKSPHRDPAPRGPARFLPLPGLPPAPPEPPGILAPQPPDVGSSDPLSMVYPSQGRSPSYAS

SEQ ID NO: 1922 - protein, 474 aa, Artificial Sequence
  Fusion Protein
HAQGTFTSDLSKQLESRRAQEFIEWLLATGPESGAPPPSGGGGGGGSGGGGSGGGGSAESKYGPPCPPCPAPEFEGGPSVFLFPPKPKDTLMISRTPEVTCVVVDVSQEDPEVQFNWYVDGVEVHNAKTKPREEQFNSTYRVVSVLTVLHQDWLNGKEYKCKVSNKGLPSSIEKTISKAKGQPREPQVYTLPPSQEEMTKNQVSLTCLVKGFYPSDIAVEWESNGQPENNYKTTPPVLDSDGSFFLYSRLTVDKSRWQEGNVFSCSVMHEALHNHYTQKSLSLSLGGGGSGSAHPIPDSSPLLQFGGQVRQRYLYTDDACQTEAHLEIREDGTVGGAADQSPESLLQLKALKPGVIQILGVKTSRFLCQRPDGALYGSLHFDPEACSFRELLLEDGYNVYQSEAHGLPLHLPGCKSPHRDPAPRGPARFLPLPGLPPAPPEPPGILAPQPPDVGSSDPLSMVYPSQGRSPSYAS

SEQ ID NO: 1923 - protein, 473 aa, Artificial Sequence
  Fusion Protein
HAQGTFTSDLSKQLESRRAQEFIEWLLATGPESGAPPPSGGGGGGGSGGGGSGGGGSAESKYGPPCPPCPAPEFEGGPSVFLFPPKPKDTLMISRTPEVTCVVVDVSQEDPEVQFNWYVDGVEVHNAKTKPREEQFNSTYRVVSVLTVLHQDWLNGKEYKCKVSNKGLPSSIEKTISKAKGQPREPQVYTLPPSQEEMTKNQVSLTCLVKGFYPSDIAVEWESNGQPENNYKTTPPVLDSDGSFFLYSRLTVDKSRWQEGNVFSCSVMHEALHNHYTQKSLSLSLGGGGSGSAHPIPDSSPLLQFGGQVRQRYLYTDDACQTEAHLEIREDGTVGGAADQSPESLLQLKALKPGVIQILGVKTSRFLCQRPDGALYGSLHFDPEACSFRELLLEDGYNVYQSEAHGLPLHLCGNKSPHRDPAPRGPARFLPLPGLPPAPPEPPGILAPQPPDVGSSDPLSMVGSQGRSPSYAS

SEQ ID NO: 1924 - protein, 474 aa, Artificial Sequence
  Fusion Protein
HAQGTFTSDLSKQLESRRAQEFIEWLLATGPESGAPPPSGGGGGGGSGGGGSGGGGSAESKYGPPCPPCPAPEFEGGPSVFLFPPKPKDTLMISRTPEVTCVVVDVSQEDPEVQFNWYVDGVEVHNAKTKPREEQFNSTYRVVSVLTVLHQDWLNGKEYKCKVSNKGLPSSIEKTISKAKGQPREPQVYTLPPSQEEMTKNQVSLTCLVKGFYPSDIAVEWESNGQPENNYKTTPPVLDSDGSFFLYSRLTVDKSRWQEGNVFSCSVMHEALHNHYTQKSLSLSLGGGGSGSAHPIPDSSPLLQFGGQVRQRYLYTDDACQTEAHLEIREDGTVGGAADQSPESLLQLKALKPGVIQILGVKTSRFLCQRPDGALYGSLHFDPEACSFRELLLEDGYNVYQSEAHGLPLHLCGNKSPHRDPAPRGPARFLPLPGLPPAPPEPPGILAPQPPDVGSSDPLSMVYPSQGRSPSYAS

SEQ ID NO: 1925 - protein, 471 aa, Artificial Sequence
  Fusion Protein
HSQGTFTSDLSKQLESRRARRFIEWLLATGPESGAPPPSGGGGGGGSGGGGSGGGGSADKTHTCPPCPAPEAAGGPSVFLFPPKPKDTLMISRTPEVTCVVVDVSHEDPEVKFNWYVDGVEVHNAKTKPREEQYNSTYRVVSVLTVLHQDWLNGKEYKCKVSNKALPAPIEKTISKAKGQPREPQVYTLPPSRDELTKNQVSLTCLVKGFYPSDIAVEWESNGQPENNYKTTPPVLDSDGSFFLYSKLTVDKSRWQQGNVFSCSVMHEALHNHYTQKSLSLSPGGGGSGSAHPIPDSSPLLQFGGQVRQRYLYTDDACQTEAHLEIREDGTVGGAADQSPESLLQLKALKPGVIQILGVKTSRFLCQRPDGALYGSLHFDPEACSFRELLLEDGYNVYQSEAHGLPLHLPGCKSPHRDPAPRGPARFLPLPGLPPAPPEPPGILAPQPPDVGSSDPLSMVGSQGRSPSYAS

SEQ ID NO: 1926 - protein, 472 aa, Artificial Sequence
  Fusion Protein
HSQGTFTSDLSKQLESRRARRFIEWLLATGPESGAPPPSGGGGGGGSGGGGSGGGGSADKTHTCPPCPAPEAAGGPSVFLFPPKPKDTLMISRTPEVTCVVVDVSHEDPEVKFNWYVDGVEVHNAKTKPREEQYNSTYRVVSVLTVLHQDWLNGKEYKCKVSNKALPAPIEKTISKAKGQPREPQVYTLPPSRDELTKNQVSLTCLVKGFYPSDIAVEWESNGQPENNYKTTPPVLDSDGSFFLYSKLTVDKSRWQQGNVFSCSVMHEALHNHYTQKSLSLSPGGGGSGSAHPIPDSSPLLQFGGQVRQRYLYTDDACQTEAHLEIREDGTVGGAADQSPESLLQLKALKPGVIQILGVKTSRFLCQRPDGALYGSLHFDPEACSFRELLLEDGYNVYQSEAHGLPLHLPGCKSPHRDPAPRGPARFLPLPGLPPAPPEPPGILAPQPPDVGSSDPLSMVYPSQGRSPSYAS

SEQ ID NO: 1927 - protein, 471 aa, Artificial Sequence
  Fusion Protein
HSQGTFTSDLSKQLESRRARRFIEWLLATGPESGAPPPSGGGGGGGSGGGGSGGGGSADKTHTCPPCPAPEAAGGPSVFLFPPKPKDTLMISRTPEVTCVVVDVSHEDPEVKFNWYVDGVEVHNAKTKPREEQYNSTYRVVSVLTVLHQDWLNGKEYKCKVSNKALPAPIEKTISKAKGQPREPQVYTLPPSRDELTKNQVSLTCLVKGFYPSDIAVEWESNGQPENNYKTTPPVLDSDGSFFLYSKLTVDKSRWQQGNVFSCSVMHEALHNHYTQKSLSLSPGGGGSGSAHPIPDSSPLLQFGGQVRQRYLYTDDACQTEAHLEIREDGTVGGAADQSPESLLQLKALKPGVIQILGVKTSRFLCQRPDGALYGSLHFDPEACSFRELLLEDGYNVYQSEAHGLPLHLCGNKSPHRDPAPRGPARFLPLPGLPPAPPEPPGILAPQPPDVGSSDPLSMVGSQGRSPSYAS

SEQ ID NO: 1928 - protein, 472 aa, Artificial Sequence
  Fusion Protein
HSQGTFTSDLSKQLESRRARRFIEWLLATGPESGAPPPSGGGGGGGSGGGGSGGGGSADKTHTCPPCPAPEAAGGPSVFLFPPKPKDTLMISRTPEVTCVVVDVSHEDPEVKFNWYVDGVEVHNAKTKPREEQYNSTYRVVSVLTVLHQDWLNGKEYKCKVSNKALPAPIEKTISKAKGQPREPQVYTLPPSRDELTKNQVSLTCLVKGFYPSDIAVEWESNGQPENNYKTTPPVLDSDGSFFLYSKLTVDKSRWQQGNVFSCSVMHEALHNHYTQKSLSLSPGGGGSGSAHPIPDSSPLLQFGGQVRQRYLYTDDACQTEAHLEIREDGTVGGAADQSPESLLQLKALKPGVIQILGVKTSRFLCQRPDGALYGSLHFDPEACSFRELLLEDGYNVYQSEAHGLPLHLCGNKSPHRDPAPRGPARFLPLPGLPPAPPEPPGILAPQPPDVGSSDPLSMVYPSQGRSPSYAS

SEQ ID NO: 1929 - protein, 471 aa, Artificial Sequence
  Fusion Protein
HSQGTFTSDLSKQLESRRARRFIEWLLATGPESGAPPPSGGGGGGGSGGGGSGGGGSADKTHTCPPCPAPELLGGPSVFLFPPKPKDTLMISRTPEVTCVVVDVSHEDPEVKFNWYVDGVEVHNAKTKPREEQYNNASRVVSVLTVLHQDWLNGKEYKCKVSNKALPAPIEKTISKAKGQPREPQVYTLPPSRDELTKNQVSLTCLVKGFYPSDIAVEWESNGQPENNYKTTPPVLDSDGSFFLYSKLTVDKSRWQQGNVFSCSVMHEALHNHYTQKSLSLSPGGGGSGSAHPIPDSSPLLQFGGQVRQRYLYTDDACQTEAHLEIREDGTVGGAADQSPESLLQLKALKPGVIQILGVKTSRFLCQRPDGALYGSLHFDPEACSFRELLLEDGYNVYQSEAHGLPLHLPGCKSPHRDPAPRGPARFLPLPGLPPAPPEPPGILAPQPPDVGSSDPLSMVGSQGRSPSYAS

SEQ ID NO: 1930 - protein, 472 aa, Artificial Sequence
  Fusion Protein
HSQGTFTSDLSKQLESRRARRFIEWLLATGPESGAPPPSGGGGGGGSGGGGSGGGGSADKTHTCPPCPAPELLGGPSVFLFPPKPKDTLMISRTPEVTCVVVDVSHEDPEVKFNWYVDGVEVHNAKTKPREEQYNNASRVVSVLTVLHQDWLNGKEYKCKVSNKALPAPIEKTISKAKGQPREPQVYTLPPSRDELTKNQVSLTCLVKGFYPSDIAVEWESNGQPENNYKTTPPVLDSDGSFFLYSKLTVDKSRWQQGNVFSCSVMHEALHNHYTQKSLSLSPGGGGSGSAHPIPDSSPLLQFGGQVRQRYLYTDDACQTEAHLEIREDGTVGGAADQSPESLLQLKALKPGVIQILGVKTSRFLCQRPDGALYGSLHFDPEACSFRELLLEDGYNVYQSEAHGLPLHLPGCKSPHRDPAPRGPARFLPLPGLPPAPPEPPGILAPQPPDVGSSDPLSMVYPSQGRSPSYAS

SEQ ID NO: 1931 - protein, 471 aa, Artificial Sequence
  Fusion Protein
HSQGTFTSDLSKQLESRRARRFIEWLLATGPESGAPPPSGGGGGGGSGGGGSGGGGSADKTHTCPPCPAPELLGGPSVFLFPPKPKDTLMISRTPEVTCVVVDVSHEDPEVKFNWYVDGVEVHNAKTKPREEQYNNASRVVSVLTVLHQDWLNGKEYKCKVSNKALPAPIEKTISKAKGQPREPQVYTLPPSRDELTKNQVSLTCLVKGFYPSDIAVEWESNGQPENNYKTTPPVLDSDGSFFLYSKLTVDKSRWQQGNVFSCSVMHEALHNHYTQKSLSLSPGGGGSGSAHPIPDSSPLLQFGGQVRQRYLYTDDACQTEAHLEIREDGTVGGAADQSPESLLQLKALKPGVIQILGVKTSRFLCQRPDGALYGSLHFDPEACSFRELLLEDGYNVYQSEAHGLPLHLCGNKSPHRDPAPRGPARFLPLPGLPPAPPEPPGILAPQPPDVGSSDPLSMVGSQGRSPSYAS

SEQ ID NO: 1932 - protein, 472 aa, Artificial Sequence
  Fusion Protein
HSQGTFTSDLSKQLESRRARRFIEWLLATGPESGAPPPSGGGGGGGSGGGGSGGGGSADKTHTCPPCPAPELLGGPSVFLFPPKPKDTLMISRTPEVTCVVVDVSHEDPEVKFNWYVDGVEVHNAKTKPREEQYNNASRVVSVLTVLHQDWLNGKEYKCKVSNKALPAPIEKTISKAKGQPREPQVYTLPPSRDELTKNQVSLTCLVKGFYPSDIAVEWESNGQPENNYKTTPPVLDSDGSFFLYSKLTVDKSRWQQGNVFSCSVMHEALHNHYTQKSLSLSPGGGGSGSAHPIPDSSPLLQFGGQVRQRYLYTDDACQTEAHLEIREDGTVGGAADQSPESLLQLKALKPGVIQILGVKTSRFLCQRPDGALYGSLHFDPEACSFRELLLEDGYNVYQSEAHGLPLHLCGNKSPHRDPAPRGPARFLPLPGLPPAPPEPPGILAPQPPDVGSSDPLSMVYPSQGRSPSYAS

SEQ ID NO: 1933 - protein, 474 aa, Artificial Sequence
  Fusion Protein
HSQGTFTSDLSKQLESRRARRFIEWLLATGPESGAPPPSGGGGGGGSGGGGSGGGGSAESKYGPPCPPCPAPEFEGGPSVFLFPPKPKDTLMISRTPEVTCVVVDVSQEDPEVQFNWYVDGVEVHNAKTKPREEQFNSTYRVVSVLTVLHQDWLNGKEYKCKVSNKGLPSSIEKTISKAKGQPREPQVYTLPPSQEEMTKNQVSLTCLVKGFYPSDIAVEWESNGQPENNYKTTPPVLDSDGSFFLYSRLTVDKSRWQEGNVFSCSVMHEALHNHYTQKSLSLSLGGGGSGSAHPIPDSSPLLQFGGQVRQRYLYTDDACQTEAHLEIREDGTVGGAADQSPESLLQLKALKPGVIQILGVKTSRFLCQRPDGALYGSLHFDPEACSFRELLLEDGYNVYQSEAHGLPLHLPGCKSPHRDPAPRGPARFLPLPGLPPAPPEPPGILAPQPPDVGSSDPLSMVYPSQGRSPSYAS

SEQ ID NO: 1934 - protein, 473 aa, Artificial Sequence
  Fusion Protein
HSQGTFTSDLSKQLESRRARRFIEWLLATGPESGAPPPSGGGGGGGSGGGGSGGGGSAESKYGPPCPPCPAPEFEGGPSVFLFPPKPKDTLMISRTPEVTCVVVDVSQEDPEVQFNWYVDGVEVHNAKTKPREEQFNSTYRVVSVLTVLHQDWLNGKEYKCKVSNKGLPSSIEKTISKAKGQPREPQVYTLPPSQEEMTKNQVSLTCLVKGFYPSDIAVEWESNGQPENNYKTTPPVLDSDGSFFLYSRLTVDKSRWQEGNVFSCSVMHEALHNHYTQKSLSLSLGGGGSGSAHPIPDSSPLLQFGGQVRQRYLYTDDACQTEAHLEIREDGTVGGAADQSPESLLQLKALKPGVIQILGVKTSRFLCQRPDGALYGSLHFDPEACSFRELLLEDGYNVYQSEAHGLPLHLCGNKSPHRDPAPRGPARFLPLPGLPPAPPEPPGILAPQPPDVGSSDPLSMVGSQGRSPSYAS

SEQ ID NO: 1935 - protein, 474 aa, Artificial Sequence
  Fusion Protein
HSQGTFTSDLSKQLESRRARRFIEWLLATGPESGAPPPSGGGGGGGSGGGGSGGGGSAESKYGPPCPPCPAPEFEGGPSVFLFPPKPKDTLMISRTPEVTCVVVDVSQEDPEVQFNWYVDGVEVHNAKTKPREEQFNSTYRVVSVLTVLHQDWLNGKEYKCKVSNKGLPSSIEKTISKAKGQPREPQVYTLPPSQEEMTKNQVSLTCLVKGFYPSDIAVEWESNGQPENNYKTTPPVLDSDGSFFLYSRLTVDKSRWQEGNVFSCSVMHEALHNHYTQKSLSLSLGGGGSGSAHPIPDSSPLLQFGGQVRQRYLYTDDACQTEAHLEIREDGTVGGAADQSPESLLQLKALKPGVIQILGVKTSRFLCQRPDGALYGSLHFDPEACSFRELLLEDGYNVYQSEAHGLPLHLCGNKSPHRDPAPRGPARFLPLPGLPPAPPEPPGILAPQPPDVGSSDPLSMVYPSQGRSPSYAS

SEQ ID NO: 1936 - protein, 471 aa, Artificial Sequence
  Fusion Protein
HGEGTFTSDKSQLLEKRAAHLFIEWLIKGGHSKGKPPPKGGGGGGGSGGGGSGGGGSADKTHTCPPCPAPEAAGGPSVFLFPPKPKDTLMISRTPEVTCVVVDVSHEDPEVKFNWYVDGVEVHNAKTKPREEQYNSTYRVVSVLTVLHQDWLNGKEYKCKVSNKALPAPIEKTISKAKGQPREPQVYTLPPSRDELTKNQVSLTCLVKGFYPSDIAVEWESNGQPENNYKTTPPVLDSDGSFFLYSKLTVDKSRWQQGNVFSCSVMHEALHNHYTQKSLSLSPGGGGSGSAHPIPDSSPLLQFGGQVRQRYLYTDDACQTEAHLEIREDGTVGGAADQSPESLLQLKALKPGVIQILGVKTSRFLCQRPDGALYGSLHFDPEACSFRELLLEDGYNVYQSEAHGLPLHLPGCKSPHRDPAPRGPARFLPLPGLPPAPPEPPGILAPQPPDVGSSDPLSMVGSQGRSPSYAS

SEQ ID NO: 1937 - protein, 472 aa, Artificial Sequence
  Fusion Protein
HGEGTFTSDKSQLLEKRAAHLFIEWLIKGGHSKGKPPPKGGGGGGGSGGGGSGGGGSADKTHTCPPCPAPEAAGGPSVFLFPPKPKDTLMISRTPEVTCVVVDVSHEDPEVKFNWYVDGVEVHNAKTKPREEQYNSTYRVVSVLTVLHQDWLNGKEYKCKVSNKALPAPIEKTISKAKGQPREPQVYTLPPSRDELTKNQVSLTCLVKGFYPSDIAVEWESNGQPENNYKTTPPVLDSDGSFFLYSKLTVDKSRWQQGNVFSCSVMHEALHNHYTQKSLSLSPGGGGSGSAHPIPDSSPLLQFGGQVRQRYLYTDDACQTEAHLEIREDGTVGGAADQSPESLLQLKALKPGVIQILGVKTSRFLCQRPDGALYGSLHFDPEACSFRELLLEDGYNVYQSEAHGLPLHLPGCKSPHRDPAPRGPARFLPLPGLPPAPPEPPGILAPQPPDVGSSDPLSMVYPSQGRSPSYAS

SEQ ID NO: 1938 - protein, 471 aa, Artificial Sequence
  Fusion Protein
HGEGTFTSDKSQLLEKRAAHLFIEWLIKGGHSKGKPPPKGGGGGGGSGGGGSGGGGSADKTHTCPPCPAPEAAGGPSVFLFPPKPKDTLMISRTPEVTCVVVDVSHEDPEVKFNWYVDGVEVHNAKTKPREEQYNSTYRVVSVLTVLHQDWLNGKEYKCKVSNKALPAPIEKTISKAKGQPREPQVYTLPPSRDELTKNQVSLTCLVKGFYPSDIAVEWESNGQPENNYKTTPPVLDSDGSFFLYSKLTVDKSRWQQGNVFSCSVMHEALHNHYTQKSLSLSPGGGGSGSAHPIPDSSPLLQFGGQVRQRYLYTDDACQTEAHLEIREDGTVGGAADQSPESLLQLKALKPGVIQILGVKTSRFLCQRPDGALYGSLHFDPEACSFRELLLEDGYNVYQSEAHGLPLHLCGNKSPHRDPAPRGPARFLPLPGLPPAPPEPPGILAPQPPDVGSSDPLSMVGSQGRSPSYAS

SEQ ID NO: 1939 - protein, 472 aa, Artificial Sequence
  Fusion Protein
HGEGTFTSDKSQLLEKRAAHLFIEWLIKGGHSKGKPPPKGGGGGGGSGGGGSGGGGSADKTHTCPPCPAPEAAGGPSVFLFPPKPKDTLMISRTPEVTCVVVDVSHEDPEVKFNWYVDGVEVHNAKTKPREEQYNSTYRVVSVLTVLHQDWLNGKEYKCKVSNKALPAPIEKTISKAKGQPREPQVYTLPPSRDELTKNQVSLTCLVKGFYPSDIAVEWESNGQPENNYKTTPPVLDSDGSFFLYSKLTVDKSRWQQGNVFSCSVMHEALHNHYTQKSLSLSPGGGGSGSAHPIPDSSPLLQFGGQVRQRYLYTDDACQTEAHLEIREDGTVGGAADQSPESLLQLKALKPGVIQILGVKTSRFLCQRPDGALYGSLHFDPEACSFRELLLEDGYNVYQSEAHGLPLHLCGNKSPHRDPAPRGPARFLPLPGLPPAPPEPPGILAPQPPDVGSSDPLSMVYPSQGRSPSYAS

SEQ ID NO: 1940 - protein, 471 aa, Artificial Sequence
  Fusion Protein
HGEGTFTSDKSQLLEKRAAHLFIEWLIKGGHSKGKPPPKGGGGGGGSGGGGSGGGGSADKTHTCPPCPAPELLGGPSVFLFPPKPKDTLMISRTPEVTCVVVDVSHEDPEVKFNWYVDGVEVHNAKTKPREEQYNNASRVVSVLTVLHQDWLNGKEYKCKVSNKALPAPIEKTISKAKGQPREPQVYTLPPSRDELTKNQVSLTCLVKGFYPSDIAVEWESNGQPENNYKTTPPVLDSDGSFFLYSKLTVDKSRWQQGNVFSCSVMHEALHNHYTQKSLSLSPGGGGSGSAHPIPDSSPLLQFGGQVRQRYLYTDDACQTEAHLEIREDGTVGGAADQSPESLLQLKALKPGVIQILGVKTSRFLCQRPDGALYGSLHFDPEACSFRELLLEDGYNVYQSEAHGLPLHLPGCKSPHRDPAPRGPARFLPLPGLPPAPPEPPGILAPQPPDVGSSDPLSMVGSQGRSPSYAS

SEQ ID NO: 1941 - protein, 472 aa, Artificial Sequence
  Fusion Protein
HGEGTFTSDKSQLLEKRAAHLFIEWLIKGGHSKGKPPPKGGGGGGGSGGGGSGGGGSADKTHTCPPCPAPELLGGPSVFLFPPKPKDTLMISRTPEVTCVVVDVSHEDPEVKFNWYVDGVEVHNAKTKPREEQYNNASRVVSVLTVLHQDWLNGKEYKCKVSNKALPAPIEKTISKAKGQPREPQVYTLPPSRDELTKNQVSLTCLVKGFYPSDIAVEWESNGQPENNYKTTPPVLDSDGSFFLYSKLTVDKSRWQQGNVFSCSVMHEALHNHYTQKSLSLSPGGGGSGSAHPIPDSSPLLQFGGQVRQRYLYTDDACQTEAHLEIREDGTVGGAADQSPESLLQLKALKPGVIQILGVKTSRFLCQRPDGALYGSLHFDPEACSFRELLLEDGYNVYQSEAHGLPLHLPGCKSPHRDPAPRGPARFLPLPGLPPAPPEPPGILAPQPPDVGSSDPLSMVYPSQGRSPSYAS

SEQ ID NO: 1942 - protein, 471 aa, Artificial Sequence
  Fusion Protein
HGEGTFTSDKSQLLEKRAAHLFIEWLIKGGHSKGKPPPKGGGGGGGSGGGGSGGGGSADKTHTCPPCPAPELLGGPSVFLFPPKPKDTLMISRTPEVTCVVVDVSHEDPEVKFNWYVDGVEVHNAKTKPREEQYNNASRVVSVLTVLHQDWLNGKEYKCKVSNKALPAPIEKTISKAKGQPREPQVYTLPPSRDELTKNQVSLTCLVKGFYPSDIAVEWESNGQPENNYKTTPPVLDSDGSFFLYSKLTVDKSRWQQGNVFSCSVMHEALHNHYTQKSLSLSPGGGGSGSAHPIPDSSPLLQFGGQVRQRYLYTDDACQTEAHLEIREDGTVGGAADQSPESLLQLKALKPGVIQILGVKTSRFLCQRPDGALYGSLHFDPEACSFRELLLEDGYNVYQSEAHGLPLHLCGNKSPHRDPAPRGPARFLPLPGLPPAPPEPPGILAPQPPDVGSSDPLSMVGSQGRSPSYAS

SEQ ID NO: 1943 - protein, 472 aa, Artificial Sequence
  Fusion Protein
HGEGTFTSDKSQLLEKRAAHLFIEWLIKGGHSKGKPPPKGGGGGGGSGGGGSGGGGSADKTHTCPPCPAPELLGGPSVFLFPPKPKDTLMISRTPEVTCVVVDVSHEDPEVKFNWYVDGVEVHNAKTKPREEQYNNASRVVSVLTVLHQDWLNGKEYKCKVSNKALPAPIEKTISKAKGQPREPQVYTLPPSRDELTKNQVSLTCLVKGFYPSDIAVEWESNGQPENNYKTTPPVLDSDGSFFLYSKLTVDKSRWQQGNVFSCSVMHEALHNHYTQKSLSLSPGGGGSGSAHPIPDSSPLLQFGGQVRQRYLYTDDACQTEAHLEIREDGTVGGAADQSPESLLQLKALKPGVIQILGVKTSRFLCQRPDGALYGSLHFDPEACSFRELLLEDGYNVYQSEAHGLPLHLCGNKSPHRDPAPRGPARFLPLPGLPPAPPEPPGILAPQPPDVGSSDPLSMVYPSQGRSPSYAS

SEQ ID NO: 1944 - protein, 474 aa, Artificial Sequence
  Fusion Protein
HGEGTFTSDKSQLLEKRAAHLFIEWLIKGGHSKGKPPPKGGGGGGGSGGGGSGGGGSAESKYGPPCPPCPAPEFEGGPSVFLFPPKPKDTLMISRTPEVTCVVVDVSQEDPEVQFNWYVDGVEVHNAKTKPREEQFNSTYRVVSVLTVLHQDWLNGKEYKCKVSNKGLPSSIEKTISKAKGQPREPQVYTLPPSQEEMTKNQVSLTCLVKGFYPSDIAVEWESNGQPENNYKTTPPVLDSDGSFFLYSRLTVDKSRWQEGNVFSCSVMHEALHNHYTQKSLSLSLGGGGSGSAHPIPDSSPLLQFGGQVRQRYLYTDDACQTEAHLEIREDGTVGGAADQSPESLLQLKALKPGVIQILGVKTSRFLCQRPDGALYGSLHFDPEACSFRELLLEDGYNVYQSEAHGLPLHLPGCKSPHRDPAPRGPARFLPLPGLPPAPPEPPGILAPQPPDVGSSDPLSMVYPSQGRSPSYAS

SEQ ID NO: 1945 - protein, 473 aa, Artificial Sequence
  Fusion Protein
HGEGTFTSDKSQLLEKRAAHLFIEWLIKGGHSKGKPPPKGGGGGGGSGGGGSGGGGSAESKYGPPCPPCPAPEFEGGPSVFLFPPKPKDTLMISRTPEVTCVVVDVSQEDPEVQFNWYVDGVEVHNAKTKPREEQFNSTYRVVSVLTVLHQDWLNGKEYKCKVSNKGLPSSIEKTISKAKGQPREPQVYTLPPSQEEMTKNQVSLTCLVKGFYPSDIAVEWESNGQPENNYKTTPPVLDSDGSFFLYSRLTVDKSRWQEGNVFSCSVMHEALHNHYTQKSLSLSLGGGGSGSAHPIPDSSPLLQFGGQVRQRYLYTDDACQTEAHLEIREDGTVGGAADQSPESLLQLKALKPGVIQILGVKTSRFLCQRPDGALYGSLHFDPEACSFRELLLEDGYNVYQSEAHGLPLHLCGNKSPHRDPAPRGPARFLPLPGLPPAPPEPPGILAPQPPDVGSSDPLSMVGSQGRSPSYAS

SEQ ID NO: 1946 - protein, 474 aa, Artificial Sequence
  Fusion Protein
HGEGTFTSDKSQLLEKRAAHLFIEWLIKGGHSKGKPPPKGGGGGGGSGGGGSGGGGSAESKYGPPCPPCPAPEFEGGPSVFLFPPKPKDTLMISRTPEVTCVVVDVSQEDPEVQFNWYVDGVEVHNAKTKPREEQFNSTYRVVSVLTVLHQDWLNGKEYKCKVSNKGLPSSIEKTISKAKGQPREPQVYTLPPSQEEMTKNQVSLTCLVKGFYPSDIAVEWESNGQPENNYKTTPPVLDSDGSFFLYSRLTVDKSRWQEGNVFSCSVMHEALHNHYTQKSLSLSLGGGGSGSAHPIPDSSPLLQFGGQVRQRYLYTDDACQTEAHLEIREDGTVGGAADQSPESLLQLKALKPGVIQILGVKTSRFLCQRPDGALYGSLHFDPEACSFRELLLEDGYNVYQSEAHGLPLHLCGNKSPHRDPAPRGPARFLPLPGLPPAPPEPPGILAPQPPDVGSSDPLSMVYPSQGRSPSYAS

SEQ ID NO: 1947 - protein, 471 aa, Artificial Sequence
  Fusion Protein
HGEGTFTSDKSQLLEKRLAHLFIEWLIKGGHSSGKPPPKGGGGGGGSGGGGSGGGGSADKTHTCPPCPAPEAAGGPSVFLFPPKPKDTLMISRTPEVTCVVVDVSHEDPEVKFNWYVDGVEVHNAKTKPREEQYNSTYRVVSVLTVLHQDWLNGKEYKCKVSNKALPAPIEKTISKAKGQPREPQVYTLPPSRDELTKNQVSLTCLVKGFYPSDIAVEWESNGQPENNYKTTPPVLDSDGSFFLYSKLTVDKSRWQQGNVFSCSVMHEALHNHYTQKSLSLSPGGGGSGSAHPIPDSSPLLQFGGQVRQRYLYTDDACQTEAHLEIREDGTVGGAADQSPESLLQLKALKPGVIQILGVKTSRFLCQRPDGALYGSLHFDPEACSFRELLLEDGYNVYQSEAHGLPLHLPGCKSPHRDPAPRGPARFLPLPGLPPAPPEPPGILAPQPPDVGSSDPLSMVGSQGRSPSYAS

SEQ ID NO: 1948 - protein, 472 aa, Artificial Sequence
  Fusion Protein
HGEGTFTSDKSQLLEKRLAHLFIEWLIKGGHSSGKPPPKGGGGGGGSGGGGSGGGGSADKTHTCPPCPAPEAAGGPSVFLFPPKPKDTLMISRTPEVTCVVVDVSHEDPEVKFNWYVDGVEVHNAKTKPREEQYNSTYRVVSVLTVLHQDWLNGKEYKCKVSNKALPAPIEKTISKAKGQPREPQVYTLPPSRDELTKNQVSLTCLVKGFYPSDIAVEWESNGQPENNYKTTPPVLDSDGSFFLYSKLTVDKSRWQQGNVFSCSVMHEALHNHYTQKSLSLSPGGGGSGSAHPIPDSSPLLQFGGQVRQRYLYTDDACQTEAHLEIREDGTVGGAADQSPESLLQLKALKPGVIQILGVKTSRFLCQRPDGALYGSLHFDPEACSFRELLLEDGYNVYQSEAHGLPLHLPGCKSPHRDPAPRGPARFLPLPGLPPAPPEPPGILAPQPPDVGSSDPLSMVYPSQGRSPSYAS

SEQ ID NO: 1949 - protein, 471 aa, Artificial Sequence
  Fusion Protein
HGEGTFTSDKSQLLEKRLAHLFIEWLIKGGHSSGKPPPKGGGGGGGSGGGGSGGGGSADKTHTCPPCPAPEAAGGPSVFLFPPKPKDTLMISRTPEVTCVVVDVSHEDPEVKFNWYVDGVEVHNAKTKPREEQYNSTYRVVSVLTVLHQDWLNGKEYKCKVSNKALPAPIEKTISKAKGQPREPQVYTLPPSRDELTKNQVSLTCLVKGFYPSDIAVEWESNGQPENNYKTTPPVLDSDGSFFLYSKLTVDKSRWQQGNVFSCSVMHEALHNHYTQKSLSLSPGGGGSGSAHPIPDSSPLLQFGGQVRQRYLYTDDACQTEAHLEIREDGTVGGAADQSPESLLQLKALKPGVIQILGVKTSRFLCQRPDGALYGSLHFDPEACSFRELLLEDGYNVYQSEAHGLPLHLCGNKSPHRDPAPRGPARFLPLPGLPPAPPEPPGILAPQPPDVGSSDPLSMVGSQGRSPSYAS

SEQ ID NO: 1950 - protein, 472 aa, Artificial Sequence
  Fusion Protein
HGEGTFTSDKSQLLEKRLAHLFIEWLIKGGHSSGKPPPKGGGGGGGSGGGGSGGGGSADKTHTCPPCPAPEAAGGPSVFLFPPKPKDTLMISRTPEVTCVVVDVSHEDPEVKFNWYVDGVEVHNAKTKPREEQYNSTYRVVSVLTVLHQDWLNGKEYKCKVSNKALPAPIEKTISKAKGQPREPQVYTLPPSRDELTKNQVSLTCLVKGFYPSDIAVEWESNGQPENNYKTTPPVLDSDGSFFLYSKLTVDKSRWQQGNVFSCSVMHEALHNHYTQKSLSLSPGGGGSGSAHPIPDSSPLLQFGGQVRQRYLYTDDACQTEAHLEIREDGTVGGAADQSPESLLQLKALKPGVIQILGVKTSRFLCQRPDGALYGSLHFDPEACSFRELLLEDGYNVYQSEAHGLPLHLCGNKSPHRDPAPRGPARFLPLPGLPPAPPEPPGILAPQPPDVGSSDPLSMVYPSQGRSPSYAS

SEQ ID NO: 1951 - protein, 471 aa, Artificial Sequence
  Fusion Protein
HGEGTFTSDKSQLLEKRLAHLFIEWLIKGGHSSGKPPPKGGGGGGGSGGGGSGGGGSADKTHTCPPCPAPELLGGPSVFLFPPKPKDTLMISRTPEVTCVVVDVSHEDPEVKFNWYVDGVEVHNAKTKPREEQYNNASRVVSVLTVLHQDWLNGKEYKCKVSNKALPAPIEKTISKAKGQPREPQVYTLPPSRDELTKNQVSLTCLVKGFYPSDIAVEWESNGQPENNYKTTPPVLDSDGSFFLYSKLTVDKSRWQQGNVFSCSVMHEALHNHYTQKSLSLSPGGGGSGSAHPIPDSSPLLQFGGQVRQRYLYTDDACQTEAHLEIREDGTVGGAADQSPESLLQLKALKPGVIQILGVKTSRFLCQRPDGALYGSLHFDPEACSFRELLLEDGYNVYQSEAHGLPLHLPGCKSPHRDPAPRGPARFLPLPGLPPAPPEPPGILAPQPPDVGSSDPLSMVGSQGRSPSYAS

SEQ ID NO: 1952 - protein, 472 aa, Artificial Sequence
  Fusion Protein
HGEGTFTSDKSQLLEKRLAHLFIEWLIKGGHSSGKPPPKGGGGGGGSGGGGSGGGGSADKTHTCPPCPAPELLGGPSVFLFPPKPKDTLMISRTPEVTCVVVDVSHEDPEVKFNWYVDGVEVHNAKTKPREEQYNNASRVVSVLTVLHQDWLNGKEYKCKVSNKALPAPIEKTISKAKGQPREPQVYTLPPSRDELTKNQVSLTCLVKGFYPSDIAVEWESNGQPENNYKTTPPVLDSDGSFFLYSKLTVDKSRWQQGNVFSCSVMHEALHNHYTQKSLSLSPGGGGSGSAHPIPDSSPLLQFGGQVRQRYLYTDDACQTEAHLEIREDGTVGGAADQSPESLLQLKALKPGVIQILGVKTSRFLCQRPDGALYGSLHFDPEACSFRELLLEDGYNVYQSEAHGLPLHLPGCKSPHRDPAPRGPARFLPLPGLPPAPPEPPGILAPQPPDVGSSDPLSMVYPSQGRSPSYAS

SEQ ID NO: 1953 - protein, 471 aa, Artificial Sequence
  Fusion Protein
HGEGTFTSDKSQLLEKRLAHLFIEWLIKGGHSSGKPPPKGGGGGGGSGGGGSGGGGSADKTHTCPPCPAPELLGGPSVFLFPPKPKDTLMISRTPEVTCVVVDVSHEDPEVKFNWYVDGVEVHNAKTKPREEQYNNASRVVSVLTVLHQDWLNGKEYKCKVSNKALPAPIEKTISKAKGQPREPQVYTLPPSRDELTKNQVSLTCLVKGFYPSDIAVEWESNGQPENNYKTTPPVLDSDGSFFLYSKLTVDKSRWQQGNVFSCSVMHEALHNHYTQKSLSLSPGGGGSGSAHPIPDSSPLLQFGGQVRQRYLYTDDACQTEAHLEIREDGTVGGAADQSPESLLQLKALKPGVIQILGVKTSRFLCQRPDGALYGSLHFDPEACSFRELLLEDGYNVYQSEAHGLPLHLCGNKSPHRDPAPRGPARFLPLPGLPPAPPEPPGILAPQPPDVGSSDPLSMVGSQGRSPSYAS

SEQ ID NO: 1954 - protein, 472 aa, Artificial Sequence
  Fusion Protein
HGEGTFTSDKSQLLEKRLAHLFIEWLIKGGHSSGKPPPKGGGGGGGSGGGGSGGGGSADKTHTCPPCPAPELLGGPSVFLFPPKPKDTLMISRTPEVTCVVVDVSHEDPEVKFNWYVDGVEVHNAKTKPREEQYNNASRVVSVLTVLHQDWLNGKEYKCKVSNKALPAPIEKTISKAKGQPREPQVYTLPPSRDELTKNQVSLTCLVKGFYPSDIAVEWESNGQPENNYKTTPPVLDSDGSFFLYSKLTVDKSRWQQGNVFSCSVMHEALHNHYTQKSLSLSPGGGGSGSAHPIPDSSPLLQFGGQVRQRYLYTDDACQTEAHLEIREDGTVGGAADQSPESLLQLKALKPGVIQILGVKTSRFLCQRPDGALYGSLHFDPEACSFRELLLEDGYNVYQSEAHGLPLHLCGNKSPHRDPAPRGPARFLPLPGLPPAPPEPPGILAPQPPDVGSSDPLSMVYPSQGRSPSYAS

SEQ ID NO: 1955 - protein, 474 aa, Artificial Sequence
  Fusion Protein
HGEGTFTSDKSQLLEKRLAHLFIEWLIKGGHSSGKPPPKGGGGGGGSGGGGSGGGGSAESKYGPPCPPCPAPEFEGGPSVFLFPPKPKDTLMISRTPEVTCVVVDVSQEDPEVQFNWYVDGVEVHNAKTKPREEQFNSTYRVVSVLTVLHQDWLNGKEYKCKVSNKGLPSSIEKTISKAKGQPREPQVYTLPPSQEEMTKNQVSLTCLVKGFYPSDIAVEWESNGQPENNYKTTPPVLDSDGSFFLYSRLTVDKSRWQEGNVFSCSVMHEALHNHYTQKSLSLSLGGGGSGSAHPIPDSSPLLQFGGQVRQRYLYTDDACQTEAHLEIREDGTVGGAADQSPESLLQLKALKPGVIQILGVKTSRFLCQRPDGALYGSLHFDPEACSFRELLLEDGYNVYQSEAHGLPLHLPGCKSPHRDPAPRGPARFLPLPGLPPAPPEPPGILAPQPPDVGSSDPLSMVYPSQGRSPSYAS

SEQ ID NO: 1956 - protein, 473 aa, Artificial Sequence
  Fusion Protein
HGEGTFTSDKSQLLEKRLAHLFIEWLIKGGHSSGKPPPKGGGGGGGSGGGGSGGGGSAESKYGPPCPPCPAPEFEGGPSVFLFPPKPKDTLMISRTPEVTCVVVDVSQEDPEVQFNWYVDGVEVHNAKTKPREEQFNSTYRVVSVLTVLHQDWLNGKEYKCKVSNKGLPSSIEKTISKAKGQPREPQVYTLPPSQEEMTKNQVSLTCLVKGFYPSDIAVEWESNGQPENNYKTTPPVLDSDGSFFLYSRLTVDKSRWQEGNVFSCSVMHEALHNHYTQKSLSLSLGGGGSGSAHPIPDSSPLLQFGGQVRQRYLYTDDACQTEAHLEIREDGTVGGAADQSPESLLQLKALKPGVIQILGVKTSRFLCQRPDGALYGSLHFDPEACSFRELLLEDGYNVYQSEAHGLPLHLCGNKSPHRDPAPRGPARFLPLPGLPPAPPEPPGILAPQPPDVGSSDPLSMVGSQGRSPSYAS

SEQ ID NO: 1957 - protein, 474 aa, Artificial Sequence
  Fusion Protein
HGEGTFTSDKSQLLEKRLAHLFIEWLIKGGHSSGKPPPKGGGGGGGSGGGGSGGGGSAESKYGPPCPPCPAPEFEGGPSVFLFPPKPKDTLMISRTPEVTCVVVDVSQEDPEVQFNWYVDGVEVHNAKTKPREEQFNSTYRVVSVLTVLHQDWLNGKEYKCKVSNKGLPSSIEKTISKAKGQPREPQVYTLPPSQEEMTKNQVSLTCLVKGFYPSDIAVEWESNGQPENNYKTTPPVLDSDGSFFLYSRLTVDKSRWQEGNVFSCSVMHEALHNHYTQKSLSLSLGGGGSGSAHPIPDSSPLLQFGGQVRQRYLYTDDACQTEAHLEIREDGTVGGAADQSPESLLQLKALKPGVIQILGVKTSRFLCQRPDGALYGSLHFDPEACSFRELLLEDGYNVYQSEAHGLPLHLCGNKSPHRDPAPRGPARFLPLPGLPPAPPEPPGILAPQPPDVGSSDPLSMVYPSQGRSPSYAS

SEQ ID NO: 1958 - protein, 471 aa, Artificial Sequence
  Fusion Protein
HGEGTFTSDKSQLLEERLAHLFIEWLIKGGHSSIKPPPKGGGGGGGSGGGGSGGGGSADKTHTCPPCPAPEAAGGPSVFLFPPKPKDTLMISRTPEVTCVVVDVSHEDPEVKFNWYVDGVEVHNAKTKPREEQYNSTYRVVSVLTVLHQDWLNGKEYKCKVSNKALPAPIEKTISKAKGQPREPQVYTLPPSRDELTKNQVSLTCLVKGFYPSDIAVEWESNGQPENNYKTTPPVLDSDGSFFLYSKLTVDKSRWQQGNVFSCSVMHEALHNHYTQKSLSLSPGGGGSGSAHPIPDSSPLLQFGGQVRQRYLYTDDACQTEAHLEIREDGTVGGAADQSPESLLQLKALKPGVIQILGVKTSRFLCQRPDGALYGSLHFDPEACSFRELLLEDGYNVYQSEAHGLPLHLPGCKSPHRDPAPRGPARFLPLPGLPPAPPEPPGILAPQPPDVGSSDPLSMVGSQGRSPSYAS

SEQ ID NO: 1959 - protein, 472 aa, Artificial Sequence
  Fusion Protein
HGEGTFTSDKSQLLEERLAHLFIEWLIKGGHSSIKPPPKGGGGGGGSGGGGSGGGGSADKTHTCPPCPAPEAAGGPSVFLFPPKPKDTLMISRTPEVTCVVVDVSHEDPEVKFNWYVDGVEVHNAKTKPREEQYNSTYRVVSVLTVLHQDWLNGKEYKCKVSNKALPAPIEKTISKAKGQPREPQVYTLPPSRDELTKNQVSLTCLVKGFYPSDIAVEWESNGQPENNYKTTPPVLDSDGSFFLYSKLTVDKSRWQQGNVFSCSVMHEALHNHYTQKSLSLSPGGGGSGSAHPIPDSSPLLQFGGQVRQRYLYTDDACQTEAHLEIREDGTVGGAADQSPESLLQLKALKPGVIQILGVKTSRFLCQRPDGALYGSLHFDPEACSFRELLLEDGYNVYQSEAHGLPLHLPGCKSPHRDPAPRGPARFLPLPGLPPAPPEPPGILAPQPPDVGSSDPLSMVYPSQGRSPSYAS

SEQ ID NO: 1960 - protein, 471 aa, Artificial Sequence
  Fusion Protein
HGEGTFTSDKSQLLEERLAHLFIEWLIKGGHSSIKPPPKGGGGGGGSGGGGSGGGGSADKTHTCPPCPAPEAAGGPSVFLFPPKPKDTLMISRTPEVTCVVVDVSHEDPEVKFNWYVDGVEVHNAKTKPREEQYNSTYRVVSVLTVLHQDWLNGKEYKCKVSNKALPAPIEKTISKAKGQPREPQVYTLPPSRDELTKNQVSLTCLVKGFYPSDIAVEWESNGQPENNYKTTPPVLDSDGSFFLYSKLTVDKSRWQQGNVFSCSVMHEALHNHYTQKSLSLSPGGGGSGSAHPIPDSSPLLQFGGQVRQRYLYTDDACQTEAHLEIREDGTVGGAADQSPESLLQLKALKPGVIQILGVKTSRFLCQRPDGALYGSLHFDPEACSFRELLLEDGYNVYQSEAHGLPLHLCGNKSPHRDPAPRGPARFLPLPGLPPAPPEPPGILAPQPPDVGSSDPLSMVGSQGRSPSYAS

SEQ ID NO: 1961 - protein, 472 aa, Artificial Sequence
  Fusion Protein
HGEGTFTSDKSQLLEERLAHLFIEWLIKGGHSSIKPPPKGGGGGGGSGGGGSGGGGSADKTHTCPPCPAPEAAGGPSVFLFPPKPKDTLMISRTPEVTCVVVDVSHEDPEVKFNWYVDGVEVHNAKTKPREEQYNSTYRVVSVLTVLHQDWLNGKEYKCKVSNKALPAPIEKTISKAKGQPREPQVYTLPPSRDELTKNQVSLTCLVKGFYPSDIAVEWESNGQPENNYKTTPPVLDSDGSFFLYSKLTVDKSRWQQGNVFSCSVMHEALHNHYTQKSLSLSPGGGGSGSAHPIPDSSPLLQFGGQVRQRYLYTDDACQTEAHLEIREDGTVGGAADQSPESLLQLKALKPGVIQILGVKTSRFLCQRPDGALYGSLHFDPEACSFRELLLEDGYNVYQSEAHGLPLHLCGNKSPHRDPAPRGPARFLPLPGLPPAPPEPPGILAPQPPDVGSSDPLSMVYPSQGRSPSYAS

SEQ ID NO: 1962 - protein, 471 aa, Artificial Sequence
  Fusion Protein
HGEGTFTSDKSQLLEERLAHLFIEWLIKGGHSSIKPPPKGGGGGGGSGGGGSGGGGSADKTHTCPPCPAPELLGGPSVFLFPPKPKDTLMISRTPEVTCVVVDVSHEDPEVKFNWYVDGVEVHNAKTKPREEQYNNASRVVSVLTVLHQDWLNGKEYKCKVSNKALPAPIEKTISKAKGQPREPQVYTLPPSRDELTKNQVSLTCLVKGFYPSDIAVEWESNGQPENNYKTTPPVLDSDGSFFLYSKLTVDKSRWQQGNVFSCSVMHEALHNHYTQKSLSLSPGGGGSGSAHPIPDSSPLLQFGGQVRQRYLYTDDACQTEAHLEIREDGTVGGAADQSPESLLQLKALKPGVIQILGVKTSRFLCQRPDGALYGSLHFDPEACSFRELLLEDGYNVYQSEAHGLPLHLPGCKSPHRDPAPRGPARFLPLPGLPPAPPEPPGILAPQPPDVGSSDPLSMVGSQGRSPSYAS

SEQ ID NO: 1963 - protein, 472 aa, Artificial Sequence
  Fusion Protein
HGEGTFTSDKSQLLEERLAHLFIEWLIKGGHSSIKPPPKGGGGGGGSGGGGSGGGGSADKTHTCPPCPAPELLGGPSVFLFPPKPKDTLMISRTPEVTCVVVDVSHEDPEVKFNWYVDGVEVHNAKTKPREEQYNNASRVVSVLTVLHQDWLNGKEYKCKVSNKALPAPIEKTISKAKGQPREPQVYTLPPSRDELTKNQVSLTCLVKGFYPSDIAVEWESNGQPENNYKTTPPVLDSDGSFFLYSKLTVDKSRWQQGNVFSCSVMHEALHNHYTQKSLSLSPGGGGSGSAHPIPDSSPLLQFGGQVRQRYLYTDDACQTEAHLEIREDGTVGGAADQSPESLLQLKALKPGVIQILGVKTSRFLCQRPDGALYGSLHFDPEACSFRELLLEDGYNVYQSEAHGLPLHLPGCKSPHRDPAPRGPARFLPLPGLPPAPPEPPGILAPQPPDVGSSDPLSMVYPSQGRSPSYAS

SEQ ID NO: 1964 - protein, 471 aa, Artificial Sequence
  Fusion Protein
HGEGTFTSDKSQLLEERLAHLFIEWLIKGGHSSIKPPPKGGGGGGGSGGGGSGGGGSADKTHTCPPCPAPELLGGPSVFLFPPKPKDTLMISRTPEVTCVVVDVSHEDPEVKFNWYVDGVEVHNAKTKPREEQYNNASRVVSVLTVLHQDWLNGKEYKCKVSNKALPAPIEKTISKAKGQPREPQVYTLPPSRDELTKNQVSLTCLVKGFYPSDIAVEWESNGQPENNYKTTPPVLDSDGSFFLYSKLTVDKSRWQQGNVFSCSVMHEALHNHYTQKSLSLSPGGGGSGSAHPIPDSSPLLQFGGQVRQRYLYTDDACQTEAHLEIREDGTVGGAADQSPESLLQLKALKPGVIQILGVKTSRFLCQRPDGALYGSLHFDPEACSFRELLLEDGYNVYQSEAHGLPLHLCGNKSPHRDPAPRGPARFLPLPGLPPAPPEPPGILAPQPPDVGSSDPLSMVGSQGRSPSYAS

SEQ ID NO: 1965 - protein, 472 aa, Artificial Sequence
  Fusion Protein
HGEGTFTSDKSQLLEERLAHLFIEWLIKGGHSSIKPPPKGGGGGGGSGGGGSGGGGSADKTHTCPPCPAPELLGGPSVFLFPPKPKDTLMISRTPEVTCVVVDVSHEDPEVKFNWYVDGVEVHNAKTKPREEQYNNASRVVSVLTVLHQDWLNGKEYKCKVSNKALPAPIEKTISKAKGQPREPQVYTLPPSRDELTKNQVSLTCLVKGFYPSDIAVEWESNGQPENNYKTTPPVLDSDGSFFLYSKLTVDKSRWQQGNVFSCSVMHEALHNHYTQKSLSLSPGGGGSGSAHPIPDSSPLLQFGGQVRQRYLYTDDACQTEAHLEIREDGTVGGAADQSPESLLQLKALKPGVIQILGVKTSRFLCQRPDGALYGSLHFDPEACSFRELLLEDGYNVYQSEAHGLPLHLCGNKSPHRDPAPRGPARFLPLPGLPPAPPEPPGILAPQPPDVGSSDPLSMVYPSQGRSPSYAS

SEQ ID NO: 1966 - protein, 474 aa, Artificial Sequence
  Fusion Protein
HGEGTFTSDKSQLLEERLAHLFIEWLIKGGHSSIKPPPKGGGGGGGSGGGGSGGGGSAESKYGPPCPPCPAPEFEGGPSVFLFPPKPKDTLMISRTPEVTCVVVDVSQEDPEVQFNWYVDGVEVHNAKTKPREEQFNSTYRVVSVLTVLHQDWLNGKEYKCKVSNKGLPSSIEKTISKAKGQPREPQVYTLPPSQEEMTKNQVSLTCLVKGFYPSDIAVEWESNGQPENNYKTTPPVLDSDGSFFLYSRLTVDKSRWQEGNVFSCSVMHEALHNHYTQKSLSLSLGGGGSGSAHPIPDSSPLLQFGGQVRQRYLYTDDACQTEAHLEIREDGTVGGAADQSPESLLQLKALKPGVIQILGVKTSRFLCQRPDGALYGSLHFDPEACSFRELLLEDGYNVYQSEAHGLPLHLPGCKSPHRDPAPRGPARFLPLPGLPPAPPEPPGILAPQPPDVGSSDPLSMVYPSQGRSPSYAS

SEQ ID NO: 1967 - protein, 473 aa, Artificial Sequence
  Fusion Protein
HGEGTFTSDKSQLLEERLAHLFIEWLIKGGHSSIKPPPKGGGGGGGSGGGGSGGGGSAESKYGPPCPPCPAPEFEGGPSVFLFPPKPKDTLMISRTPEVTCVVVDVSQEDPEVQFNWYVDGVEVHNAKTKPREEQFNSTYRVVSVLTVLHQDWLNGKEYKCKVSNKGLPSSIEKTISKAKGQPREPQVYTLPPSQEEMTKNQVSLTCLVKGFYPSDIAVEWESNGQPENNYKTTPPVLDSDGSFFLYSRLTVDKSRWQEGNVFSCSVMHEALHNHYTQKSLSLSLGGGGSGSAHPIPDSSPLLQFGGQVRQRYLYTDDACQTEAHLEIREDGTVGGAADQSPESLLQLKALKPGVIQILGVKTSRFLCQRPDGALYGSLHFDPEACSFRELLLEDGYNVYQSEAHGLPLHLCGNKSPHRDPAPRGPARFLPLPGLPPAPPEPPGILAPQPPDVGSSDPLSMVGSQGRSPSYAS

SEQ ID NO: 1968 - protein, 474 aa, Artificial Sequence
  Fusion Protein
HGEGTFTSDKSQLLEERLAHLFIEWLIKGGHSSIKPPPKGGGGGGGSGGGGSGGGGSAESKYGPPCPPCPAPEFEGGPSVFLFPPKPKDTLMISRTPEVTCVVVDVSQEDPEVQFNWYVDGVEVHNAKTKPREEQFNSTYRVVSVLTVLHQDWLNGKEYKCKVSNKGLPSSIEKTISKAKGQPREPQVYTLPPSQEEMTKNQVSLTCLVKGFYPSDIAVEWESNGQPENNYKTTPPVLDSDGSFFLYSRLTVDKSRWQEGNVFSCSVMHEALHNHYTQKSLSLSLGGGGSGSAHPIPDSSPLLQFGGQVRQRYLYTDDACQTEAHLEIREDGTVGGAADQSPESLLQLKALKPGVIQILGVKTSRFLCQRPDGALYGSLHFDPEACSFRELLLEDGYNVYQSEAHGLPLHLCGNKSPHRDPAPRGPARFLPLPGLPPAPPEPPGILAPQPPDVGSSDPLSMVYPSQGRSPSYAS

SEQ ID NO: 1969 - protein, 471 aa, Artificial Sequence
  Fusion Protein
HGEGTFTSDKSQLLEERLAHLFIEWLIAGGHSSGRPPPKGGGGGGGSGGGGSGGGGSADKTHTCPPCPAPEAAGGPSVFLFPPKPKDTLMISRTPEVTCVVVDVSHEDPEVKFNWYVDGVEVHNAKTKPREEQYNSTYRVVSVLTVLHQDWLNGKEYKCKVSNKALPAPIEKTISKAKGQPREPQVYTLPPSRDELTKNQVSLTCLVKGFYPSDIAVEWESNGQPENNYKTTPPVLDSDGSFFLYSKLTVDKSRWQQGNVFSCSVMHEALHNHYTQKSLSLSPGGGGSGSAHPIPDSSPLLQFGGQVRQRYLYTDDACQTEAHLEIREDGTVGGAADQSPESLLQLKALKPGVIQILGVKTSRFLCQRPDGALYGSLHFDPEACSFRELLLEDGYNVYQSEAHGLPLHLPGCKSPHRDPAPRGPARFLPLPGLPPAPPEPPGILAPQPPDVGSSDPLSMVGSQGRSPSYAS

SEQ ID NO: 1970 - protein, 472 aa, Artificial Sequence
  Fusion Protein
HGEGTFTSDKSQLLEERLAHLFIEWLIAGGHSSGRPPPKGGGGGGGSGGGGSGGGGSADKTHTCPPCPAPEAAGGPSVFLFPPKPKDTLMISRTPEVTCVVVDVSHEDPEVKFNWYVDGVEVHNAKTKPREEQYNSTYRVVSVLTVLHQDWLNGKEYKCKVSNKALPAPIEKTISKAKGQPREPQVYTLPPSRDELTKNQVSLTCLVKGFYPSDIAVEWESNGQPENNYKTTPPVLDSDGSFFLYSKLTVDKSRWQQGNVFSCSVMHEALHNHYTQKSLSLSPGGGGSGSAHPIPDSSPLLQFGGQVRQRYLYTDDACQTEAHLEIREDGTVGGAADQSPESLLQLKALKPGVIQILGVKTSRFLCQRPDGALYGSLHFDPEACSFRELLLEDGYNVYQSEAHGLPLHLPGCKSPHRDPAPRGPARFLPLPGLPPAPPEPPGILAPQPPDVGSSDPLSMVYPSQGRSPSYAS

SEQ ID NO: 1971 - protein, 471 aa, Artificial Sequence
  Fusion Protein
HGEGTFTSDKSQLLEERLAHLFIEWLIAGGHSSGRPPPKGGGGGGGSGGGGSGGGGSADKTHTCPPCPAPEAAGGPSVFLFPPKPKDTLMISRTPEVTCVVVDVSHEDPEVKFNWYVDGVEVHNAKTKPREEQYNSTYRVVSVLTVLHQDWLNGKEYKCKVSNKALPAPIEKTISKAKGQPREPQVYTLPPSRDELTKNQVSLTCLVKGFYPSDIAVEWESNGQPENNYKTTPPVLDSDGSFFLYSKLTVDKSRWQQGNVFSCSVMHEALHNHYTQKSLSLSPGGGGSGSAHPIPDSSPLLQFGGQVRQRYLYTDDACQTEAHLEIREDGTVGGAADQSPESLLQLKALKPGVIQILGVKTSRFLCQRPDGALYGSLHFDPEACSFRELLLEDGYNVYQSEAHGLPLHLCGNKSPHRDPAPRGPARFLPLPGLPPAPPEPPGILAPQPPDVGSSDPLSMVGSQGRSPSYAS

SEQ ID NO: 1972 - protein, 472 aa, Artificial Sequence
  Fusion Protein
HGEGTFTSDKSQLLEERLAHLFIEWLIAGGHSSGRPPPKGGGGGGGSGGGGSGGGGSADKTHTCPPCPAPEAAGGPSVFLFPPKPKDTLMISRTPEVTCVVVDVSHEDPEVKFNWYVDGVEVHNAKTKPREEQYNSTYRVVSVLTVLHQDWLNGKEYKCKVSNKALPAPIEKTISKAKGQPREPQVYTLPPSRDELTKNQVSLTCLVKGFYPSDIAVEWESNGQPENNYKTTPPVLDSDGSFFLYSKLTVDKSRWQQGNVFSCSVMHEALHNHYTQKSLSLSPGGGGSGSAHPIPDSSPLLQFGGQVRQRYLYTDDACQTEAHLEIREDGTVGGAADQSPESLLQLKALKPGVIQILGVKTSRFLCQRPDGALYGSLHFDPEACSFRELLLEDGYNVYQSEAHGLPLHLCGNKSPHRDPAPRGPARFLPLPGLPPAPPEPPGILAPQPPDVGSSDPLSMVYPSQGRSPSYAS

SEQ ID NO: 1973 - protein, 471 aa, Artificial Sequence
  Fusion Protein
HGEGTFTSDKSQLLEERLAHLFIEWLIAGGHSSGRPPPKGGGGGGGSGGGGSGGGGSADKTHTCPPCPAPELLGGPSVFLFPPKPKDTLMISRTPEVTCVVVDVSHEDPEVKFNWYVDGVEVHNAKTKPREEQYNNASRVVSVLTVLHQDWLNGKEYKCKVSNKALPAPIEKTISKAKGQPREPQVYTLPPSRDELTKNQVSLTCLVKGFYPSDIAVEWESNGQPENNYKTTPPVLDSDGSFFLYSKLTVDKSRWQQGNVFSCSVMHEALHNHYTQKSLSLSPGGGGSGSAHPIPDSSPLLQFGGQVRQRYLYTDDACQTEAHLEIREDGTVGGAADQSPESLLQLKALKPGVIQILGVKTSRFLCQRPDGALYGSLHFDPEACSFRELLLEDGYNVYQSEAHGLPLHLPGCKSPHRDPAPRGPARFLPLPGLPPAPPEPPGILAPQPPDVGSSDPLSMVGSQGRSPSYAS

SEQ ID NO: 1974 - protein, 472 aa, Artificial Sequence
  Fusion Protein
HGEGTFTSDKSQLLEERLAHLFIEWLIAGGHSSGRPPPKGGGGGGGSGGGGSGGGGSADKTHTCPPCPAPELLGGPSVFLFPPKPKDTLMISRTPEVTCVVVDVSHEDPEVKFNWYVDGVEVHNAKTKPREEQYNNASRVVSVLTVLHQDWLNGKEYKCKVSNKALPAPIEKTISKAKGQPREPQVYTLPPSRDELTKNQVSLTCLVKGFYPSDIAVEWESNGQPENNYKTTPPVLDSDGSFFLYSKLTVDKSRWQQGNVFSCSVMHEALHNHYTQKSLSLSPGGGGSGSAHPIPDSSPLLQFGGQVRQRYLYTDDACQTEAHLEIREDGTVGGAADQSPESLLQLKALKPGVIQILGVKTSRFLCQRPDGALYGSLHFDPEACSFRELLLEDGYNVYQSEAHGLPLHLPGCKSPHRDPAPRGPARFLPLPGLPPAPPEPPGILAPQPPDVGSSDPLSMVYPSQGRSPSYAS

SEQ ID NO: 1975 - protein, 471 aa, Artificial Sequence
  Fusion Protein
HGEGTFTSDKSQLLEERLAHLFIEWLIAGGHSSGRPPPKGGGGGGGSGGGGSGGGGSADKTHTCPPCPAPELLGGPSVFLFPPKPKDTLMISRTPEVTCVVVDVSHEDPEVKFNWYVDGVEVHNAKTKPREEQYNNASRVVSVLTVLHQDWLNGKEYKCKVSNKALPAPIEKTISKAKGQPREPQVYTLPPSRDELTKNQVSLTCLVKGFYPSDIAVEWESNGQPENNYKTTPPVLDSDGSFFLYSKLTVDKSRWQQGNVFSCSVMHEALHNHYTQKSLSLSPGGGGSGSAHPIPDSSPLLQFGGQVRQRYLYTDDACQTEAHLEIREDGTVGGAADQSPESLLQLKALKPGVIQILGVKTSRFLCQRPDGALYGSLHFDPEACSFRELLLEDGYNVYQSEAHGLPLHLCGNKSPHRDPAPRGPARFLPLPGLPPAPPEPPGILAPQPPDVGSSDPLSMVGSQGRSPSYAS

SEQ ID NO: 1976 - protein, 472 aa, Artificial Sequence
  Fusion Protein
HGEGTFTSDKSQLLEERLAHLFIEWLIAGGHSSGRPPPKGGGGGGGSGGGGSGGGGSADKTHTCPPCPAPELLGGPSVFLFPPKPKDTLMISRTPEVTCVVVDVSHEDPEVKFNWYVDGVEVHNAKTKPREEQYNNASRVVSVLTVLHQDWLNGKEYKCKVSNKALPAPIEKTISKAKGQPREPQVYTLPPSRDELTKNQVSLTCLVKGFYPSDIAVEWESNGQPENNYKTTPPVLDSDGSFFLYSKLTVDKSRWQQGNVFSCSVMHEALHNHYTQKSLSLSPGGGGSGSAHPIPDSSPLLQFGGQVRQRYLYTDDACQTEAHLEIREDGTVGGAADQSPESLLQLKALKPGVIQILGVKTSRFLCQRPDGALYGSLHFDPEACSFRELLLEDGYNVYQSEAHGLPLHLCGNKSPHRDPAPRGPARFLPLPGLPPAPPEPPGILAPQPPDVGSSDPLSMVYPSQGRSPSYAS

SEQ ID NO: 1977 - protein, 474 aa, Artificial Sequence
  Fusion Protein
HGEGTFTSDKSQLLEERLAHLFIEWLIAGGHSSGRPPPKGGGGGGGSGGGGSGGGGSAESKYGPPCPPCPAPEFEGGPSVFLFPPKPKDTLMISRTPEVTCVVVDVSQEDPEVQFNWYVDGVEVHNAKTKPREEQFNSTYRVVSVLTVLHQDWLNGKEYKCKVSNKGLPSSIEKTISKAKGQPREPQVYTLPPSQEEMTKNQVSLTCLVKGFYPSDIAVEWESNGQPENNYKTTPPVLDSDGSFFLYSRLTVDKSRWQEGNVFSCSVMHEALHNHYTQKSLSLSLGGGGSGSAHPIPDSSPLLQFGGQVRQRYLYTDDACQTEAHLEIREDGTVGGAADQSPESLLQLKALKPGVIQILGVKTSRFLCQRPDGALYGSLHFDPEACSFRELLLEDGYNVYQSEAHGLPLHLPGCKSPHRDPAPRGPARFLPLPGLPPAPPEPPGILAPQPPDVGSSDPLSMVYPSQGRSPSYAS

SEQ ID NO: 1978 - protein, 473 aa, Artificial Sequence
  Fusion Protein
HGEGTFTSDKSQLLEERLAHLFIEWLIAGGHSSGRPPPKGGGGGGGSGGGGSGGGGSAESKYGPPCPPCPAPEFEGGPSVFLFPPKPKDTLMISRTPEVTCVVVDVSQEDPEVQFNWYVDGVEVHNAKTKPREEQFNSTYRVVSVLTVLHQDWLNGKEYKCKVSNKGLPSSIEKTISKAKGQPREPQVYTLPPSQEEMTKNQVSLTCLVKGFYPSDIAVEWESNGQPENNYKTTPPVLDSDGSFFLYSRLTVDKSRWQEGNVFSCSVMHEALHNHYTQKSLSLSLGGGGSGSAHPIPDSSPLLQFGGQVRQRYLYTDDACQTEAHLEIREDGTVGGAADQSPESLLQLKALKPGVIQILGVKTSRFLCQRPDGALYGSLHFDPEACSFRELLLEDGYNVYQSEAHGLPLHLCGNKSPHRDPAPRGPARFLPLPGLPPAPPEPPGILAPQPPDVGSSDPLSMVGSQGRSPSYAS

SEQ ID NO: 1979 - protein, 474 aa, Artificial Sequence
  Fusion Protein
HGEGTFTSDKSQLLEERLAHLFIEWLIAGGHSSGRPPPKGGGGGGGSGGGGSGGGGSAESKYGPPCPPCPAPEFEGGPSVFLFPPKPKDTLMISRTPEVTCVVVDVSQEDPEVQFNWYVDGVEVHNAKTKPREEQFNSTYRVVSVLTVLHQDWLNGKEYKCKVSNKGLPSSIEKTISKAKGQPREPQVYTLPPSQEEMTKNQVSLTCLVKGFYPSDIAVEWESNGQPENNYKTTPPVLDSDGSFFLYSRLTVDKSRWQEGNVFSCSVMHEALHNHYTQKSLSLSLGGGGSGSAHPIPDSSPLLQFGGQVRQRYLYTDDACQTEAHLEIREDGTVGGAADQSPESLLQLKALKPGVIQILGVKTSRFLCQRPDGALYGSLHFDPEACSFRELLLEDGYNVYQSEAHGLPLHLCGNKSPHRDPAPRGPARFLPLPGLPPAPPEPPGILAPQPPDVGSSDPLSMVYPSQGRSPSYAS

SEQ ID NO: 1980 - protein, 471 aa, Artificial Sequence
  Fusion Protein
YGEGTFTSDKSQLLEERLAHLFIEWLIAGGHSKIRPPPKGGGGGGGSGGGGSGGGGSADKTHTCPPCPAPEAAGGPSVFLFPPKPKDTLMISRTPEVTCVVVDVSHEDPEVKFNWYVDGVEVHNAKTKPREEQYNSTYRVVSVLTVLHQDWLNGKEYKCKVSNKALPAPIEKTISKAKGQPREPQVYTLPPSRDELTKNQVSLTCLVKGFYPSDIAVEWESNGQPENNYKTTPPVLDSDGSFFLYSKLTVDKSRWQQGNVFSCSVMHEALHNHYTQKSLSLSPGGGGSGSAHPIPDSSPLLQFGGQVRQRYLYTDDACQTEAHLEIREDGTVGGAADQSPESLLQLKALKPGVIQILGVKTSRFLCQRPDGALYGSLHFDPEACSFRELLLEDGYNVYQSEAHGLPLHLPGCKSPHRDPAPRGPARFLPLPGLPPAPPEPPGILAPQPPDVGSSDPLSMVGSQGRSPSYAS

SEQ ID NO: 1981 - protein, 472 aa, Artificial Sequence
  Fusion Protein
YGEGTFTSDKSQLLEERLAHLFIEWLIAGGHSKIRPPPKGGGGGGGSGGGGSGGGGSADKTHTCPPCPAPEAAGGPSVFLFPPKPKDTLMISRTPEVTCVVVDVSHEDPEVKFNWYVDGVEVHNAKTKPREEQYNSTYRVVSVLTVLHQDWLNGKEYKCKVSNKALPAPIEKTISKAKGQPREPQVYTLPPSRDELTKNQVSLTCLVKGFYPSDIAVEWESNGQPENNYKTTPPVLDSDGSFFLYSKLTVDKSRWQQGNVFSCSVMHEALHNHYTQKSLSLSPGGGGSGSAHPIPDSSPLLQFGGQVRQRYLYTDDACQTEAHLEIREDGTVGGAADQSPESLLQLKALKPGVIQILGVKTSRFLCQRPDGALYGSLHFDPEACSFRELLLEDGYNVYQSEAHGLPLHLPGCKSPHRDPAPRGPARFLPLPGLPPAPPEPPGILAPQPPDVGSSDPLSMVYPSQGRSPSYAS

SEQ ID NO: 1982 - protein, 471 aa, Artificial Sequence
  Fusion Protein
YGEGTFTSDKSQLLEERLAHLFIEWLIAGGHSKIRPPPKGGGGGGGSGGGGSGGGGSADKTHTCPPCPAPEAAGGPSVFLFPPKPKDTLMISRTPEVTCVVVDVSHEDPEVKFNWYVDGVEVHNAKTKPREEQYNSTYRVVSVLTVLHQDWLNGKEYKCKVSNKALPAPIEKTISKAKGQPREPQVYTLPPSRDELTKNQVSLTCLVKGFYPSDIAVEWESNGQPENNYKTTPPVLDSDGSFFLYSKLTVDKSRWQQGNVFSCSVMHEALHNHYTQKSLSLSPGGGGSGSAHPIPDSSPLLQFGGQVRQRYLYTDDACQTEAHLEIREDGTVGGAADQSPESLLQLKALKPGVIQILGVKTSRFLCQRPDGALYGSLHFDPEACSFRELLLEDGYNVYQSEAHGLPLHLCGNKSPHRDPAPRGPARFLPLPGLPPAPPEPPGILAPQPPDVGSSDPLSMVGSQGRSPSYAS

SEQ ID NO: 1983 - protein, 472 aa, Artificial Sequence
  Fusion Protein
YGEGTFTSDKSQLLEERLAHLFIEWLIAGGHSKIRPPPKGGGGGGGSGGGGSGGGGSADKTHTCPPCPAPEAAGGPSVFLFPPKPKDTLMISRTPEVTCVVVDVSHEDPEVKFNWYVDGVEVHNAKTKPREEQYNSTYRVVSVLTVLHQDWLNGKEYKCKVSNKALPAPIEKTISKAKGQPREPQVYTLPPSRDELTKNQVSLTCLVKGFYPSDIAVEWESNGQPENNYKTTPPVLDSDGSFFLYSKLTVDKSRWQQGNVFSCSVMHEALHNHYTQKSLSLSPGGGGSGSAHPIPDSSPLLQFGGQVRQRYLYTDDACQTEAHLEIREDGTVGGAADQSPESLLQLKALKPGVIQILGVKTSRFLCQRPDGALYGSLHFDPEACSFRELLLEDGYNVYQSEAHGLPLHLCGNKSPHRDPAPRGPARFLPLPGLPPAPPEPPGILAPQPPDVGSSDPLSMVYPSQGRSPSYAS

SEQ ID NO: 1984 - protein, 471 aa, Artificial Sequence
  Fusion Protein
YGEGTFTSDKSQLLEERLAHLFIEWLIAGGHSKIRPPPKGGGGGGGSGGGGSGGGGSADKTHTCPPCPAPELLGGPSVFLFPPKPKDTLMISRTPEVTCVVVDVSHEDPEVKFNWYVDGVEVHNAKTKPREEQYNNASRVVSVLTVLHQDWLNGKEYKCKVSNKALPAPIEKTISKAKGQPREPQVYTLPPSRDELTKNQVSLTCLVKGFYPSDIAVEWESNGQPENNYKTTPPVLDSDGSFFLYSKLTVDKSRWQQGNVFSCSVMHEALHNHYTQKSLSLSPGGGGSGSAHPIPDSSPLLQFGGQVRQRYLYTDDACQTEAHLEIREDGTVGGAADQSPESLLQLKALKPGVIQILGVKTSRFLCQRPDGALYGSLHFDPEACSFRELLLEDGYNVYQSEAHGLPLHLPGCKSPHRDPAPRGPARFLPLPGLPPAPPEPPGILAPQPPDVGSSDPLSMVGSQGRSPSYAS

SEQ ID NO: 1985 - protein, 472 aa, Artificial Sequence
  Fusion Protein
YGEGTFTSDKSQLLEERLAHLFIEWLIAGGHSKIRPPPKGGGGGGGSGGGGSGGGGSADKTHTCPPCPAPELLGGPSVFLFPPKPKDTLMISRTPEVTCVVVDVSHEDPEVKFNWYVDGVEVHNAKTKPREEQYNNASRVVSVLTVLHQDWLNGKEYKCKVSNKALPAPIEKTISKAKGQPREPQVYTLPPSRDELTKNQVSLTCLVKGFYPSDIAVEWESNGQPENNYKTTPPVLDSDGSFFLYSKLTVDKSRWQQGNVFSCSVMHEALHNHYTQKSLSLSPGGGGSGSAHPIPDSSPLLQFGGQVRQRYLYTDDACQTEAHLEIREDGTVGGAADQSPESLLQLKALKPGVIQILGVKTSRFLCQRPDGALYGSLHFDPEACSFRELLLEDGYNVYQSEAHGLPLHLPGCKSPHRDPAPRGPARFLPLPGLPPAPPEPPGILAPQPPDVGSSDPLSMVYPSQGRSPSYAS

SEQ ID NO: 1986 - protein, 471 aa, Artificial Sequence
  Fusion Protein
YGEGTFTSDKSQLLEERLAHLFIEWLIAGGHSKIRPPPKGGGGGGGSGGGGSGGGGSADKTHTCPPCPAPELLGGPSVFLFPPKPKDTLMISRTPEVTCVVVDVSHEDPEVKFNWYVDGVEVHNAKTKPREEQYNNASRVVSVLTVLHQDWLNGKEYKCKVSNKALPAPIEKTISKAKGQPREPQVYTLPPSRDELTKNQVSLTCLVKGFYPSDIAVEWESNGQPENNYKTTPPVLDSDGSFFLYSKLTVDKSRWQQGNVFSCSVMHEALHNHYTQKSLSLSPGGGGSGSAHPIPDSSPLLQFGGQVRQRYLYTDDACQTEAHLEIREDGTVGGAADQSPESLLQLKALKPGVIQILGVKTSRFLCQRPDGALYGSLHFDPEACSFRELLLEDGYNVYQSEAHGLPLHLCGNKSPHRDPAPRGPARFLPLPGLPPAPPEPPGILAPQPPDVGSSDPLSMVGSQGRSPSYAS

SEQ ID NO: 1987 - protein, 472 aa, Artificial Sequence
  Fusion Protein
YGEGTFTSDKSQLLEERLAHLFIEWLIAGGHSKIRPPPKGGGGGGGSGGGGSGGGGSADKTHTCPPCPAPELLGGPSVFLFPPKPKDTLMISRTPEVTCVVVDVSHEDPEVKFNWYVDGVEVHNAKTKPREEQYNNASRVVSVLTVLHQDWLNGKEYKCKVSNKALPAPIEKTISKAKGQPREPQVYTLPPSRDELTKNQVSLTCLVKGFYPSDIAVEWESNGQPENNYKTTPPVLDSDGSFFLYSKLTVDKSRWQQGNVFSCSVMHEALHNHYTQKSLSLSPGGGGSGSAHPIPDSSPLLQFGGQVRQRYLYTDDACQTEAHLEIREDGTVGGAADQSPESLLQLKALKPGVIQILGVKTSRFLCQRPDGALYGSLHFDPEACSFRELLLEDGYNVYQSEAHGLPLHLCGNKSPHRDPAPRGPARFLPLPGLPPAPPEPPGILAPQPPDVGSSDPLSMVYPSQGRSPSYAS

SEQ ID NO: 1988 - protein, 474 aa, Artificial Sequence
  Fusion Protein
YGEGTFTSDKSQLLEERLAHLFIEWLIAGGHSKIRPPPKGGGGGGGSGGGGSGGGGSAESKYGPPCPPCPAPEFEGGPSVFLFPPKPKDTLMISRTPEVTCVVVDVSQEDPEVQFNWYVDGVEVHNAKTKPREEQFNSTYRVVSVLTVLHQDWLNGKEYKCKVSNKGLPSSIEKTISKAKGQPREPQVYTLPPSQEEMTKNQVSLTCLVKGFYPSDIAVEWESNGQPENNYKTTPPVLDSDGSFFLYSRLTVDKSRWQEGNVFSCSVMHEALHNHYTQKSLSLSLGGGGSGSAHPIPDSSPLLQFGGQVRQRYLYTDDACQTEAHLEIREDGTVGGAADQSPESLLQLKALKPGVIQILGVKTSRFLCQRPDGALYGSLHFDPEACSFRELLLEDGYNVYQSEAHGLPLHLPGCKSPHRDPAPRGPARFLPLPGLPPAPPEPPGILAPQPPDVGSSDPLSMVYPSQGRSPSYAS

SEQ ID NO: 1989 - protein, 473 aa, Artificial Sequence
  Fusion Protein
YGEGTFTSDKSQLLEERLAHLFIEWLIAGGHSKIRPPPKGGGGGGGSGGGGSGGGGSAESKYGPPCPPCPAPEFEGGPSVFLFPPKPKDTLMISRTPEVTCVVVDVSQEDPEVQFNWYVDGVEVHNAKTKPREEQFNSTYRVVSVLTVLHQDWLNGKEYKCKVSNKGLPSSIEKTISKAKGQPREPQVYTLPPSQEEMTKNQVSLTCLVKGFYPSDIAVEWESNGQPENNYKTTPPVLDSDGSFFLYSRLTVDKSRWQEGNVFSCSVMHEALHNHYTQKSLSLSLGGGGSGSAHPIPDSSPLLQFGGQVRQRYLYTDDACQTEAHLEIREDGTVGGAADQSPESLLQLKALKPGVIQILGVKTSRFLCQRPDGALYGSLHFDPEACSFRELLLEDGYNVYQSEAHGLPLHLCGNKSPHRDPAPRGPARFLPLPGLPPAPPEPPGILAPQPPDVGSSDPLSMVGSQGRSPSYAS

SEQ ID NO: 1990 - protein, 474 aa, Artificial Sequence
  Fusion Protein
YGEGTFTSDKSQLLEERLAHLFIEWLIAGGHSKIRPPPKGGGGGGGSGGGGSGGGGSAESKYGPPCPPCPAPEFEGGPSVFLFPPKPKDTLMISRTPEVTCVVVDVSQEDPEVQFNWYVDGVEVHNAKTKPREEQFNSTYRVVSVLTVLHQDWLNGKEYKCKVSNKGLPSSIEKTISKAKGQPREPQVYTLPPSQEEMTKNQVSLTCLVKGFYPSDIAVEWESNGQPENNYKTTPPVLDSDGSFFLYSRLTVDKSRWQEGNVFSCSVMHEALHNHYTQKSLSLSLGGGGSGSAHPIPDSSPLLQFGGQVRQRYLYTDDACQTEAHLEIREDGTVGGAADQSPESLLQLKALKPGVIQILGVKTSRFLCQRPDGALYGSLHFDPEACSFRELLLEDGYNVYQSEAHGLPLHLCGNKSPHRDPAPRGPARFLPLPGLPPAPPEPPGILAPQPPDVGSSDPLSMVYPSQGRSPSYAS

SEQ ID NO: 1991 - protein, 471 aa, Artificial Sequence
  Fusion Protein
YGEGTFTSDKSQLLEERLVHLFIEWLIAGGHSKIKPPPKGGGGGGGSGGGGSGGGGSADKTHTCPPCPAPEAAGGPSVFLFPPKPKDTLMISRTPEVTCVVVDVSHEDPEVKFNWYVDGVEVHNAKTKPREEQYNSTYRVVSVLTVLHQDWLNGKEYKCKVSNKALPAPIEKTISKAKGQPREPQVYTLPPSRDELTKNQVSLTCLVKGFYPSDIAVEWESNGQPENNYKTTPPVLDSDGSFFLYSKLTVDKSRWQQGNVFSCSVMHEALHNHYTQKSLSLSPGGGGSGSAHPIPDSSPLLQFGGQVRQRYLYTDDACQTEAHLEIREDGTVGGAADQSPESLLQLKALKPGVIQILGVKTSRFLCQRPDGALYGSLHFDPEACSFRELLLEDGYNVYQSEAHGLPLHLPGCKSPHRDPAPRGPARFLPLPGLPPAPPEPPGILAPQPPDVGSSDPLSMVGSQGRSPSYAS

SEQ ID NO: 1992 - protein, 472 aa, Artificial Sequence
  Fusion Protein
YGEGTFTSDKSQLLEERLVHLFIEWLIAGGHSKIKPPPKGGGGGGGSGGGGSGGGGSADKTHTCPPCPAPEAAGGPSVFLFPPKPKDTLMISRTPEVTCVVVDVSHEDPEVKFNWYVDGVEVHNAKTKPREEQYNSTYRVVSVLTVLHQDWLNGKEYKCKVSNKALPAPIEKTISKAKGQPREPQVYTLPPSRDELTKNQVSLTCLVKGFYPSDIAVEWESNGQPENNYKTTPPVLDSDGSFFLYSKLTVDKSRWQQGNVFSCSVMHEALHNHYTQKSLSLSPGGGGSGSAHPIPDSSPLLQFGGQVRQRYLYTDDACQTEAHLEIREDGTVGGAADQSPESLLQLKALKPGVIQILGVKTSRFLCQRPDGALYGSLHFDPEACSFRELLLEDGYNVYQSEAHGLPLHLPGCKSPHRDPAPRGPARFLPLPGLPPAPPEPPGILAPQPPDVGSSDPLSMVYPSQGRSPSYAS

SEQ ID NO: 1993 - protein, 471 aa, Artificial Sequence
  Fusion Protein
YGEGTFTSDKSQLLEERLVHLFIEWLIAGGHSKIKPPPKGGGGGGGSGGGGSGGGGSADKTHTCPPCPAPEAAGGPSVFLFPPKPKDTLMISRTPEVTCVVVDVSHEDPEVKFNWYVDGVEVHNAKTKPREEQYNSTYRVVSVLTVLHQDWLNGKEYKCKVSNKALPAPIEKTISKAKGQPREPQVYTLPPSRDELTKNQVSLTCLVKGFYPSDIAVEWESNGQPENNYKTTPPVLDSDGSFFLYSKLTVDKSRWQQGNVFSCSVMHEALHNHYTQKSLSLSPGGGGSGSAHPIPDSSPLLQFGGQVRQRYLYTDDACQTEAHLEIREDGTVGGAADQSPESLLQLKALKPGVIQILGVKTSRFLCQRPDGALYGSLHFDPEACSFRELLLEDGYNVYQSEAHGLPLHLCGNKSPHRDPAPRGPARFLPLPGLPPAPPEPPGILAPQPPDVGSSDPLSMVGSQGRSPSYAS

SEQ ID NO: 1994 - protein, 472 aa, Artificial Sequence
  Fusion Protein
YGEGTFTSDKSQLLEERLVHLFIEWLIAGGHSKIKPPPKGGGGGGGSGGGGSGGGGSADKTHTCPPCPAPEAAGGPSVFLFPPKPKDTLMISRTPEVTCVVVDVSHEDPEVKFNWYVDGVEVHNAKTKPREEQYNSTYRVVSVLTVLHQDWLNGKEYKCKVSNKALPAPIEKTISKAKGQPREPQVYTLPPSRDELTKNQVSLTCLVKGFYPSDIAVEWESNGQPENNYKTTPPVLDSDGSFFLYSKLTVDKSRWQQGNVFSCSVMHEALHNHYTQKSLSLSPGGGGSGSAHPIPDSSPLLQFGGQVRQRYLYTDDACQTEAHLEIREDGTVGGAADQSPESLLQLKALKPGVIQILGVKTSRFLCQRPDGALYGSLHFDPEACSFRELLLEDGYNVYQSEAHGLPLHLCGNKSPHRDPAPRGPARFLPLPGLPPAPPEPPGILAPQPPDVGSSDPLSMVYPSQGRSPSYAS

SEQ ID NO: 1995 - protein, 471 aa, Artificial Sequence
  Fusion Protein
YGEGTFTSDKSQLLEERLVHLFIEWLIAGGHSKIKPPPKGGGGGGGSGGGGSGGGGSADKTHTCPPCPAPELLGGPSVFLFPPKPKDTLMISRTPEVTCVVVDVSHEDPEVKFNWYVDGVEVHNAKTKPREEQYNNASRVVSVLTVLHQDWLNGKEYKCKVSNKALPAPIEKTISKAKGQPREPQVYTLPPSRDELTKNQVSLTCLVKGFYPSDIAVEWESNGQPENNYKTTPPVLDSDGSFFLYSKLTVDKSRWQQGNVFSCSVMHEALHNHYTQKSLSLSPGGGGSGSAHPIPDSSPLLQFGGQVRQRYLYTDDACQTEAHLEIREDGTVGGAADQSPESLLQLKALKPGVIQILGVKTSRFLCQRPDGALYGSLHFDPEACSFRELLLEDGYNVYQSEAHGLPLHLPGCKSPHRDPAPRGPARFLPLPGLPPAPPEPPGILAPQPPDVGSSDPLSMVGSQGRSPSYAS

SEQ ID NO: 1996 - protein, 472 aa, Artificial Sequence
  Fusion Protein
YGEGTFTSDKSQLLEERLVHLFIEWLIAGGHSKIKPPPKGGGGGGGSGGGGSGGGGSADKTHTCPPCPAPELLGGPSVFLFPPKPKDTLMISRTPEVTCVVVDVSHEDPEVKFNWYVDGVEVHNAKTKPREEQYNNASRVVSVLTVLHQDWLNGKEYKCKVSNKALPAPIEKTISKAKGQPREPQVYTLPPSRDELTKNQVSLTCLVKGFYPSDIAVEWESNGQPENNYKTTPPVLDSDGSFFLYSKLTVDKSRWQQGNVFSCSVMHEALHNHYTQKSLSLSPGGGGSGSAHPIPDSSPLLQFGGQVRQRYLYTDDACQTEAHLEIREDGTVGGAADQSPESLLQLKALKPGVIQILGVKTSRFLCQRPDGALYGSLHFDPEACSFRELLLEDGYNVYQSEAHGLPLHLPGCKSPHRDPAPRGPARFLPLPGLPPAPPEPPGILAPQPPDVGSSDPLSMVYPSQGRSPSYAS

SEQ ID NO: 1997 - protein, 471 aa, Artificial Sequence
  Fusion Protein
YGEGTFTSDKSQLLEERLVHLFIEWLIAGGHSKIKPPPKGGGGGGGSGGGGSGGGGSADKTHTCPPCPAPELLGGPSVFLFPPKPKDTLMISRTPEVTCVVVDVSHEDPEVKFNWYVDGVEVHNAKTKPREEQYNNASRVVSVLTVLHQDWLNGKEYKCKVSNKALPAPIEKTISKAKGQPREPQVYTLPPSRDELTKNQVSLTCLVKGFYPSDIAVEWESNGQPENNYKTTPPVLDSDGSFFLYSKLTVDKSRWQQGNVFSCSVMHEALHNHYTQKSLSLSPGGGGSGSAHPIPDSSPLLQFGGQVRQRYLYTDDACQTEAHLEIREDGTVGGAADQSPESLLQLKALKPGVIQILGVKTSRFLCQRPDGALYGSLHFDPEACSFRELLLEDGYNVYQSEAHGLPLHLCGNKSPHRDPAPRGPARFLPLPGLPPAPPEPPGILAPQPPDVGSSDPLSMVGSQGRSPSYAS

SEQ ID NO: 1998 - protein, 472 aa, Artificial Sequence
  Fusion Protein
YGEGTFTSDKSQLLEERLVHLFIEWLIAGGHSKIKPPPKGGGGGGGSGGGGSGGGGSADKTHTCPPCPAPELLGGPSVFLFPPKPKDTLMISRTPEVTCVVVDVSHEDPEVKFNWYVDGVEVHNAKTKPREEQYNNASRVVSVLTVLHQDWLNGKEYKCKVSNKALPAPIEKTISKAKGQPREPQVYTLPPSRDELTKNQVSLTCLVKGFYPSDIAVEWESNGQPENNYKTTPPVLDSDGSFFLYSKLTVDKSRWQQGNVFSCSVMHEALHNHYTQKSLSLSPGGGGSGSAHPIPDSSPLLQFGGQVRQRYLYTDDACQTEAHLEIREDGTVGGAADQSPESLLQLKALKPGVIQILGVKTSRFLCQRPDGALYGSLHFDPEACSFRELLLEDGYNVYQSEAHGLPLHLCGNKSPHRDPAPRGPARFLPLPGLPPAPPEPPGILAPQPPDVGSSDPLSMVYPSQGRSPSYAS

SEQ ID NO: 1999 - protein, 474 aa, Artificial Sequence
  Fusion Protein
YGEGTFTSDKSQLLEERLVHLFIEWLIAGGHSKIKPPPKGGGGGGGSGGGGSGGGGSAESKYGPPCPPCPAPEFEGGPSVFLFPPKPKDTLMISRTPEVTCVVVDVSQEDPEVQFNWYVDGVEVHNAKTKPREEQFNSTYRVVSVLTVLHQDWLNGKEYKCKVSNKGLPSSIEKTISKAKGQPREPQVYTLPPSQEEMTKNQVSLTCLVKGFYPSDIAVEWESNGQPENNYKTTPPVLDSDGSFFLYSRLTVDKSRWQEGNVFSCSVMHEALHNHYTQKSLSLSLGGGGSGSAHPIPDSSPLLQFGGQVRQRYLYTDDACQTEAHLEIREDGTVGGAADQSPESLLQLKALKPGVIQILGVKTSRFLCQRPDGALYGSLHFDPEACSFRELLLEDGYNVYQSEAHGLPLHLPGCKSPHRDPAPRGPARFLPLPGLPPAPPEPPGILAPQPPDVGSSDPLSMVYPSQGRSPSYAS

SEQ ID NO: 2000 - protein, 473 aa, Artificial Sequence
  Fusion Protein
YGEGTFTSDKSQLLEERLVHLFIEWLIAGGHSKIKPPPKGGGGGGGSGGGGSGGGGSAESKYGPPCPPCPAPEFEGGPSVFLFPPKPKDTLMISRTPEVTCVVVDVSQEDPEVQFNWYVDGVEVHNAKTKPREEQFNSTYRVVSVLTVLHQDWLNGKEYKCKVSNKGLPSSIEKTISKAKGQPREPQVYTLPPSQEEMTKNQVSLTCLVKGFYPSDIAVEWESNGQPENNYKTTPPVLDSDGSFFLYSRLTVDKSRWQEGNVFSCSVMHEALHNHYTQKSLSLSLGGGGSGSAHPIPDSSPLLQFGGQVRQRYLYTDDACQTEAHLEIREDGTVGGAADQSPESLLQLKALKPGVIQILGVKTSRFLCQRPDGALYGSLHFDPEACSFRELLLEDGYNVYQSEAHGLPLHLCGNKSPHRDPAPRGPARFLPLPGLPPAPPEPPGILAPQPPDVGSSDPLSMVGSQGRSPSYAS

SEQ ID NO: 2001 - protein, 474 aa, Artificial Sequence
  Fusion Protein
YGEGTFTSDKSQLLEERLVHLFIEWLIAGGHSKIKPPPKGGGGGGGSGGGGSGGGGSAESKYGPPCPPCPAPEFEGGPSVFLFPPKPKDTLMISRTPEVTCVVVDVSQEDPEVQFNWYVDGVEVHNAKTKPREEQFNSTYRVVSVLTVLHQDWLNGKEYKCKVSNKGLPSSIEKTISKAKGQPREPQVYTLPPSQEEMTKNQVSLTCLVKGFYPSDIAVEWESNGQPENNYKTTPPVLDSDGSFFLYSRLTVDKSRWQEGNVFSCSVMHEALHNHYTQKSLSLSLGGGGSGSAHPIPDSSPLLQFGGQVRQRYLYTDDACQTEAHLEIREDGTVGGAADQSPESLLQLKALKPGVIQILGVKTSRFLCQRPDGALYGSLHFDPEACSFRELLLEDGYNVYQSEAHGLPLHLCGNKSPHRDPAPRGPARFLPLPGLPPAPPEPPGILAPQPPDVGSSDPLSMVYPSQGRSPSYAS

SEQ ID NO: 2002 - protein, 471 aa, Artificial Sequence
  Fusion Protein
YGEGTFTSDKSQLLEKELAHLFIEWLIAGGHKSGRPSPKGGGGGGGSGGGGSGGGGSADKTHTCPPCPAPEAAGGPSVFLFPPKPKDTLMISRTPEVTCVVVDVSHEDPEVKFNWYVDGVEVHNAKTKPREEQYNSTYRVVSVLTVLHQDWLNGKEYKCKVSNKALPAPIEKTISKAKGQPREPQVYTLPPSRDELTKNQVSLTCLVKGFYPSDIAVEWESNGQPENNYKTTPPVLDSDGSFFLYSKLTVDKSRWQQGNVFSCSVMHEALHNHYTQKSLSLSPGGGGSGSAHPIPDSSPLLQFGGQVRQRYLYTDDACQTEAHLEIREDGTVGGAADQSPESLLQLKALKPGVIQILGVKTSRFLCQRPDGALYGSLHFDPEACSFRELLLEDGYNVYQSEAHGLPLHLPGCKSPHRDPAPRGPARFLPLPGLPPAPPEPPGILAPQPPDVGSSDPLSMVGSQGRSPSYAS

SEQ ID NO: 2003 - protein, 472 aa, Artificial Sequence
  Fusion Protein
YGEGTFTSDKSQLLEKELAHLFIEWLIAGGHKSGRPSPKGGGGGGGSGGGGSGGGGSADKTHTCPPCPAPEAAGGPSVFLFPPKPKDTLMISRTPEVTCVVVDVSHEDPEVKFNWYVDGVEVHNAKTKPREEQYNSTYRVVSVLTVLHQDWLNGKEYKCKVSNKALPAPIEKTISKAKGQPREPQVYTLPPSRDELTKNQVSLTCLVKGFYPSDIAVEWESNGQPENNYKTTPPVLDSDGSFFLYSKLTVDKSRWQQGNVFSCSVMHEALHNHYTQKSLSLSPGGGGSGSAHPIPDSSPLLQFGGQVRQRYLYTDDACQTEAHLEIREDGTVGGAADQSPESLLQLKALKPGVIQILGVKTSRFLCQRPDGALYGSLHFDPEACSFRELLLEDGYNVYQSEAHGLPLHLPGCKSPHRDPAPRGPARFLPLPGLPPAPPEPPGILAPQPPDVGSSDPLSMVYPSQGRSPSYAS

SEQ ID NO: 2004 - protein, 471 aa, Artificial Sequence
  Fusion Protein
YGEGTFTSDKSQLLEKELAHLFIEWLIAGGHKSGRPSPKGGGGGGGSGGGGSGGGGSADKTHTCPPCPAPEAAGGPSVFLFPPKPKDTLMISRTPEVTCVVVDVSHEDPEVKFNWYVDGVEVHNAKTKPREEQYNSTYRVVSVLTVLHQDWLNGKEYKCKVSNKALPAPIEKTISKAKGQPREPQVYTLPPSRDELTKNQVSLTCLVKGFYPSDIAVEWESNGQPENNYKTTPPVLDSDGSFFLYSKLTVDKSRWQQGNVFSCSVMHEALHNHYTQKSLSLSPGGGGSGSAHPIPDSSPLLQFGGQVRQRYLYTDDACQTEAHLEIREDGTVGGAADQSPESLLQLKALKPGVIQILGVKTSRFLCQRPDGALYGSLHFDPEACSFRELLLEDGYNVYQSEAHGLPLHLCGNKSPHRDPAPRGPARFLPLPGLPPAPPEPPGILAPQPPDVGSSDPLSMVGSQGRSPSYAS

SEQ ID NO: 2005 - protein, 472 aa, Artificial Sequence
  Fusion Protein
YGEGTFTSDKSQLLEKELAHLFIEWLIAGGHKSGRPSPKGGGGGGGSGGGGSGGGGSADKTHTCPPCPAPEAAGGPSVFLFPPKPKDTLMISRTPEVTCVVVDVSHEDPEVKFNWYVDGVEVHNAKTKPREEQYNSTYRVVSVLTVLHQDWLNGKEYKCKVSNKALPAPIEKTISKAKGQPREPQVYTLPPSRDELTKNQVSLTCLVKGFYPSDIAVEWESNGQPENNYKTTPPVLDSDGSFFLYSKLTVDKSRWQQGNVFSCSVMHEALHNHYTQKSLSLSPGGGGSGSAHPIPDSSPLLQFGGQVRQRYLYTDDACQTEAHLEIREDGTVGGAADQSPESLLQLKALKPGVIQILGVKTSRFLCQRPDGALYGSLHFDPEACSFRELLLEDGYNVYQSEAHGLPLHLCGNKSPHRDPAPRGPARFLPLPGLPPAPPEPPGILAPQPPDVGSSDPLSMVYPSQGRSPSYAS

SEQ ID NO: 2006 - protein, 471 aa, Artificial Sequence
  Fusion Protein
YGEGTFTSDKSQLLEKELAHLFIEWLIAGGHKSGRPSPKGGGGGGGSGGGGSGGGGSADKTHTCPPCPAPELLGGPSVFLFPPKPKDTLMISRTPEVTCVVVDVSHEDPEVKFNWYVDGVEVHNAKTKPREEQYNNASRVVSVLTVLHQDWLNGKEYKCKVSNKALPAPIEKTISKAKGQPREPQVYTLPPSRDELTKNQVSLTCLVKGFYPSDIAVEWESNGQPENNYKTTPPVLDSDGSFFLYSKLTVDKSRWQQGNVFSCSVMHEALHNHYTQKSLSLSPGGGGSGSAHPIPDSSPLLQFGGQVRQRYLYTDDACQTEAHLEIREDGTVGGAADQSPESLLQLKALKPGVIQILGVKTSRFLCQRPDGALYGSLHFDPEACSFRELLLEDGYNVYQSEAHGLPLHLPGCKSPHRDPAPRGPARFLPLPGLPPAPPEPPGILAPQPPDVGSSDPLSMVGSQGRSPSYAS

SEQ ID NO: 2007 - protein, 472 aa, Artificial Sequence
  Fusion Protein
YGEGTFTSDKSQLLEKELAHLFIEWLIAGGHKSGRPSPKGGGGGGGSGGGGSGGGGSADKTHTCPPCPAPELLGGPSVFLFPPKPKDTLMISRTPEVTCVVVDVSHEDPEVKFNWYVDGVEVHNAKTKPREEQYNNASRVVSVLTVLHQDWLNGKEYKCKVSNKALPAPIEKTISKAKGQPREPQVYTLPPSRDELTKNQVSLTCLVKGFYPSDIAVEWESNGQPENNYKTTPPVLDSDGSFFLYSKLTVDKSRWQQGNVFSCSVMHEALHNHYTQKSLSLSPGGGGSGSAHPIPDSSPLLQFGGQVRQRYLYTDDACQTEAHLEIREDGTVGGAADQSPESLLQLKALKPGVIQILGVKTSRFLCQRPDGALYGSLHFDPEACSFRELLLEDGYNVYQSEAHGLPLHLPGCKSPHRDPAPRGPARFLPLPGLPPAPPEPPGILAPQPPDVGSSDPLSMVYPSQGRSPSYAS

SEQ ID NO: 2008 - protein, 471 aa, Artificial Sequence
  Fusion Protein
YGEGTFTSDKSQLLEKELAHLFIEWLIAGGHKSGRPSPKGGGGGGGSGGGGSGGGGSADKTHTCPPCPAPELLGGPSVFLFPPKPKDTLMISRTPEVTCVVVDVSHEDPEVKFNWYVDGVEVHNAKTKPREEQYNNASRVVSVLTVLHQDWLNGKEYKCKVSNKALPAPIEKTISKAKGQPREPQVYTLPPSRDELTKNQVSLTCLVKGFYPSDIAVEWESNGQPENNYKTTPPVLDSDGSFFLYSKLTVDKSRWQQGNVFSCSVMHEALHNHYTQKSLSLSPGGGGSGSAHPIPDSSPLLQFGGQVRQRYLYTDDACQTEAHLEIREDGTVGGAADQSPESLLQLKALKPGVIQILGVKTSRFLCQRPDGALYGSLHFDPEACSFRELLLEDGYNVYQSEAHGLPLHLCGNKSPHRDPAPRGPARFLPLPGLPPAPPEPPGILAPQPPDVGSSDPLSMVGSQGRSPSYAS

SEQ ID NO: 2009 - protein, 472 aa, Artificial Sequence
  Fusion Protein
YGEGTFTSDKSQLLEKELAHLFIEWLIAGGHKSGRPSPKGGGGGGGSGGGGSGGGGSADKTHTCPPCPAPELLGGPSVFLFPPKPKDTLMISRTPEVTCVVVDVSHEDPEVKFNWYVDGVEVHNAKTKPREEQYNNASRVVSVLTVLHQDWLNGKEYKCKVSNKALPAPIEKTISKAKGQPREPQVYTLPPSRDELTKNQVSLTCLVKGFYPSDIAVEWESNGQPENNYKTTPPVLDSDGSFFLYSKLTVDKSRWQQGNVFSCSVMHEALHNHYTQKSLSLSPGGGGSGSAHPIPDSSPLLQFGGQVRQRYLYTDDACQTEAHLEIREDGTVGGAADQSPESLLQLKALKPGVIQILGVKTSRFLCQRPDGALYGSLHFDPEACSFRELLLEDGYNVYQSEAHGLPLHLCGNKSPHRDPAPRGPARFLPLPGLPPAPPEPPGILAPQPPDVGSSDPLSMVYPSQGRSPSYAS

SEQ ID NO: 2010 - protein, 474 aa, Artificial Sequence
  Fusion Protein
YGEGTFTSDKSQLLEKELAHLFIEWLIAGGHKSGRPSPKGGGGGGGSGGGGSGGGGSAESKYGPPCPPCPAPEFEGGPSVFLFPPKPKDTLMISRTPEVTCVVVDVSQEDPEVQFNWYVDGVEVHNAKTKPREEQFNSTYRVVSVLTVLHQDWLNGKEYKCKVSNKGLPSSIEKTISKAKGQPREPQVYTLPPSQEEMTKNQVSLTCLVKGFYPSDIAVEWESNGQPENNYKTTPPVLDSDGSFFLYSRLTVDKSRWQEGNVFSCSVMHEALHNHYTQKSLSLSLGGGGSGSAHPIPDSSPLLQFGGQVRQRYLYTDDACQTEAHLEIREDGTVGGAADQSPESLLQLKALKPGVIQILGVKTSRFLCQRPDGALYGSLHFDPEACSFRELLLEDGYNVYQSEAHGLPLHLPGCKSPHRDPAPRGPARFLPLPGLPPAPPEPPGILAPQPPDVGSSDPLSMVYPSQGRSPSYAS

SEQ ID NO: 2011 - protein, 473 aa, Artificial Sequence
  Fusion Protein
YGEGTFTSDKSQLLEKELAHLFIEWLIAGGHKSGRPSPKGGGGGGGSGGGGSGGGGSAESKYGPPCPPCPAPEFEGGPSVFLFPPKPKDTLMISRTPEVTCVVVDVSQEDPEVQFNWYVDGVEVHNAKTKPREEQFNSTYRVVSVLTVLHQDWLNGKEYKCKVSNKGLPSSIEKTISKAKGQPREPQVYTLPPSQEEMTKNQVSLTCLVKGFYPSDIAVEWESNGQPENNYKTTPPVLDSDGSFFLYSRLTVDKSRWQEGNVFSCSVMHEALHNHYTQKSLSLSLGGGGSGSAHPIPDSSPLLQFGGQVRQRYLYTDDACQTEAHLEIREDGTVGGAADQSPESLLQLKALKPGVIQILGVKTSRFLCQRPDGALYGSLHFDPEACSFRELLLEDGYNVYQSEAHGLPLHLCGNKSPHRDPAPRGPARFLPLPGLPPAPPEPPGILAPQPPDVGSSDPLSMVGSQGRSPSYAS

SEQ ID NO: 2012 - protein, 474 aa, Artificial Sequence
  Fusion Protein
YGEGTFTSDKSQLLEKELAHLFIEWLIAGGHKSGRPSPKGGGGGGGSGGGGSGGGGSAESKYGPPCPPCPAPEFEGGPSVFLFPPKPKDTLMISRTPEVTCVVVDVSQEDPEVQFNWYVDGVEVHNAKTKPREEQFNSTYRVVSVLTVLHQDWLNGKEYKCKVSNKGLPSSIEKTISKAKGQPREPQVYTLPPSQEEMTKNQVSLTCLVKGFYPSDIAVEWESNGQPENNYKTTPPVLDSDGSFFLYSRLTVDKSRWQEGNVFSCSVMHEALHNHYTQKSLSLSLGGGGSGSAHPIPDSSPLLQFGGQVRQRYLYTDDACQTEAHLEIREDGTVGGAADQSPESLLQLKALKPGVIQILGVKTSRFLCQRPDGALYGSLHFDPEACSFRELLLEDGYNVYQSEAHGLPLHLCGNKSPHRDPAPRGPARFLPLPGLPPAPPEPPGILAPQPPDVGSSDPLSMVYPSQGRSPSYAS

SEQ ID NO: 2013 - protein, 471 aa, Artificial Sequence
  Fusion Protein
HGEGTFTSDKSQLLEKRLAHLFIEWLLAGGPSSGKPPPKGGGGGGGSGGGGSGGGGSADKTHTCPPCPAPEAAGGPSVFLFPPKPKDTLMISRTPEVTCVVVDVSHEDPEVKFNWYVDGVEVHNAKTKPREEQYNSTYRVVSVLTVLHQDWLNGKEYKCKVSNKALPAPIEKTISKAKGQPREPQVYTLPPSRDELTKNQVSLTCLVKGFYPSDIAVEWESNGQPENNYKTTPPVLDSDGSFFLYSKLTVDKSRWQQGNVFSCSVMHEALHNHYTQKSLSLSPGGGGSGSAHPIPDSSPLLQFGGQVRQRYLYTDDACQTEAHLEIREDGTVGGAADQSPESLLQLKALKPGVIQILGVKTSRFLCQRPDGALYGSLHFDPEACSFRELLLEDGYNVYQSEAHGLPLHLPGCKSPHRDPAPRGPARFLPLPGLPPAPPEPPGILAPQPPDVGSSDPLSMVGSQGRSPSYAS

SEQ ID NO: 2014 - protein, 472 aa, Artificial Sequence
  Fusion Protein
HGEGTFTSDKSQLLEKRLAHLFIEWLLAGGPSSGKPPPKGGGGGGGSGGGGSGGGGSADKTHTCPPCPAPEAAGGPSVFLFPPKPKDTLMISRTPEVTCVVVDVSHEDPEVKFNWYVDGVEVHNAKTKPREEQYNSTYRVVSVLTVLHQDWLNGKEYKCKVSNKALPAPIEKTISKAKGQPREPQVYTLPPSRDELTKNQVSLTCLVKGFYPSDIAVEWESNGQPENNYKTTPPVLDSDGSFFLYSKLTVDKSRWQQGNVFSCSVMHEALHNHYTQKSLSLSPGGGGSGSAHPIPDSSPLLQFGGQVRQRYLYTDDACQTEAHLEIREDGTVGGAADQSPESLLQLKALKPGVIQILGVKTSRFLCQRPDGALYGSLHFDPEACSFRELLLEDGYNVYQSEAHGLPLHLPGCKSPHRDPAPRGPARFLPLPGLPPAPPEPPGILAPQPPDVGSSDPLSMVYPSQGRSPSYAS

SEQ ID NO: 2015 - protein, 471 aa, Artificial Sequence
  Fusion Protein
HGEGTFTSDKSQLLEKRLAHLFIEWLLAGGPSSGKPPPKGGGGGGGSGGGGSGGGGSADKTHTCPPCPAPEAAGGPSVFLFPPKPKDTLMISRTPEVTCVVVDVSHEDPEVKFNWYVDGVEVHNAKTKPREEQYNSTYRVVSVLTVLHQDWLNGKEYKCKVSNKALPAPIEKTISKAKGQPREPQVYTLPPSRDELTKNQVSLTCLVKGFYPSDIAVEWESNGQPENNYKTTPPVLDSDGSFFLYSKLTVDKSRWQQGNVFSCSVMHEALHNHYTQKSLSLSPGGGGSGSAHPIPDSSPLLQFGGQVRQRYLYTDDACQTEAHLEIREDGTVGGAADQSPESLLQLKALKPGVIQILGVKTSRFLCQRPDGALYGSLHFDPEACSFRELLLEDGYNVYQSEAHGLPLHLCGNKSPHRDPAPRGPARFLPLPGLPPAPPEPPGILAPQPPDVGSSDPLSMVGSQGRSPSYAS

SEQ ID NO: 2016 - protein, 472 aa, Artificial Sequence
  Fusion Protein
HGEGTFTSDKSQLLEKRLAHLFIEWLLAGGPSSGKPPPKGGGGGGGSGGGGSGGGGSADKTHTCPPCPAPEAAGGPSVFLFPPKPKDTLMISRTPEVTCVVVDVSHEDPEVKFNWYVDGVEVHNAKTKPREEQYNSTYRVVSVLTVLHQDWLNGKEYKCKVSNKALPAPIEKTISKAKGQPREPQVYTLPPSRDELTKNQVSLTCLVKGFYPSDIAVEWESNGQPENNYKTTPPVLDSDGSFFLYSKLTVDKSRWQQGNVFSCSVMHEALHNHYTQKSLSLSPGGGGSGSAHPIPDSSPLLQFGGQVRQRYLYTDDACQTEAHLEIREDGTVGGAADQSPESLLQLKALKPGVIQILGVKTSRFLCQRPDGALYGSLHFDPEACSFRELLLEDGYNVYQSEAHGLPLHLCGNKSPHRDPAPRGPARFLPLPGLPPAPPEPPGILAPQPPDVGSSDPLSMVYPSQGRSPSYAS

SEQ ID NO: 2017 - protein, 471 aa, Artificial Sequence
  Fusion Protein
HGEGTFTSDKSQLLEKRLAHLFIEWLLAGGPSSGKPPPKGGGGGGGSGGGGSGGGGSADKTHTCPPCPAPELLGGPSVFLFPPKPKDTLMISRTPEVTCVVVDVSHEDPEVKFNWYVDGVEVHNAKTKPREEQYNNASRVVSVLTVLHQDWLNGKEYKCKVSNKALPAPIEKTISKAKGQPREPQVYTLPPSRDELTKNQVSLTCLVKGFYPSDIAVEWESNGQPENNYKTTPPVLDSDGSFFLYSKLTVDKSRWQQGNVFSCSVMHEALHNHYTQKSLSLSPGGGGSGSAHPIPDSSPLLQFGGQVRQRYLYTDDACQTEAHLEIREDGTVGGAADQSPESLLQLKALKPGVIQILGVKTSRFLCQRPDGALYGSLHFDPEACSFRELLLEDGYNVYQSEAHGLPLHLPGCKSPHRDPAPRGPARFLPLPGLPPAPPEPPGILAPQPPDVGSSDPLSMVGSQGRSPSYAS

SEQ ID NO: 2018 - protein, 472 aa, Artificial Sequence
  Fusion Protein
HGEGTFTSDKSQLLEKRLAHLFIEWLLAGGPSSGKPPPKGGGGGGGSGGGGSGGGGSADKTHTCPPCPAPELLGGPSVFLFPPKPKDTLMISRTPEVTCVVVDVSHEDPEVKFNWYVDGVEVHNAKTKPREEQYNNASRVVSVLTVLHQDWLNGKEYKCKVSNKALPAPIEKTISKAKGQPREPQVYTLPPSRDELTKNQVSLTCLVKGFYPSDIAVEWESNGQPENNYKTTPPVLDSDGSFFLYSKLTVDKSRWQQGNVFSCSVMHEALHNHYTQKSLSLSPGGGGSGSAHPIPDSSPLLQFGGQVRQRYLYTDDACQTEAHLEIREDGTVGGAADQSPESLLQLKALKPGVIQILGVKTSRFLCQRPDGALYGSLHFDPEACSFRELLLEDGYNVYQSEAHGLPLHLPGCKSPHRDPAPRGPARFLPLPGLPPAPPEPPGILAPQPPDVGSSDPLSMVYPSQGRSPSYAS

SEQ ID NO: 2019 - protein, 471 aa, Artificial Sequence
  Fusion Protein
HGEGTFTSDKSQLLEKRLAHLFIEWLLAGGPSSGKPPPKGGGGGGGSGGGGSGGGGSADKTHTCPPCPAPELLGGPSVFLFPPKPKDTLMISRTPEVTCVVVDVSHEDPEVKFNWYVDGVEVHNAKTKPREEQYNNASRVVSVLTVLHQDWLNGKEYKCKVSNKALPAPIEKTISKAKGQPREPQVYTLPPSRDELTKNQVSLTCLVKGFYPSDIAVEWESNGQPENNYKTTPPVLDSDGSFFLYSKLTVDKSRWQQGNVFSCSVMHEALHNHYTQKSLSLSPGGGGSGSAHPIPDSSPLLQFGGQVRQRYLYTDDACQTEAHLEIREDGTVGGAADQSPESLLQLKALKPGVIQILGVKTSRFLCQRPDGALYGSLHFDPEACSFRELLLEDGYNVYQSEAHGLPLHLCGNKSPHRDPAPRGPARFLPLPGLPPAPPEPPGILAPQPPDVGSSDPLSMVGSQGRSPSYAS

SEQ ID NO: 2020 - protein, 472 aa, Artificial Sequence
  Fusion Protein
HGEGTFTSDKSQLLEKRLAHLFIEWLLAGGPSSGKPPPKGGGGGGGSGGGGSGGGGSADKTHTCPPCPAPELLGGPSVFLFPPKPKDTLMISRTPEVTCVVVDVSHEDPEVKFNWYVDGVEVHNAKTKPREEQYNNASRVVSVLTVLHQDWLNGKEYKCKVSNKALPAPIEKTISKAKGQPREPQVYTLPPSRDELTKNQVSLTCLVKGFYPSDIAVEWESNGQPENNYKTTPPVLDSDGSFFLYSKLTVDKSRWQQGNVFSCSVMHEALHNHYTQKSLSLSPGGGGSGSAHPIPDSSPLLQFGGQVRQRYLYTDDACQTEAHLEIREDGTVGGAADQSPESLLQLKALKPGVIQILGVKTSRFLCQRPDGALYGSLHFDPEACSFRELLLEDGYNVYQSEAHGLPLHLCGNKSPHRDPAPRGPARFLPLPGLPPAPPEPPGILAPQPPDVGSSDPLSMVYPSQGRSPSYAS

SEQ ID NO: 2021 - protein, 474 aa, Artificial Sequence
  Fusion Protein
HGEGTFTSDKSQLLEKRLAHLFIEWLLAGGPSSGKPPPKGGGGGGGSGGGGSGGGGSAESKYGPPCPPCPAPEFEGGPSVFLFPPKPKDTLMISRTPEVTCVVVDVSQEDPEVQFNWYVDGVEVHNAKTKPREEQFNSTYRVVSVLTVLHQDWLNGKEYKCKVSNKGLPSSIEKTISKAKGQPREPQVYTLPPSQEEMTKNQVSLTCLVKGFYPSDIAVEWESNGQPENNYKTTPPVLDSDGSFFLYSRLTVDKSRWQEGNVFSCSVMHEALHNHYTQKSLSLSLGGGGSGSAHPIPDSSPLLQFGGQVRQRYLYTDDACQTEAHLEIREDGTVGGAADQSPESLLQLKALKPGVIQILGVKTSRFLCQRPDGALYGSLHFDPEACSFRELLLEDGYNVYQSEAHGLPLHLPGCKSPHRDPAPRGPARFLPLPGLPPAPPEPPGILAPQPPDVGSSDPLSMVYPSQGRSPSYAS

SEQ ID NO: 2022 - protein, 473 aa, Artificial Sequence
  Fusion Protein
HGEGTFTSDKSQLLEKRLAHLFIEWLLAGGPSSGKPPPKGGGGGGGSGGGGSGGGGSAESKYGPPCPPCPAPEFEGGPSVFLFPPKPKDTLMISRTPEVTCVVVDVSQEDPEVQFNWYVDGVEVHNAKTKPREEQFNSTYRVVSVLTVLHQDWLNGKEYKCKVSNKGLPSSIEKTISKAKGQPREPQVYTLPPSQEEMTKNQVSLTCLVKGFYPSDIAVEWESNGQPENNYKTTPPVLDSDGSFFLYSRLTVDKSRWQEGNVFSCSVMHEALHNHYTQKSLSLSLGGGGSGSAHPIPDSSPLLQFGGQVRQRYLYTDDACQTEAHLEIREDGTVGGAADQSPESLLQLKALKPGVIQILGVKTSRFLCQRPDGALYGSLHFDPEACSFRELLLEDGYNVYQSEAHGLPLHLCGNKSPHRDPAPRGPARFLPLPGLPPAPPEPPGILAPQPPDVGSSDPLSMVGSQGRSPSYAS

SEQ ID NO: 2023 - protein, 474 aa, Artificial Sequence
  Fusion Protein
HGEGTFTSDKSQLLEKRLAHLFIEWLLAGGPSSGKPPPKGGGGGGGSGGGGSGGGGSAESKYGPPCPPCPAPEFEGGPSVFLFPPKPKDTLMISRTPEVTCVVVDVSQEDPEVQFNWYVDGVEVHNAKTKPREEQFNSTYRVVSVLTVLHQDWLNGKEYKCKVSNKGLPSSIEKTISKAKGQPREPQVYTLPPSQEEMTKNQVSLTCLVKGFYPSDIAVEWESNGQPENNYKTTPPVLDSDGSFFLYSRLTVDKSRWQEGNVFSCSVMHEALHNHYTQKSLSLSLGGGGSGSAHPIPDSSPLLQFGGQVRQRYLYTDDACQTEAHLEIREDGTVGGAADQSPESLLQLKALKPGVIQILGVKTSRFLCQRPDGALYGSLHFDPEACSFRELLLEDGYNVYQSEAHGLPLHLCGNKSPHRDPAPRGPARFLPLPGLPPAPPEPPGILAPQPPDVGSSDPLSMVYPSQGRSPSYAS

SEQ ID NO: 2024 - protein, 471 aa, Artificial Sequence
  Fusion Protein
HGEGTFTSDKSQLLEKRAAHLFIEWLIAGGPSKGKPPPKGGGGGGGSGGGGSGGGGSADKTHTCPPCPAPEAAGGPSVFLFPPKPKDTLMISRTPEVTCVVVDVSHEDPEVKFNWYVDGVEVHNAKTKPREEQYNSTYRVVSVLTVLHQDWLNGKEYKCKVSNKALPAPIEKTISKAKGQPREPQVYTLPPSRDELTKNQVSLTCLVKGFYPSDIAVEWESNGQPENNYKTTPPVLDSDGSFFLYSKLTVDKSRWQQGNVFSCSVMHEALHNHYTQKSLSLSPGGGGSGSAHPIPDSSPLLQFGGQVRQRYLYTDDACQTEAHLEIREDGTVGGAADQSPESLLQLKALKPGVIQILGVKTSRFLCQRPDGALYGSLHFDPEACSFRELLLEDGYNVYQSEAHGLPLHLPGCKSPHRDPAPRGPARFLPLPGLPPAPPEPPGILAPQPPDVGSSDPLSMVGSQGRSPSYAS

SEQ ID NO: 2025 - protein, 472 aa, Artificial Sequence
  Fusion Protein
HGEGTFTSDKSQLLEKRAAHLFIEWLIAGGPSKGKPPPKGGGGGGGSGGGGSGGGGSADKTHTCPPCPAPEAAGGPSVFLFPPKPKDTLMISRTPEVTCVVVDVSHEDPEVKFNWYVDGVEVHNAKTKPREEQYNSTYRVVSVLTVLHQDWLNGKEYKCKVSNKALPAPIEKTISKAKGQPREPQVYTLPPSRDELTKNQVSLTCLVKGFYPSDIAVEWESNGQPENNYKTTPPVLDSDGSFFLYSKLTVDKSRWQQGNVFSCSVMHEALHNHYTQKSLSLSPGGGGSGSAHPIPDSSPLLQFGGQVRQRYLYTDDACQTEAHLEIREDGTVGGAADQSPESLLQLKALKPGVIQILGVKTSRFLCQRPDGALYGSLHFDPEACSFRELLLEDGYNVYQSEAHGLPLHLPGCKSPHRDPAPRGPARFLPLPGLPPAPPEPPGILAPQPPDVGSSDPLSMVYPSQGRSPSYAS

SEQ ID NO: 2026 - protein, 471 aa, Artificial Sequence
  Fusion Protein
HGEGTFTSDKSQLLEKRAAHLFIEWLIAGGPSKGKPPPKGGGGGGGSGGGGSGGGGSADKTHTCPPCPAPEAAGGPSVFLFPPKPKDTLMISRTPEVTCVVVDVSHEDPEVKFNWYVDGVEVHNAKTKPREEQYNSTYRVVSVLTVLHQDWLNGKEYKCKVSNKALPAPIEKTISKAKGQPREPQVYTLPPSRDELTKNQVSLTCLVKGFYPSDIAVEWESNGQPENNYKTTPPVLDSDGSFFLYSKLTVDKSRWQQGNVFSCSVMHEALHNHYTQKSLSLSPGGGGSGSAHPIPDSSPLLQFGGQVRQRYLYTDDACQTEAHLEIREDGTVGGAADQSPESLLQLKALKPGVIQILGVKTSRFLCQRPDGALYGSLHFDPEACSFRELLLEDGYNVYQSEAHGLPLHLCGNKSPHRDPAPRGPARFLPLPGLPPAPPEPPGILAPQPPDVGSSDPLSMVGSQGRSPSYAS

SEQ ID NO: 2027 - protein, 472 aa, Artificial Sequence
  Fusion Protein
HGEGTFTSDKSQLLEKRAAHLFIEWLIAGGPSKGKPPPKGGGGGGGSGGGGSGGGGSADKTHTCPPCPAPEAAGGPSVFLFPPKPKDTLMISRTPEVTCVVVDVSHEDPEVKFNWYVDGVEVHNAKTKPREEQYNSTYRVVSVLTVLHQDWLNGKEYKCKVSNKALPAPIEKTISKAKGQPREPQVYTLPPSRDELTKNQVSLTCLVKGFYPSDIAVEWESNGQPENNYKTTPPVLDSDGSFFLYSKLTVDKSRWQQGNVFSCSVMHEALHNHYTQKSLSLSPGGGGSGSAHPIPDSSPLLQFGGQVRQRYLYTDDACQTEAHLEIREDGTVGGAADQSPESLLQLKALKPGVIQILGVKTSRFLCQRPDGALYGSLHFDPEACSFRELLLEDGYNVYQSEAHGLPLHLCGNKSPHRDPAPRGPARFLPLPGLPPAPPEPPGILAPQPPDVGSSDPLSMVYPSQGRSPSYAS

SEQ ID NO: 2028 - protein, 471 aa, Artificial Sequence
  Fusion Protein
HGEGTFTSDKSQLLEKRAAHLFIEWLIAGGPSKGKPPPKGGGGGGGSGGGGSGGGGSADKTHTCPPCPAPELLGGPSVFLFPPKPKDTLMISRTPEVTCVVVDVSHEDPEVKFNWYVDGVEVHNAKTKPREEQYNNASRVVSVLTVLHQDWLNGKEYKCKVSNKALPAPIEKTISKAKGQPREPQVYTLPPSRDELTKNQVSLTCLVKGFYPSDIAVEWESNGQPENNYKTTPPVLDSDGSFFLYSKLTVDKSRWQQGNVFSCSVMHEALHNHYTQKSLSLSPGGGGSGSAHPIPDSSPLLQFGGQVRQRYLYTDDACQTEAHLEIREDGTVGGAADQSPESLLQLKALKPGVIQILGVKTSRFLCQRPDGALYGSLHFDPEACSFRELLLEDGYNVYQSEAHGLPLHLPGCKSPHRDPAPRGPARFLPLPGLPPAPPEPPGILAPQPPDVGSSDPLSMVGSQGRSPSYAS

SEQ ID NO: 2029 - protein, 472 aa, Artificial Sequence
  Fusion Protein
HGEGTFTSDKSQLLEKRAAHLFIEWLIAGGPSKGKPPPKGGGGGGGSGGGGSGGGGSADKTHTCPPCPAPELLGGPSVFLFPPKPKDTLMISRTPEVTCVVVDVSHEDPEVKFNWYVDGVEVHNAKTKPREEQYNNASRVVSVLTVLHQDWLNGKEYKCKVSNKALPAPIEKTISKAKGQPREPQVYTLPPSRDELTKNQVSLTCLVKGFYPSDIAVEWESNGQPENNYKTTPPVLDSDGSFFLYSKLTVDKSRWQQGNVFSCSVMHEALHNHYTQKSLSLSPGGGGSGSAHPIPDSSPLLQFGGQVRQRYLYTDDACQTEAHLEIREDGTVGGAADQSPESLLQLKALKPGVIQILGVKTSRFLCQRPDGALYGSLHFDPEACSFRELLLEDGYNVYQSEAHGLPLHLPGCKSPHRDPAPRGPARFLPLPGLPPAPPEPPGILAPQPPDVGSSDPLSMVYPSQGRSPSYAS

SEQ ID NO: 2030 - protein, 471 aa, Artificial Sequence
  Fusion Protein
HGEGTFTSDKSQLLEKRAAHLFIEWLIAGGPSKGKPPPKGGGGGGGSGGGGSGGGGSADKTHTCPPCPAPELLGGPSVFLFPPKPKDTLMISRTPEVTCVVVDVSHEDPEVKFNWYVDGVEVHNAKTKPREEQYNNASRVVSVLTVLHQDWLNGKEYKCKVSNKALPAPIEKTISKAKGQPREPQVYTLPPSRDELTKNQVSLTCLVKGFYPSDIAVEWESNGQPENNYKTTPPVLDSDGSFFLYSKLTVDKSRWQQGNVFSCSVMHEALHNHYTQKSLSLSPGGGGSGSAHPIPDSSPLLQFGGQVRQRYLYTDDACQTEAHLEIREDGTVGGAADQSPESLLQLKALKPGVIQILGVKTSRFLCQRPDGALYGSLHFDPEACSFRELLLEDGYNVYQSEAHGLPLHLCGNKSPHRDPAPRGPARFLPLPGLPPAPPEPPGILAPQPPDVGSSDPLSMVGSQGRSPSYAS

SEQ ID NO: 2031 - protein, 472 aa, Artificial Sequence
  Fusion Protein
HGEGTFTSDKSQLLEKRAAHLFIEWLIAGGPSKGKPPPKGGGGGGGSGGGGSGGGGSADKTHTCPPCPAPELLGGPSVFLFPPKPKDTLMISRTPEVTCVVVDVSHEDPEVKFNWYVDGVEVHNAKTKPREEQYNNASRVVSVLTVLHQDWLNGKEYKCKVSNKALPAPIEKTISKAKGQPREPQVYTLPPSRDELTKNQVSLTCLVKGFYPSDIAVEWESNGQPENNYKTTPPVLDSDGSFFLYSKLTVDKSRWQQGNVFSCSVMHEALHNHYTQKSLSLSPGGGGSGSAHPIPDSSPLLQFGGQVRQRYLYTDDACQTEAHLEIREDGTVGGAADQSPESLLQLKALKPGVIQILGVKTSRFLCQRPDGALYGSLHFDPEACSFRELLLEDGYNVYQSEAHGLPLHLCGNKSPHRDPAPRGPARFLPLPGLPPAPPEPPGILAPQPPDVGSSDPLSMVYPSQGRSPSYAS

SEQ ID NO: 2032 - protein, 474 aa, Artificial Sequence
  Fusion Protein
HGEGTFTSDKSQLLEKRAAHLFIEWLIAGGPSKGKPPPKGGGGGGGSGGGGSGGGGSAESKYGPPCPPCPAPEFEGGPSVFLFPPKPKDTLMISRTPEVTCVVVDVSQEDPEVQFNWYVDGVEVHNAKTKPREEQFNSTYRVVSVLTVLHQDWLNGKEYKCKVSNKGLPSSIEKTISKAKGQPREPQVYTLPPSQEEMTKNQVSLTCLVKGFYPSDIAVEWESNGQPENNYKTTPPVLDSDGSFFLYSRLTVDKSRWQEGNVFSCSVMHEALHNHYTQKSLSLSLGGGGSGSAHPIPDSSPLLQFGGQVRQRYLYTDDACQTEAHLEIREDGTVGGAADQSPESLLQLKALKPGVIQILGVKTSRFLCQRPDGALYGSLHFDPEACSFRELLLEDGYNVYQSEAHGLPLHLPGCKSPHRDPAPRGPARFLPLPGLPPAPPEPPGILAPQPPDVGSSDPLSMVYPSQGRSPSYAS

SEQ ID NO: 2033 - protein, 473 aa, Artificial Sequence
  Fusion Protein
HGEGTFTSDKSQLLEKRAAHLFIEWLIAGGPSKGKPPPKGGGGGGGSGGGGSGGGGSAESKYGPPCPPCPAPEFEGGPSVFLFPPKPKDTLMISRTPEVTCVVVDVSQEDPEVQFNWYVDGVEVHNAKTKPREEQFNSTYRVVSVLTVLHQDWLNGKEYKCKVSNKGLPSSIEKTISKAKGQPREPQVYTLPPSQEEMTKNQVSLTCLVKGFYPSDIAVEWESNGQPENNYKTTPPVLDSDGSFFLYSRLTVDKSRWQEGNVFSCSVMHEALHNHYTQKSLSLSLGGGGSGSAHPIPDSSPLLQFGGQVRQRYLYTDDACQTEAHLEIREDGTVGGAADQSPESLLQLKALKPGVIQILGVKTSRFLCQRPDGALYGSLHFDPEACSFRELLLEDGYNVYQSEAHGLPLHLCGNKSPHRDPAPRGPARFLPLPGLPPAPPEPPGILAPQPPDVGSSDPLSMVGSQGRSPSYAS

SEQ ID NO: 2034 - protein, 474 aa, Artificial Sequence
  Fusion Protein
HGEGTFTSDKSQLLEKRAAHLFIEWLIAGGPSKGKPPPKGGGGGGGSGGGGSGGGGSAESKYGPPCPPCPAPEFEGGPSVFLFPPKPKDTLMISRTPEVTCVVVDVSQEDPEVQFNWYVDGVEVHNAKTKPREEQFNSTYRVVSVLTVLHQDWLNGKEYKCKVSNKGLPSSIEKTISKAKGQPREPQVYTLPPSQEEMTKNQVSLTCLVKGFYPSDIAVEWESNGQPENNYKTTPPVLDSDGSFFLYSRLTVDKSRWQEGNVFSCSVMHEALHNHYTQKSLSLSLGGGGSGSAHPIPDSSPLLQFGGQVRQRYLYTDDACQTEAHLEIREDGTVGGAADQSPESLLQLKALKPGVIQILGVKTSRFLCQRPDGALYGSLHFDPEACSFRELLLEDGYNVYQSEAHGLPLHLCGNKSPHRDPAPRGPARFLPLPGLPPAPPEPPGILAPQPPDVGSSDPLSMVYPSQGRSPSYAS

SEQ ID NO: 2035 - protein, 471 aa, Artificial Sequence
  Fusion Protein
HGEGTFTSDKSQLLEKRLAHLFIEWLLAGGPSSGRPPPKGGGGGGGSGGGGSGGGGSADKTHTCPPCPAPEAAGGPSVFLFPPKPKDTLMISRTPEVTCVVVDVSHEDPEVKFNWYVDGVEVHNAKTKPREEQYNSTYRVVSVLTVLHQDWLNGKEYKCKVSNKALPAPIEKTISKAKGQPREPQVYTLPPSRDELTKNQVSLTCLVKGFYPSDIAVEWESNGQPENNYKTTPPVLDSDGSFFLYSKLTVDKSRWQQGNVFSCSVMHEALHNHYTQKSLSLSPGGGGSGSAHPIPDSSPLLQFGGQVRQRYLYTDDACQTEAHLEIREDGTVGGAADQSPESLLQLKALKPGVIQILGVKTSRFLCQRPDGALYGSLHFDPEACSFRELLLEDGYNVYQSEAHGLPLHLPGCKSPHRDPAPRGPARFLPLPGLPPAPPEPPGILAPQPPDVGSSDPLSMVGSQGRSPSYAS

SEQ ID NO: 2036 - protein, 472 aa, Artificial Sequence
  Fusion Protein
HGEGTFTSDKSQLLEKRLAHLFIEWLLAGGPSSGRPPPKGGGGGGGSGGGGSGGGGSADKTHTCPPCPAPEAAGGPSVFLFPPKPKDTLMISRTPEVTCVVVDVSHEDPEVKFNWYVDGVEVHNAKTKPREEQYNSTYRVVSVLTVLHQDWLNGKEYKCKVSNKALPAPIEKTISKAKGQPREPQVYTLPPSRDELTKNQVSLTCLVKGFYPSDIAVEWESNGQPENNYKTTPPVLDSDGSFFLYSKLTVDKSRWQQGNVFSCSVMHEALHNHYTQKSLSLSPGGGGSGSAHPIPDSSPLLQFGGQVRQRYLYTDDACQTEAHLEIREDGTVGGAADQSPESLLQLKALKPGVIQILGVKTSRFLCQRPDGALYGSLHFDPEACSFRELLLEDGYNVYQSEAHGLPLHLPGCKSPHRDPAPRGPARFLPLPGLPPAPPEPPGILAPQPPDVGSSDPLSMVYPSQGRSPSYAS

SEQ ID NO: 2037 - protein, 471 aa, Artificial Sequence
  Fusion Protein
HGEGTFTSDKSQLLEKRLAHLFIEWLLAGGPSSGRPPPKGGGGGGGSGGGGSGGGGSADKTHTCPPCPAPEAAGGPSVFLFPPKPKDTLMISRTPEVTCVVVDVSHEDPEVKFNWYVDGVEVHNAKTKPREEQYNSTYRVVSVLTVLHQDWLNGKEYKCKVSNKALPAPIEKTISKAKGQPREPQVYTLPPSRDELTKNQVSLTCLVKGFYPSDIAVEWESNGQPENNYKTTPPVLDSDGSFFLYSKLTVDKSRWQQGNVFSCSVMHEALHNHYTQKSLSLSPGGGGSGSAHPIPDSSPLLQFGGQVRQRYLYTDDACQTEAHLEIREDGTVGGAADQSPESLLQLKALKPGVIQILGVKTSRFLCQRPDGALYGSLHFDPEACSFRELLLEDGYNVYQSEAHGLPLHLCGNKSPHRDPAPRGPARFLPLPGLPPAPPEPPGILAPQPPDVGSSDPLSMVGSQGRSPSYAS

SEQ ID NO: 2038 - protein, 472 aa, Artificial Sequence
  Fusion Protein
HGEGTFTSDKSQLLEKRLAHLFIEWLLAGGPSSGRPPPKGGGGGGGSGGGGSGGGGSADKTHTCPPCPAPEAAGGPSVFLFPPKPKDTLMISRTPEVTCVVVDVSHEDPEVKFNWYVDGVEVHNAKTKPREEQYNSTYRVVSVLTVLHQDWLNGKEYKCKVSNKALPAPIEKTISKAKGQPREPQVYTLPPSRDELTKNQVSLTCLVKGFYPSDIAVEWESNGQPENNYKTTPPVLDSDGSFFLYSKLTVDKSRWQQGNVFSCSVMHEALHNHYTQKSLSLSPGGGGSGSAHPIPDSSPLLQFGGQVRQRYLYTDDACQTEAHLEIREDGTVGGAADQSPESLLQLKALKPGVIQILGVKTSRFLCQRPDGALYGSLHFDPEACSFRELLLEDGYNVYQSEAHGLPLHLCGNKSPHRDPAPRGPARFLPLPGLPPAPPEPPGILAPQPPDVGSSDPLSMVYPSQGRSPSYAS

SEQ ID NO: 2039 - protein, 471 aa, Artificial Sequence
  Fusion Protein
HGEGTFTSDKSQLLEKRLAHLFIEWLLAGGPSSGRPPPKGGGGGGGSGGGGSGGGGSADKTHTCPPCPAPELLGGPSVFLFPPKPKDTLMISRTPEVTCVVVDVSHEDPEVKFNWYVDGVEVHNAKTKPREEQYNNASRVVSVLTVLHQDWLNGKEYKCKVSNKALPAPIEKTISKAKGQPREPQVYTLPPSRDELTKNQVSLTCLVKGFYPSDIAVEWESNGQPENNYKTTPPVLDSDGSFFLYSKLTVDKSRWQQGNVFSCSVMHEALHNHYTQKSLSLSPGGGGSGSAHPIPDSSPLLQFGGQVRQRYLYTDDACQTEAHLEIREDGTVGGAADQSPESLLQLKALKPGVIQILGVKTSRFLCQRPDGALYGSLHFDPEACSFRELLLEDGYNVYQSEAHGLPLHLPGCKSPHRDPAPRGPARFLPLPGLPPAPPEPPGILAPQPPDVGSSDPLSMVGSQGRSPSYAS

SEQ ID NO: 2040 - protein, 472 aa, Artificial Sequence
  Fusion Protein
HGEGTFTSDKSQLLEKRLAHLFIEWLLAGGPSSGRPPPKGGGGGGGSGGGGSGGGGSADKTHTCPPCPAPELLGGPSVFLFPPKPKDTLMISRTPEVTCVVVDVSHEDPEVKFNWYVDGVEVHNAKTKPREEQYNNASRVVSVLTVLHQDWLNGKEYKCKVSNKALPAPIEKTISKAKGQPREPQVYTLPPSRDELTKNQVSLTCLVKGFYPSDIAVEWESNGQPENNYKTTPPVLDSDGSFFLYSKLTVDKSRWQQGNVFSCSVMHEALHNHYTQKSLSLSPGGGGSGSAHPIPDSSPLLQFGGQVRQRYLYTDDACQTEAHLEIREDGTVGGAADQSPESLLQLKALKPGVIQILGVKTSRFLCQRPDGALYGSLHFDPEACSFRELLLEDGYNVYQSEAHGLPLHLPGCKSPHRDPAPRGPARFLPLPGLPPAPPEPPGILAPQPPDVGSSDPLSMVYPSQGRSPSYAS

SEQ ID NO: 2041 - protein, 471 aa, Artificial Sequence
  Fusion Protein
HGEGTFTSDKSQLLEKRLAHLFIEWLLAGGPSSGRPPPKGGGGGGGSGGGGSGGGGSADKTHTCPPCPAPELLGGPSVFLFPPKPKDTLMISRTPEVTCVVVDVSHEDPEVKFNWYVDGVEVHNAKTKPREEQYNNASRVVSVLTVLHQDWLNGKEYKCKVSNKALPAPIEKTISKAKGQPREPQVYTLPPSRDELTKNQVSLTCLVKGFYPSDIAVEWESNGQPENNYKTTPPVLDSDGSFFLYSKLTVDKSRWQQGNVFSCSVMHEALHNHYTQKSLSLSPGGGGSGSAHPIPDSSPLLQFGGQVRQRYLYTDDACQTEAHLEIREDGTVGGAADQSPESLLQLKALKPGVIQILGVKTSRFLCQRPDGALYGSLHFDPEACSFRELLLEDGYNVYQSEAHGLPLHLCGNKSPHRDPAPRGPARFLPLPGLPPAPPEPPGILAPQPPDVGSSDPLSMVGSQGRSPSYAS

SEQ ID NO: 2042 - protein, 472 aa, Artificial Sequence
  Fusion Protein
HGEGTFTSDKSQLLEKRLAHLFIEWLLAGGPSSGRPPPKGGGGGGGSGGGGSGGGGSADKTHTCPPCPAPELLGGPSVFLFPPKPKDTLMISRTPEVTCVVVDVSHEDPEVKFNWYVDGVEVHNAKTKPREEQYNNASRVVSVLTVLHQDWLNGKEYKCKVSNKALPAPIEKTISKAKGQPREPQVYTLPPSRDELTKNQVSLTCLVKGFYPSDIAVEWESNGQPENNYKTTPPVLDSDGSFFLYSKLTVDKSRWQQGNVFSCSVMHEALHNHYTQKSLSLSPGGGGSGSAHPIPDSSPLLQFGGQVRQRYLYTDDACQTEAHLEIREDGTVGGAADQSPESLLQLKALKPGVIQILGVKTSRFLCQRPDGALYGSLHFDPEACSFRELLLEDGYNVYQSEAHGLPLHLCGNKSPHRDPAPRGPARFLPLPGLPPAPPEPPGILAPQPPDVGSSDPLSMVYPSQGRSPSYAS

SEQ ID NO: 2043 - protein, 474 aa, Artificial Sequence
  Fusion Protein
HGEGTFTSDKSQLLEKRLAHLFIEWLLAGGPSSGRPPPKGGGGGGGSGGGGSGGGGSAESKYGPPCPPCPAPEFEGGPSVFLFPPKPKDTLMISRTPEVTCVVVDVSQEDPEVQFNWYVDGVEVHNAKTKPREEQFNSTYRVVSVLTVLHQDWLNGKEYKCKVSNKGLPSSIEKTISKAKGQPREPQVYTLPPSQEEMTKNQVSLTCLVKGFYPSDIAVEWESNGQPENNYKTTPPVLDSDGSFFLYSRLTVDKSRWQEGNVFSCSVMHEALHNHYTQKSLSLSLGGGGSGSAHPIPDSSPLLQFGGQVRQRYLYTDDACQTEAHLEIREDGTVGGAADQSPESLLQLKALKPGVIQILGVKTSRFLCQRPDGALYGSLHFDPEACSFRELLLEDGYNVYQSEAHGLPLHLPGCKSPHRDPAPRGPARFLPLPGLPPAPPEPPGILAPQPPDVGSSDPLSMVYPSQGRSPSYAS

SEQ ID NO: 2044 - protein, 473 aa, Artificial Sequence
  Fusion Protein
HGEGTFTSDKSQLLEKRLAHLFIEWLLAGGPSSGRPPPKGGGGGGGSGGGGSGGGGSAESKYGPPCPPCPAPEFEGGPSVFLFPPKPKDTLMISRTPEVTCVVVDVSQEDPEVQFNWYVDGVEVHNAKTKPREEQFNSTYRVVSVLTVLHQDWLNGKEYKCKVSNKGLPSSIEKTISKAKGQPREPQVYTLPPSQEEMTKNQVSLTCLVKGFYPSDIAVEWESNGQPENNYKTTPPVLDSDGSFFLYSRLTVDKSRWQEGNVFSCSVMHEALHNHYTQKSLSLSLGGGGSGSAHPIPDSSPLLQFGGQVRQRYLYTDDACQTEAHLEIREDGTVGGAADQSPESLLQLKALKPGVIQILGVKTSRFLCQRPDGALYGSLHFDPEACSFRELLLEDGYNVYQSEAHGLPLHLCGNKSPHRDPAPRGPARFLPLPGLPPAPPEPPGILAPQPPDVGSSDPLSMVGSQGRSPSYAS

SEQ ID NO: 2045 - protein, 474 aa, Artificial Sequence
  Fusion Protein
HGEGTFTSDKSQLLEKRLAHLFIEWLLAGGPSSGRPPPKGGGGGGGSGGGGSGGGGSAESKYGPPCPPCPAPEFEGGPSVFLFPPKPKDTLMISRTPEVTCVVVDVSQEDPEVQFNWYVDGVEVHNAKTKPREEQFNSTYRVVSVLTVLHQDWLNGKEYKCKVSNKGLPSSIEKTISKAKGQPREPQVYTLPPSQEEMTKNQVSLTCLVKGFYPSDIAVEWESNGQPENNYKTTPPVLDSDGSFFLYSRLTVDKSRWQEGNVFSCSVMHEALHNHYTQKSLSLSLGGGGSGSAHPIPDSSPLLQFGGQVRQRYLYTDDACQTEAHLEIREDGTVGGAADQSPESLLQLKALKPGVIQILGVKTSRFLCQRPDGALYGSLHFDPEACSFRELLLEDGYNVYQSEAHGLPLHLCGNKSPHRDPAPRGPARFLPLPGLPPAPPEPPGILAPQPPDVGSSDPLSMVYPSQGRSPSYAS

SEQ ID NO: 2046 - protein, 471 aa, Artificial Sequence
  Fusion Protein
YGEGTFTSDKSQLLEKRLAHLFIEWLIKGGHSSIRPPPKGGGGGGGSGGGGSGGGGSADKTHTCPPCPAPEAAGGPSVFLFPPKPKDTLMISRTPEVTCVVVDVSHEDPEVKFNWYVDGVEVHNAKTKPREEQYNSTYRVVSVLTVLHQDWLNGKEYKCKVSNKALPAPIEKTISKAKGQPREPQVYTLPPSRDELTKNQVSLTCLVKGFYPSDIAVEWESNGQPENNYKTTPPVLDSDGSFFLYSKLTVDKSRWQQGNVFSCSVMHEALHNHYTQKSLSLSPGGGGSGSAHPIPDSSPLLQFGGQVRQRYLYTDDACQTEAHLEIREDGTVGGAADQSPESLLQLKALKPGVIQILGVKTSRFLCQRPDGALYGSLHFDPEACSFRELLLEDGYNVYQSEAHGLPLHLPGCKSPHRDPAPRGPARFLPLPGLPPAPPEPPGILAPQPPDVGSSDPLSMVGSQGRSPSYAS

SEQ ID NO: 2047 - protein, 472 aa, Artificial Sequence
  Fusion Protein
YGEGTFTSDKSQLLEKRLAHLFIEWLIKGGHSSIRPPPKGGGGGGGSGGGGSGGGGSADKTHTCPPCPAPEAAGGPSVFLFPPKPKDTLMISRTPEVTCVVVDVSHEDPEVKFNWYVDGVEVHNAKTKPREEQYNSTYRVVSVLTVLHQDWLNGKEYKCKVSNKALPAPIEKTISKAKGQPREPQVYTLPPSRDELTKNQVSLTCLVKGFYPSDIAVEWESNGQPENNYKTTPPVLDSDGSFFLYSKLTVDKSRWQQGNVFSCSVMHEALHNHYTQKSLSLSPGGGGSGSAHPIPDSSPLLQFGGQVRQRYLYTDDACQTEAHLEIREDGTVGGAADQSPESLLQLKALKPGVIQILGVKTSRFLCQRPDGALYGSLHFDPEACSFRELLLEDGYNVYQSEAHGLPLHLPGCKSPHRDPAPRGPARFLPLPGLPPAPPEPPGILAPQPPDVGSSDPLSMVYPSQGRSPSYAS

SEQ ID NO: 2048 - protein, 471 aa, Artificial Sequence
  Fusion Protein
YGEGTFTSDKSQLLEKRLAHLFIEWLIKGGHSSIRPPPKGGGGGGGSGGGGSGGGGSADKTHTCPPCPAPEAAGGPSVFLFPPKPKDTLMISRTPEVTCVVVDVSHEDPEVKFNWYVDGVEVHNAKTKPREEQYNSTYRVVSVLTVLHQDWLNGKEYKCKVSNKALPAPIEKTISKAKGQPREPQVYTLPPSRDELTKNQVSLTCLVKGFYPSDIAVEWESNGQPENNYKTTPPVLDSDGSFFLYSKLTVDKSRWQQGNVFSCSVMHEALHNHYTQKSLSLSPGGGGSGSAHPIPDSSPLLQFGGQVRQRYLYTDDACQTEAHLEIREDGTVGGAADQSPESLLQLKALKPGVIQILGVKTSRFLCQRPDGALYGSLHFDPEACSFRELLLEDGYNVYQSEAHGLPLHLCGNKSPHRDPAPRGPARFLPLPGLPPAPPEPPGILAPQPPDVGSSDPLSMVGSQGRSPSYAS

SEQ ID NO: 2049 - protein, 472 aa, Artificial Sequence
  Fusion Protein
YGEGTFTSDKSQLLEKRLAHLFIEWLIKGGHSSIRPPPKGGGGGGGSGGGGSGGGGSADKTHTCPPCPAPEAAGGPSVFLFPPKPKDTLMISRTPEVTCVVVDVSHEDPEVKFNWYVDGVEVHNAKTKPREEQYNSTYRVVSVLTVLHQDWLNGKEYKCKVSNKALPAPIEKTISKAKGQPREPQVYTLPPSRDELTKNQVSLTCLVKGFYPSDIAVEWESNGQPENNYKTTPPVLDSDGSFFLYSKLTVDKSRWQQGNVFSCSVMHEALHNHYTQKSLSLSPGGGGSGSAHPIPDSSPLLQFGGQVRQRYLYTDDACQTEAHLEIREDGTVGGAADQSPESLLQLKALKPGVIQILGVKTSRFLCQRPDGALYGSLHFDPEACSFRELLLEDGYNVYQSEAHGLPLHLCGNKSPHRDPAPRGPARFLPLPGLPPAPPEPPGILAPQPPDVGSSDPLSMVYPSQGRSPSYAS

SEQ ID NO: 2050 - protein, 471 aa, Artificial Sequence
  Fusion Protein
YGEGTFTSDKSQLLEKRLAHLFIEWLIKGGHSSIRPPPKGGGGGGGSGGGGSGGGGSADKTHTCPPCPAPELLGGPSVFLFPPKPKDTLMISRTPEVTCVVVDVSHEDPEVKFNWYVDGVEVHNAKTKPREEQYNNASRVVSVLTVLHQDWLNGKEYKCKVSNKALPAPIEKTISKAKGQPREPQVYTLPPSRDELTKNQVSLTCLVKGFYPSDIAVEWESNGQPENNYKTTPPVLDSDGSFFLYSKLTVDKSRWQQGNVFSCSVMHEALHNHYTQKSLSLSPGGGGSGSAHPIPDSSPLLQFGGQVRQRYLYTDDACQTEAHLEIREDGTVGGAADQSPESLLQLKALKPGVIQILGVKTSRFLCQRPDGALYGSLHFDPEACSFRELLLEDGYNVYQSEAHGLPLHLPGCKSPHRDPAPRGPARFLPLPGLPPAPPEPPGILAPQPPDVGSSDPLSMVGSQGRSPSYAS

SEQ ID NO: 2051 - protein, 472 aa, Artificial Sequence
  Fusion Protein
YGEGTFTSDKSQLLEKRLAHLFIEWLIKGGHSSIRPPPKGGGGGGGSGGGGSGGGGSADKTHTCPPCPAPELLGGPSVFLFPPKPKDTLMISRTPEVTCVVVDVSHEDPEVKFNWYVDGVEVHNAKTKPREEQYNNASRVVSVLTVLHQDWLNGKEYKCKVSNKALPAPIEKTISKAKGQPREPQVYTLPPSRDELTKNQVSLTCLVKGFYPSDIAVEWESNGQPENNYKTTPPVLDSDGSFFLYSKLTVDKSRWQQGNVFSCSVMHEALHNHYTQKSLSLSPGGGGSGSAHPIPDSSPLLQFGGQVRQRYLYTDDACQTEAHLEIREDGTVGGAADQSPESLLQLKALKPGVIQILGVKTSRFLCQRPDGALYGSLHFDPEACSFRELLLEDGYNVYQSEAHGLPLHLPGCKSPHRDPAPRGPARFLPLPGLPPAPPEPPGILAPQPPDVGSSDPLSMVYPSQGRSPSYAS

SEQ ID NO: 2052 - protein, 471 aa, Artificial Sequence
  Fusion Protein
YGEGTFTSDKSQLLEKRLAHLFIEWLIKGGHSSIRPPPKGGGGGGGSGGGGSGGGGSADKTHTCPPCPAPELLGGPSVFLFPPKPKDTLMISRTPEVTCVVVDVSHEDPEVKFNWYVDGVEVHNAKTKPREEQYNNASRVVSVLTVLHQDWLNGKEYKCKVSNKALPAPIEKTISKAKGQPREPQVYTLPPSRDELTKNQVSLTCLVKGFYPSDIAVEWESNGQPENNYKTTPPVLDSDGSFFLYSKLTVDKSRWQQGNVFSCSVMHEALHNHYTQKSLSLSPGGGGSGSAHPIPDSSPLLQFGGQVRQRYLYTDDACQTEAHLEIREDGTVGGAADQSPESLLQLKALKPGVIQILGVKTSRFLCQRPDGALYGSLHFDPEACSFRELLLEDGYNVYQSEAHGLPLHLCGNKSPHRDPAPRGPARFLPLPGLPPAPPEPPGILAPQPPDVGSSDPLSMVGSQGRSPSYAS

SEQ ID NO: 2053 - protein, 472 aa, Artificial Sequence
  Fusion Protein
YGEGTFTSDKSQLLEKRLAHLFIEWLIKGGHSSIRPPPKGGGGGGGSGGGGSGGGGSADKTHTCPPCPAPELLGGPSVFLFPPKPKDTLMISRTPEVTCVVVDVSHEDPEVKFNWYVDGVEVHNAKTKPREEQYNNASRVVSVLTVLHQDWLNGKEYKCKVSNKALPAPIEKTISKAKGQPREPQVYTLPPSRDELTKNQVSLTCLVKGFYPSDIAVEWESNGQPENNYKTTPPVLDSDGSFFLYSKLTVDKSRWQQGNVFSCSVMHEALHNHYTQKSLSLSPGGGGSGSAHPIPDSSPLLQFGGQVRQRYLYTDDACQTEAHLEIREDGTVGGAADQSPESLLQLKALKPGVIQILGVKTSRFLCQRPDGALYGSLHFDPEACSFRELLLEDGYNVYQSEAHGLPLHLCGNKSPHRDPAPRGPARFLPLPGLPPAPPEPPGILAPQPPDVGSSDPLSMVYPSQGRSPSYAS

SEQ ID NO: 2054 - protein, 474 aa, Artificial Sequence
  Fusion Protein
YGEGTFTSDKSQLLEKRLAHLFIEWLIKGGHSSIRPPPKGGGGGGGSGGGGSGGGGSAESKYGPPCPPCPAPEFEGGPSVFLFPPKPKDTLMISRTPEVTCVVVDVSQEDPEVQFNWYVDGVEVHNAKTKPREEQFNSTYRVVSVLTVLHQDWLNGKEYKCKVSNKGLPSSIEKTISKAKGQPREPQVYTLPPSQEEMTKNQVSLTCLVKGFYPSDIAVEWESNGQPENNYKTTPPVLDSDGSFFLYSRLTVDKSRWQEGNVFSCSVMHEALHNHYTQKSLSLSLGGGGSGSAHPIPDSSPLLQFGGQVRQRYLYTDDACQTEAHLEIREDGTVGGAADQSPESLLQLKALKPGVIQILGVKTSRFLCQRPDGALYGSLHFDPEACSFRELLLEDGYNVYQSEAHGLPLHLPGCKSPHRDPAPRGPARFLPLPGLPPAPPEPPGILAPQPPDVGSSDPLSMVYPSQGRSPSYAS

SEQ ID NO: 2055 - protein, 473 aa, Artificial Sequence
  Fusion Protein
YGEGTFTSDKSQLLEKRLAHLFIEWLIKGGHSSIRPPPKGGGGGGGSGGGGSGGGGSAESKYGPPCPPCPAPEFEGGPSVFLFPPKPKDTLMISRTPEVTCVVVDVSQEDPEVQFNWYVDGVEVHNAKTKPREEQFNSTYRVVSVLTVLHQDWLNGKEYKCKVSNKGLPSSIEKTISKAKGQPREPQVYTLPPSQEEMTKNQVSLTCLVKGFYPSDIAVEWESNGQPENNYKTTPPVLDSDGSFFLYSRLTVDKSRWQEGNVFSCSVMHEALHNHYTQKSLSLSLGGGGSGSAHPIPDSSPLLQFGGQVRQRYLYTDDACQTEAHLEIREDGTVGGAADQSPESLLQLKALKPGVIQILGVKTSRFLCQRPDGALYGSLHFDPEACSFRELLLEDGYNVYQSEAHGLPLHLCGNKSPHRDPAPRGPARFLPLPGLPPAPPEPPGILAPQPPDVGSSDPLSMVGSQGRSPSYAS

SEQ ID NO: 2056 - protein, 474 aa, Artificial Sequence
  Fusion Protein
YGEGTFTSDKSQLLEKRLAHLFIEWLIKGGHSSIRPPPKGGGGGGGSGGGGSGGGGSAESKYGPPCPPCPAPEFEGGPSVFLFPPKPKDTLMISRTPEVTCVVVDVSQEDPEVQFNWYVDGVEVHNAKTKPREEQFNSTYRVVSVLTVLHQDWLNGKEYKCKVSNKGLPSSIEKTISKAKGQPREPQVYTLPPSQEEMTKNQVSLTCLVKGFYPSDIAVEWESNGQPENNYKTTPPVLDSDGSFFLYSRLTVDKSRWQEGNVFSCSVMHEALHNHYTQKSLSLSLGGGGSGSAHPIPDSSPLLQFGGQVRQRYLYTDDACQTEAHLEIREDGTVGGAADQSPESLLQLKALKPGVIQILGVKTSRFLCQRPDGALYGSLHFDPEACSFRELLLEDGYNVYQSEAHGLPLHLCGNKSPHRDPAPRGPARFLPLPGLPPAPPEPPGILAPQPPDVGSSDPLSMVYPSQGRSPSYAS

SEQ ID NO: 2057 - protein, 472 aa, Artificial Sequence
  Fusion Protein
GHGEGTFTSDKSQLLEKRLVHLFIEWLIAGGHSSGKLPPKGGGGGGGSGGGGSGGGGSADKTHTCPPCPAPEAAGGPSVFLFPPKPKDTLMISRTPEVTCVVVDVSHEDPEVKFNWYVDGVEVHNAKTKPREEQYNSTYRVVSVLTVLHQDWLNGKEYKCKVSNKALPAPIEKTISKAKGQPREPQVYTLPPSRDELTKNQVSLTCLVKGFYPSDIAVEWESNGQPENNYKTTPPVLDSDGSFFLYSKLTVDKSRWQQGNVFSCSVMHEALHNHYTQKSLSLSPGGGGSGSAHPIPDSSPLLQFGGQVRQRYLYTDDACQTEAHLEIREDGTVGGAADQSPESLLQLKALKPGVIQILGVKTSRFLCQRPDGALYGSLHFDPEACSFRELLLEDGYNVYQSEAHGLPLHLPGCKSPHRDPAPRGPARFLPLPGLPPAPPEPPGILAPQPPDVGSSDPLSMVGSQGRSPSYAS

SEQ ID NO: 2058 - protein, 473 aa, Artificial Sequence
  Fusion Protein
GHGEGTFTSDKSQLLEKRLVHLFIEWLIAGGHSSGKLPPKGGGGGGGSGGGGSGGGGSADKTHTCPPCPAPEAAGGPSVFLFPPKPKDTLMISRTPEVTCVVVDVSHEDPEVKFNWYVDGVEVHNAKTKPREEQYNSTYRVVSVLTVLHQDWLNGKEYKCKVSNKALPAPIEKTISKAKGQPREPQVYTLPPSRDELTKNQVSLTCLVKGFYPSDIAVEWESNGQPENNYKTTPPVLDSDGSFFLYSKLTVDKSRWQQGNVFSCSVMHEALHNHYTQKSLSLSPGGGGSGSAHPIPDSSPLLQFGGQVRQRYLYTDDACQTEAHLEIREDGTVGGAADQSPESLLQLKALKPGVIQILGVKTSRFLCQRPDGALYGSLHFDPEACSFRELLLEDGYNVYQSEAHGLPLHLPGCKSPHRDPAPRGPARFLPLPGLPPAPPEPPGILAPQPPDVGSSDPLSMVYPSQGRSPSYAS

SEQ ID NO: 2059 - protein, 472 aa, Artificial Sequence
  Fusion Protein
GHGEGTFTSDKSQLLEKRLVHLFIEWLIAGGHSSGKLPPKGGGGGGGSGGGGSGGGGSADKTHTCPPCPAPEAAGGPSVFLFPPKPKDTLMISRTPEVTCVVVDVSHEDPEVKFNWYVDGVEVHNAKTKPREEQYNSTYRVVSVLTVLHQDWLNGKEYKCKVSNKALPAPIEKTISKAKGQPREPQVYTLPPSRDELTKNQVSLTCLVKGFYPSDIAVEWESNGQPENNYKTTPPVLDSDGSFFLYSKLTVDKSRWQQGNVFSCSVMHEALHNHYTQKSLSLSPGGGGSGSAHPIPDSSPLLQFGGQVRQRYLYTDDACQTEAHLEIREDGTVGGAADQSPESLLQLKALKPGVIQILGVKTSRFLCQRPDGALYGSLHFDPEACSFRELLLEDGYNVYQSEAHGLPLHLCGNKSPHRDPAPRGPARFLPLPGLPPAPPEPPGILAPQPPDVGSSDPLSMVGSQGRSPSYAS

SEQ ID NO: 2060 - protein, 473 aa, Artificial Sequence
  Fusion Protein
GHGEGTFTSDKSQLLEKRLVHLFIEWLIAGGHSSGKLPPKGGGGGGGSGGGGSGGGGSADKTHTCPPCPAPEAAGGPSVFLFPPKPKDTLMISRTPEVTCVVVDVSHEDPEVKFNWYVDGVEVHNAKTKPREEQYNSTYRVVSVLTVLHQDWLNGKEYKCKVSNKALPAPIEKTISKAKGQPREPQVYTLPPSRDELTKNQVSLTCLVKGFYPSDIAVEWESNGQPENNYKTTPPVLDSDGSFFLYSKLTVDKSRWQQGNVFSCSVMHEALHNHYTQKSLSLSPGGGGSGSAHPIPDSSPLLQFGGQVRQRYLYTDDACQTEAHLEIREDGTVGGAADQSPESLLQLKALKPGVIQILGVKTSRFLCQRPDGALYGSLHFDPEACSFRELLLEDGYNVYQSEAHGLPLHLCGNKSPHRDPAPRGPARFLPLPGLPPAPPEPPGILAPQPPDVGSSDPLSMVYPSQGRSPSYAS

SEQ ID NO: 2061 - protein, 472 aa, Artificial Sequence
  Fusion Protein
GHGEGTFTSDKSQLLEKRLVHLFIEWLIAGGHSSGKLPPKGGGGGGGSGGGGSGGGGSADKTHTCPPCPAPELLGGPSVFLFPPKPKDTLMISRTPEVTCVVVDVSHEDPEVKFNWYVDGVEVHNAKTKPREEQYNNASRVVSVLTVLHQDWLNGKEYKCKVSNKALPAPIEKTISKAKGQPREPQVYTLPPSRDELTKNQVSLTCLVKGFYPSDIAVEWESNGQPENNYKTTPPVLDSDGSFFLYSKLTVDKSRWQQGNVFSCSVMHEALHNHYTQKSLSLSPGGGGSGSAHPIPDSSPLLQFGGQVRQRYLYTDDACQTEAHLEIREDGTVGGAADQSPESLLQLKALKPGVIQILGVKTSRFLCQRPDGALYGSLHFDPEACSFRELLLEDGYNVYQSEAHGLPLHLPGCKSPHRDPAPRGPARFLPLPGLPPAPPEPPGILAPQPPDVGSSDPLSMVGSQGRSPSYAS

SEQ ID NO: 2062 - protein, 473 aa, Artificial Sequence
  Fusion Protein
GHGEGTFTSDKSQLLEKRLVHLFIEWLIAGGHSSGKLPPKGGGGGGGSGGGGSGGGGSADKTHTCPPCPAPELLGGPSVFLFPPKPKDTLMISRTPEVTCVVVDVSHEDPEVKFNWYVDGVEVHNAKTKPREEQYNNASRVVSVLTVLHQDWLNGKEYKCKVSNKALPAPIEKTISKAKGQPREPQVYTLPPSRDELTKNQVSLTCLVKGFYPSDIAVEWESNGQPENNYKTTPPVLDSDGSFFLYSKLTVDKSRWQQGNVFSCSVMHEALHNHYTQKSLSLSPGGGGSGSAHPIPDSSPLLQFGGQVRQRYLYTDDACQTEAHLEIREDGTVGGAADQSPESLLQLKALKPGVIQILGVKTSRFLCQRPDGALYGSLHFDPEACSFRELLLEDGYNVYQSEAHGLPLHLPGCKSPHRDPAPRGPARFLPLPGLPPAPPEPPGILAPQPPDVGSSDPLSMVYPSQGRSPSYAS

SEQ ID NO: 2063 - protein, 472 aa, Artificial Sequence
  Fusion Protein
GHGEGTFTSDKSQLLEKRLVHLFIEWLIAGGHSSGKLPPKGGGGGGGSGGGGSGGGGSADKTHTCPPCPAPELLGGPSVFLFPPKPKDTLMISRTPEVTCVVVDVSHEDPEVKFNWYVDGVEVHNAKTKPREEQYNNASRVVSVLTVLHQDWLNGKEYKCKVSNKALPAPIEKTISKAKGQPREPQVYTLPPSRDELTKNQVSLTCLVKGFYPSDIAVEWESNGQPENNYKTTPPVLDSDGSFFLYSKLTVDKSRWQQGNVFSCSVMHEALHNHYTQKSLSLSPGGGGSGSAHPIPDSSPLLQFGGQVRQRYLYTDDACQTEAHLEIREDGTVGGAADQSPESLLQLKALKPGVIQILGVKTSRFLCQRPDGALYGSLHFDPEACSFRELLLEDGYNVYQSEAHGLPLHLCGNKSPHRDPAPRGPARFLPLPGLPPAPPEPPGILAPQPPDVGSSDPLSMVGSQGRSPSYAS

SEQ ID NO: 2064 - protein, 473 aa, Artificial Sequence
  Fusion Protein
GHGEGTFTSDKSQLLEKRLVHLFIEWLIAGGHSSGKLPPKGGGGGGGSGGGGSGGGGSADKTHTCPPCPAPELLGGPSVFLFPPKPKDTLMISRTPEVTCVVVDVSHEDPEVKFNWYVDGVEVHNAKTKPREEQYNNASRVVSVLTVLHQDWLNGKEYKCKVSNKALPAPIEKTISKAKGQPREPQVYTLPPSRDELTKNQVSLTCLVKGFYPSDIAVEWESNGQPENNYKTTPPVLDSDGSFFLYSKLTVDKSRWQQGNVFSCSVMHEALHNHYTQKSLSLSPGGGGSGSAHPIPDSSPLLQFGGQVRQRYLYTDDACQTEAHLEIREDGTVGGAADQSPESLLQLKALKPGVIQILGVKTSRFLCQRPDGALYGSLHFDPEACSFRELLLEDGYNVYQSEAHGLPLHLCGNKSPHRDPAPRGPARFLPLPGLPPAPPEPPGILAPQPPDVGSSDPLSMVYPSQGRSPSYAS

SEQ ID NO: 2065 - protein, 475 aa, Artificial Sequence
  Fusion Protein
GHGEGTFTSDKSQLLEKRLVHLFIEWLIAGGHSSGKLPPKGGGGGGGSGGGGSGGGGSAESKYGPPCPPCPAPEFEGGPSVFLFPPKPKDTLMISRTPEVTCVVVDVSQEDPEVQFNWYVDGVEVHNAKTKPREEQFNSTYRVVSVLTVLHQDWLNGKEYKCKVSNKGLPSSIEKTISKAKGQPREPQVYTLPPSQEEMTKNQVSLTCLVKGFYPSDIAVEWESNGQPENNYKTTPPVLDSDGSFFLYSRLTVDKSRWQEGNVFSCSVMHEALHNHYTQKSLSLSLGGGGSGSAHPIPDSSPLLQFGGQVRQRYLYTDDACQTEAHLEIREDGTVGGAADQSPESLLQLKALKPGVIQILGVKTSRFLCQRPDGALYGSLHFDPEACSFRELLLEDGYNVYQSEAHGLPLHLPGCKSPHRDPAPRGPARFLPLPGLPPAPPEPPGILAPQPPDVGSSDPLSMVYPSQGRSPSYAS

SEQ ID NO: 2066 - protein, 474 aa, Artificial Sequence
  Fusion Protein
GHGEGTFTSDKSQLLEKRLVHLFIEWLIAGGHSSGKLPPKGGGGGGGSGGGGSGGGGSAESKYGPPCPPCPAPEFEGGPSVFLFPPKPKDTLMISRTPEVTCVVVDVSQEDPEVQFNWYVDGVEVHNAKTKPREEQFNSTYRVVSVLTVLHQDWLNGKEYKCKVSNKGLPSSIEKTISKAKGQPREPQVYTLPPSQEEMTKNQVSLTCLVKGFYPSDIAVEWESNGQPENNYKTTPPVLDSDGSFFLYSRLTVDKSRWQEGNVFSCSVMHEALHNHYTQKSLSLSLGGGGSGSAHPIPDSSPLLQFGGQVRQRYLYTDDACQTEAHLEIREDGTVGGAADQSPESLLQLKALKPGVIQILGVKTSRFLCQRPDGALYGSLHFDPEACSFRELLLEDGYNVYQSEAHGLPLHLCGNKSPHRDPAPRGPARFLPLPGLPPAPPEPPGILAPQPPDVGSSDPLSMVGSQGRSPSYAS

SEQ ID NO: 2067 - protein, 475 aa, Artificial Sequence
  Fusion Protein
GHGEGTFTSDKSQLLEKRLVHLFIEWLIAGGHSSGKLPPKGGGGGGGSGGGGSGGGGSAESKYGPPCPPCPAPEFEGGPSVFLFPPKPKDTLMISRTPEVTCVVVDVSQEDPEVQFNWYVDGVEVHNAKTKPREEQFNSTYRVVSVLTVLHQDWLNGKEYKCKVSNKGLPSSIEKTISKAKGQPREPQVYTLPPSQEEMTKNQVSLTCLVKGFYPSDIAVEWESNGQPENNYKTTPPVLDSDGSFFLYSRLTVDKSRWQEGNVFSCSVMHEALHNHYTQKSLSLSLGGGGSGSAHPIPDSSPLLQFGGQVRQRYLYTDDACQTEAHLEIREDGTVGGAADQSPESLLQLKALKPGVIQILGVKTSRFLCQRPDGALYGSLHFDPEACSFRELLLEDGYNVYQSEAHGLPLHLCGNKSPHRDPAPRGPARFLPLPGLPPAPPEPPGILAPQPPDVGSSDPLSMVYPSQGRSPSYAS

SEQ ID NO: 2068 - protein, 471 aa, Artificial Sequence
  Fusion Protein
HGEGTFTSDKSQLLEKRAAHLFIEWLIAGGHSKGRPPPKGGGGGGGSGGGGSGGGGSADKTHTCPPCPAPEAAGGPSVFLFPPKPKDTLMISRTPEVTCVVVDVSHEDPEVKFNWYVDGVEVHNAKTKPREEQYNSTYRVVSVLTVLHQDWLNGKEYKCKVSNKALPAPIEKTISKAKGQPREPQVYTLPPSRDELTKNQVSLTCLVKGFYPSDIAVEWESNGQPENNYKTTPPVLDSDGSFFLYSKLTVDKSRWQQGNVFSCSVMHEALHNHYTQKSLSLSPGGGGSGSAHPIPDSSPLLQFGGQVRQRYLYTDDACQTEAHLEIREDGTVGGAADQSPESLLQLKALKPGVIQILGVKTSRFLCQRPDGALYGSLHFDPEACSFRELLLEDGYNVYQSEAHGLPLHLPGCKSPHRDPAPRGPARFLPLPGLPPAPPEPPGILAPQPPDVGSSDPLSMVGSQGRSPSYAS

SEQ ID NO: 2069 - protein, 472 aa, Artificial Sequence
  Fusion Protein
HGEGTFTSDKSQLLEKRAAHLFIEWLIAGGHSKGRPPPKGGGGGGGSGGGGSGGGGSADKTHTCPPCPAPEAAGGPSVFLFPPKPKDTLMISRTPEVTCVVVDVSHEDPEVKFNWYVDGVEVHNAKTKPREEQYNSTYRVVSVLTVLHQDWLNGKEYKCKVSNKALPAPIEKTISKAKGQPREPQVYTLPPSRDELTKNQVSLTCLVKGFYPSDIAVEWESNGQPENNYKTTPPVLDSDGSFFLYSKLTVDKSRWQQGNVFSCSVMHEALHNHYTQKSLSLSPGGGGSGSAHPIPDSSPLLQFGGQVRQRYLYTDDACQTEAHLEIREDGTVGGAADQSPESLLQLKALKPGVIQILGVKTSRFLCQRPDGALYGSLHFDPEACSFRELLLEDGYNVYQSEAHGLPLHLPGCKSPHRDPAPRGPARFLPLPGLPPAPPEPPGILAPQPPDVGSSDPLSMVYPSQGRSPSYAS

SEQ ID NO: 2070 - protein, 471 aa, Artificial Sequence
  Fusion Protein
HGEGTFTSDKSQLLEKRAAHLFIEWLIAGGHSKGRPPPKGGGGGGGSGGGGSGGGGSADKTHTCPPCPAPEAAGGPSVFLFPPKPKDTLMISRTPEVTCVVVDVSHEDPEVKFNWYVDGVEVHNAKTKPREEQYNSTYRVVSVLTVLHQDWLNGKEYKCKVSNKALPAPIEKTISKAKGQPREPQVYTLPPSRDELTKNQVSLTCLVKGFYPSDIAVEWESNGQPENNYKTTPPVLDSDGSFFLYSKLTVDKSRWQQGNVFSCSVMHEALHNHYTQKSLSLSPGGGGSGSAHPIPDSSPLLQFGGQVRQRYLYTDDACQTEAHLEIREDGTVGGAADQSPESLLQLKALKPGVIQILGVKTSRFLCQRPDGALYGSLHFDPEACSFRELLLEDGYNVYQSEAHGLPLHLCGNKSPHRDPAPRGPARFLPLPGLPPAPPEPPGILAPQPPDVGSSDPLSMVGSQGRSPSYAS

SEQ ID NO: 2071 - protein, 472 aa, Artificial Sequence
  Fusion Protein
HGEGTFTSDKSQLLEKRAAHLFIEWLIAGGHSKGRPPPKGGGGGGGSGGGGSGGGGSADKTHTCPPCPAPEAAGGPSVFLFPPKPKDTLMISRTPEVTCVVVDVSHEDPEVKFNWYVDGVEVHNAKTKPREEQYNSTYRVVSVLTVLHQDWLNGKEYKCKVSNKALPAPIEKTISKAKGQPREPQVYTLPPSRDELTKNQVSLTCLVKGFYPSDIAVEWESNGQPENNYKTTPPVLDSDGSFFLYSKLTVDKSRWQQGNVFSCSVMHEALHNHYTQKSLSLSPGGGGSGSAHPIPDSSPLLQFGGQVRQRYLYTDDACQTEAHLEIREDGTVGGAADQSPESLLQLKALKPGVIQILGVKTSRFLCQRPDGALYGSLHFDPEACSFRELLLEDGYNVYQSEAHGLPLHLCGNKSPHRDPAPRGPARFLPLPGLPPAPPEPPGILAPQPPDVGSSDPLSMVYPSQGRSPSYAS

SEQ ID NO: 2072 - protein, 471 aa, Artificial Sequence
  Fusion Protein
HGEGTFTSDKSQLLEKRAAHLFIEWLIAGGHSKGRPPPKGGGGGGGSGGGGSGGGGSADKTHTCPPCPAPELLGGPSVFLFPPKPKDTLMISRTPEVTCVVVDVSHEDPEVKFNWYVDGVEVHNAKTKPREEQYNNASRVVSVLTVLHQDWLNGKEYKCKVSNKALPAPIEKTISKAKGQPREPQVYTLPPSRDELTKNQVSLTCLVKGFYPSDIAVEWESNGQPENNYKTTPPVLDSDGSFFLYSKLTVDKSRWQQGNVFSCSVMHEALHNHYTQKSLSLSPGGGGSGSAHPIPDSSPLLQFGGQVRQRYLYTDDACQTEAHLEIREDGTVGGAADQSPESLLQLKALKPGVIQILGVKTSRFLCQRPDGALYGSLHFDPEACSFRELLLEDGYNVYQSEAHGLPLHLPGCKSPHRDPAPRGPARFLPLPGLPPAPPEPPGILAPQPPDVGSSDPLSMVGSQGRSPSYAS

SEQ ID NO: 2073 - protein, 472 aa, Artificial Sequence
  Fusion Protein
HGEGTFTSDKSQLLEKRAAHLFIEWLIAGGHSKGRPPPKGGGGGGGSGGGGSGGGGSADKTHTCPPCPAPELLGGPSVFLFPPKPKDTLMISRTPEVTCVVVDVSHEDPEVKFNWYVDGVEVHNAKTKPREEQYNNASRVVSVLTVLHQDWLNGKEYKCKVSNKALPAPIEKTISKAKGQPREPQVYTLPPSRDELTKNQVSLTCLVKGFYPSDIAVEWESNGQPENNYKTTPPVLDSDGSFFLYSKLTVDKSRWQQGNVFSCSVMHEALHNHYTQKSLSLSPGGGGSGSAHPIPDSSPLLQFGGQVRQRYLYTDDACQTEAHLEIREDGTVGGAADQSPESLLQLKALKPGVIQILGVKTSRFLCQRPDGALYGSLHFDPEACSFRELLLEDGYNVYQSEAHGLPLHLPGCKSPHRDPAPRGPARFLPLPGLPPAPPEPPGILAPQPPDVGSSDPLSMVYPSQGRSPSYAS

SEQ ID NO: 2074 - protein, 471 aa, Artificial Sequence
  Fusion Protein
HGEGTFTSDKSQLLEKRAAHLFIEWLIAGGHSKGRPPPKGGGGGGGSGGGGSGGGGSADKTHTCPPCPAPELLGGPSVFLFPPKPKDTLMISRTPEVTCVVVDVSHEDPEVKFNWYVDGVEVHNAKTKPREEQYNNASRVVSVLTVLHQDWLNGKEYKCKVSNKALPAPIEKTISKAKGQPREPQVYTLPPSRDELTKNQVSLTCLVKGFYPSDIAVEWESNGQPENNYKTTPPVLDSDGSFFLYSKLTVDKSRWQQGNVFSCSVMHEALHNHYTQKSLSLSPGGGGSGSAHPIPDSSPLLQFGGQVRQRYLYTDDACQTEAHLEIREDGTVGGAADQSPESLLQLKALKPGVIQILGVKTSRFLCQRPDGALYGSLHFDPEACSFRELLLEDGYNVYQSEAHGLPLHLCGNKSPHRDPAPRGPARFLPLPGLPPAPPEPPGILAPQPPDVGSSDPLSMVGSQGRSPSYAS

SEQ ID NO: 2075 - protein, 472 aa, Artificial Sequence
  Fusion Protein
HGEGTFTSDKSQLLEKRAAHLFIEWLIAGGHSKGRPPPKGGGGGGGSGGGGSGGGGSADKTHTCPPCPAPELLGGPSVFLFPPKPKDTLMISRTPEVTCVVVDVSHEDPEVKFNWYVDGVEVHNAKTKPREEQYNNASRVVSVLTVLHQDWLNGKEYKCKVSNKALPAPIEKTISKAKGQPREPQVYTLPPSRDELTKNQVSLTCLVKGFYPSDIAVEWESNGQPENNYKTTPPVLDSDGSFFLYSKLTVDKSRWQQGNVFSCSVMHEALHNHYTQKSLSLSPGGGGSGSAHPIPDSSPLLQFGGQVRQRYLYTDDACQTEAHLEIREDGTVGGAADQSPESLLQLKALKPGVIQILGVKTSRFLCQRPDGALYGSLHFDPEACSFRELLLEDGYNVYQSEAHGLPLHLCGNKSPHRDPAPRGPARFLPLPGLPPAPPEPPGILAPQPPDVGSSDPLSMVYPSQGRSPSYAS

SEQ ID NO: 2076 - protein, 473 aa, Artificial Sequence
  Fusion Protein
HGEGTFTSDKSQLLEKRAAHLFIEWLIAGGHSKGRPPPKGGGGGGGSGGGGSGGGGSAESKYGPPCPPCPAPEFEGGPSVFLFPPKPKDTLMISRTPEVTCVVVDVSQEDPEVQFNWYVDGVEVHNAKTKPREEQFNSTYRVVSVLTVLHQDWLNGKEYKCKVSNKGLPSSIEKTISKAKGQPREPQVYTLPPSQEEMTKNQVSLTCLVKGFYPSDIAVEWESNGQPENNYKTTPPVLDSDGSFFLYSRLTVDKSRWQEGNVFSCSVMHEALHNHYTQKSLSLSLGGGGSGSAHPIPDSSPLLQFGGQVRQRYLYTDDACQTEAHLEIREDGTVGGAADQSPESLLQLKALKPGVIQILGVKTSRFLCQRPDGALYGSLHFDPEACSFRELLLEDGYNVYQSEAHGLPLHLPGCKSPHRDPAPRGPARFLPLPGLPPAPPEPPGILAPQPPDVGSSDPLSMVGSQGRSPSYAS

SEQ ID NO: 2077 - protein, 474 aa, Artificial Sequence
  Fusion Protein
HGEGTFTSDKSQLLEKRAAHLFIEWLIAGGHSKGRPPPKGGGGGGGSGGGGSGGGGSAESKYGPPCPPCPAPEFEGGPSVFLFPPKPKDTLMISRTPEVTCVVVDVSQEDPEVQFNWYVDGVEVHNAKTKPREEQFNSTYRVVSVLTVLHQDWLNGKEYKCKVSNKGLPSSIEKTISKAKGQPREPQVYTLPPSQEEMTKNQVSLTCLVKGFYPSDIAVEWESNGQPENNYKTTPPVLDSDGSFFLYSRLTVDKSRWQEGNVFSCSVMHEALHNHYTQKSLSLSLGGGGSGSAHPIPDSSPLLQFGGQVRQRYLYTDDACQTEAHLEIREDGTVGGAADQSPESLLQLKALKPGVIQILGVKTSRFLCQRPDGALYGSLHFDPEACSFRELLLEDGYNVYQSEAHGLPLHLPGCKSPHRDPAPRGPARFLPLPGLPPAPPEPPGILAPQPPDVGSSDPLSMVYPSQGRSPSYAS

SEQ ID NO: 2078 - protein, 473 aa, Artificial Sequence
  Fusion Protein
HGEGTFTSDKSQLLEKRAAHLFIEWLIAGGHSKGRPPPKGGGGGGGSGGGGSGGGGSAESKYGPPCPPCPAPEFEGGPSVFLFPPKPKDTLMISRTPEVTCVVVDVSQEDPEVQFNWYVDGVEVHNAKTKPREEQFNSTYRVVSVLTVLHQDWLNGKEYKCKVSNKGLPSSIEKTISKAKGQPREPQVYTLPPSQEEMTKNQVSLTCLVKGFYPSDIAVEWESNGQPENNYKTTPPVLDSDGSFFLYSRLTVDKSRWQEGNVFSCSVMHEALHNHYTQKSLSLSLGGGGSGSAHPIPDSSPLLQFGGQVRQRYLYTDDACQTEAHLEIREDGTVGGAADQSPESLLQLKALKPGVIQILGVKTSRFLCQRPDGALYGSLHFDPEACSFRELLLEDGYNVYQSEAHGLPLHLCGNKSPHRDPAPRGPARFLPLPGLPPAPPEPPGILAPQPPDVGSSDPLSMVGSQGRSPSYAS

SEQ ID NO: 2079 - protein, 474 aa, Artificial Sequence
  Fusion Protein
HGEGTFTSDKSQLLEKRAAHLFIEWLIAGGHSKGRPPPKGGGGGGGSGGGGSGGGGSAESKYGPPCPPCPAPEFEGGPSVFLFPPKPKDTLMISRTPEVTCVVVDVSQEDPEVQFNWYVDGVEVHNAKTKPREEQFNSTYRVVSVLTVLHQDWLNGKEYKCKVSNKGLPSSIEKTISKAKGQPREPQVYTLPPSQEEMTKNQVSLTCLVKGFYPSDIAVEWESNGQPENNYKTTPPVLDSDGSFFLYSRLTVDKSRWQEGNVFSCSVMHEALHNHYTQKSLSLSLGGGGSGSAHPIPDSSPLLQFGGQVRQRYLYTDDACQTEAHLEIREDGTVGGAADQSPESLLQLKALKPGVIQILGVKTSRFLCQRPDGALYGSLHFDPEACSFRELLLEDGYNVYQSEAHGLPLHLCGNKSPHRDPAPRGPARFLPLPGLPPAPPEPPGILAPQPPDVGSSDPLSMVYPSQGRSPSYAS

SEQ ID NO: 2080 - protein, 471 aa, Artificial Sequence
  Fusion Protein
YGEGTFTSDKSQLLEKRLAHLFIEWLIKGGHSSIKPPPKGGGGGGGSGGGGSGGGGSADKTHTCPPCPAPEAAGGPSVFLFPPKPKDTLMISRTPEVTCVVVDVSHEDPEVKFNWYVDGVEVHNAKTKPREEQYNSTYRVVSVLTVLHQDWLNGKEYKCKVSNKALPAPIEKTISKAKGQPREPQVYTLPPSRDELTKNQVSLTCLVKGFYPSDIAVEWESNGQPENNYKTTPPVLDSDGSFFLYSKLTVDKSRWQQGNVFSCSVMHEALHNHYTQKSLSLSPGGGGSGSAHPIPDSSPLLQFGGQVRQRYLYTDDACQTEAHLEIREDGTVGGAADQSPESLLQLKALKPGVIQILGVKTSRFLCQRPDGALYGSLHFDPEACSFRELLLEDGYNVYQSEAHGLPLHLPGCKSPHRDPAPRGPARFLPLPGLPPAPPEPPGILAPQPPDVGSSDPLSMVGSQGRSPSYAS

SEQ ID NO: 2081 - protein, 472 aa, Artificial Sequence
  Fusion Protein
YGEGTFTSDKSQLLEKRLAHLFIEWLIKGGHSSIKPPPKGGGGGGGSGGGGSGGGGSADKTHTCPPCPAPEAAGGPSVFLFPPKPKDTLMISRTPEVTCVVVDVSHEDPEVKFNWYVDGVEVHNAKTKPREEQYNSTYRVVSVLTVLHQDWLNGKEYKCKVSNKALPAPIEKTISKAKGQPREPQVYTLPPSRDELTKNQVSLTCLVKGFYPSDIAVEWESNGQPENNYKTTPPVLDSDGSFFLYSKLTVDKSRWQQGNVFSCSVMHEALHNHYTQKSLSLSPGGGGSGSAHPIPDSSPLLQFGGQVRQRYLYTDDACQTEAHLEIREDGTVGGAADQSPESLLQLKALKPGVIQILGVKTSRFLCQRPDGALYGSLHFDPEACSFRELLLEDGYNVYQSEAHGLPLHLPGCKSPHRDPAPRGPARFLPLPGLPPAPPEPPGILAPQPPDVGSSDPLSMVYPSQGRSPSYAS

SEQ ID NO: 2082 - protein, 471 aa, Artificial Sequence
  Fusion Protein
YGEGTFTSDKSQLLEKRLAHLFIEWLIKGGHSSIKPPPKGGGGGGGSGGGGSGGGGSADKTHTCPPCPAPEAAGGPSVFLFPPKPKDTLMISRTPEVTCVVVDVSHEDPEVKFNWYVDGVEVHNAKTKPREEQYNSTYRVVSVLTVLHQDWLNGKEYKCKVSNKALPAPIEKTISKAKGQPREPQVYTLPPSRDELTKNQVSLTCLVKGFYPSDIAVEWESNGQPENNYKTTPPVLDSDGSFFLYSKLTVDKSRWQQGNVFSCSVMHEALHNHYTQKSLSLSPGGGGSGSAHPIPDSSPLLQFGGQVRQRYLYTDDACQTEAHLEIREDGTVGGAADQSPESLLQLKALKPGVIQILGVKTSRFLCQRPDGALYGSLHFDPEACSFRELLLEDGYNVYQSEAHGLPLHLCGNKSPHRDPAPRGPARFLPLPGLPPAPPEPPGILAPQPPDVGSSDPLSMVGSQGRSPSYAS

SEQ ID NO: 2083 - protein, 472 aa, Artificial Sequence
  Fusion Protein
YGEGTFTSDKSQLLEKRLAHLFIEWLIKGGHSSIKPPPKGGGGGGGSGGGGSGGGGSADKTHTCPPCPAPEAAGGPSVFLFPPKPKDTLMISRTPEVTCVVVDVSHEDPEVKFNWYVDGVEVHNAKTKPREEQYNSTYRVVSVLTVLHQDWLNGKEYKCKVSNKALPAPIEKTISKAKGQPREPQVYTLPPSRDELTKNQVSLTCLVKGFYPSDIAVEWESNGQPENNYKTTPPVLDSDGSFFLYSKLTVDKSRWQQGNVFSCSVMHEALHNHYTQKSLSLSPGGGGSGSAHPIPDSSPLLQFGGQVRQRYLYTDDACQTEAHLEIREDGTVGGAADQSPESLLQLKALKPGVIQILGVKTSRFLCQRPDGALYGSLHFDPEACSFRELLLEDGYNVYQSEAHGLPLHLCGNKSPHRDPAPRGPARFLPLPGLPPAPPEPPGILAPQPPDVGSSDPLSMVYPSQGRSPSYAS

SEQ ID NO: 2084 - protein, 471 aa, Artificial Sequence
  Fusion Protein
YGEGTFTSDKSQLLEKRLAHLFIEWLIKGGHSSIKPPPKGGGGGGGSGGGGSGGGGSADKTHTCPPCPAPELLGGPSVFLFPPKPKDTLMISRTPEVTCVVVDVSHEDPEVKFNWYVDGVEVHNAKTKPREEQYNNASRVVSVLTVLHQDWLNGKEYKCKVSNKALPAPIEKTISKAKGQPREPQVYTLPPSRDELTKNQVSLTCLVKGFYPSDIAVEWESNGQPENNYKTTPPVLDSDGSFFLYSKLTVDKSRWQQGNVFSCSVMHEALHNHYTQKSLSLSPGGGGSGSAHPIPDSSPLLQFGGQVRQRYLYTDDACQTEAHLEIREDGTVGGAADQSPESLLQLKALKPGVIQILGVKTSRFLCQRPDGALYGSLHFDPEACSFRELLLEDGYNVYQSEAHGLPLHLPGCKSPHRDPAPRGPARFLPLPGLPPAPPEPPGILAPQPPDVGSSDPLSMVGSQGRSPSYAS

SEQ ID NO: 2085 - protein, 472 aa, Artificial Sequence
  Fusion Protein
YGEGTFTSDKSQLLEKRLAHLFIEWLIKGGHSSIKPPPKGGGGGGGSGGGGSGGGGSADKTHTCPPCPAPELLGGPSVFLFPPKPKDTLMISRTPEVTCVVVDVSHEDPEVKFNWYVDGVEVHNAKTKPREEQYNNASRVVSVLTVLHQDWLNGKEYKCKVSNKALPAPIEKTISKAKGQPREPQVYTLPPSRDELTKNQVSLTCLVKGFYPSDIAVEWESNGQPENNYKTTPPVLDSDGSFFLYSKLTVDKSRWQQGNVFSCSVMHEALHNHYTQKSLSLSPGGGGSGSAHPIPDSSPLLQFGGQVRQRYLYTDDACQTEAHLEIREDGTVGGAADQSPESLLQLKALKPGVIQILGVKTSRFLCQRPDGALYGSLHFDPEACSFRELLLEDGYNVYQSEAHGLPLHLPGCKSPHRDPAPRGPARFLPLPGLPPAPPEPPGILAPQPPDVGSSDPLSMVYPSQGRSPSYAS

SEQ ID NO: 2086 - protein, 471 aa, Artificial Sequence
  Fusion Protein
YGEGTFTSDKSQLLEKRLAHLFIEWLIKGGHSSIKPPPKGGGGGGGSGGGGSGGGGSADKTHTCPPCPAPELLGGPSVFLFPPKPKDTLMISRTPEVTCVVVDVSHEDPEVKFNWYVDGVEVHNAKTKPREEQYNNASRVVSVLTVLHQDWLNGKEYKCKVSNKALPAPIEKTISKAKGQPREPQVYTLPPSRDELTKNQVSLTCLVKGFYPSDIAVEWESNGQPENNYKTTPPVLDSDGSFFLYSKLTVDKSRWQQGNVFSCSVMHEALHNHYTQKSLSLSPGGGGSGSAHPIPDSSPLLQFGGQVRQRYLYTDDACQTEAHLEIREDGTVGGAADQSPESLLQLKALKPGVIQILGVKTSRFLCQRPDGALYGSLHFDPEACSFRELLLEDGYNVYQSEAHGLPLHLCGNKSPHRDPAPRGPARFLPLPGLPPAPPEPPGILAPQPPDVGSSDPLSMVGSQGRSPSYAS

SEQ ID NO: 2087 - protein, 472 aa, Artificial Sequence
  Fusion Protein
YGEGTFTSDKSQLLEKRLAHLFIEWLIKGGHSSIKPPPKGGGGGGGSGGGGSGGGGSADKTHTCPPCPAPELLGGPSVFLFPPKPKDTLMISRTPEVTCVVVDVSHEDPEVKFNWYVDGVEVHNAKTKPREEQYNNASRVVSVLTVLHQDWLNGKEYKCKVSNKALPAPIEKTISKAKGQPREPQVYTLPPSRDELTKNQVSLTCLVKGFYPSDIAVEWESNGQPENNYKTTPPVLDSDGSFFLYSKLTVDKSRWQQGNVFSCSVMHEALHNHYTQKSLSLSPGGGGSGSAHPIPDSSPLLQFGGQVRQRYLYTDDACQTEAHLEIREDGTVGGAADQSPESLLQLKALKPGVIQILGVKTSRFLCQRPDGALYGSLHFDPEACSFRELLLEDGYNVYQSEAHGLPLHLCGNKSPHRDPAPRGPARFLPLPGLPPAPPEPPGILAPQPPDVGSSDPLSMVYPSQGRSPSYAS

SEQ ID NO: 2088 - protein, 474 aa, Artificial Sequence
  Fusion Protein
YGEGTFTSDKSQLLEKRLAHLFIEWLIKGGHSSIKPPPKGGGGGGGSGGGGSGGGGSAESKYGPPCPPCPAPEFEGGPSVFLFPPKPKDTLMISRTPEVTCVVVDVSQEDPEVQFNWYVDGVEVHNAKTKPREEQFNSTYRVVSVLTVLHQDWLNGKEYKCKVSNKGLPSSIEKTISKAKGQPREPQVYTLPPSQEEMTKNQVSLTCLVKGFYPSDIAVEWESNGQPENNYKTTPPVLDSDGSFFLYSRLTVDKSRWQEGNVFSCSVMHEALHNHYTQKSLSLSLGGGGSGSAHPIPDSSPLLQFGGQVRQRYLYTDDACQTEAHLEIREDGTVGGAADQSPESLLQLKALKPGVIQILGVKTSRFLCQRPDGALYGSLHFDPEACSFRELLLEDGYNVYQSEAHGLPLHLPGCKSPHRDPAPRGPARFLPLPGLPPAPPEPPGILAPQPPDVGSSDPLSMVYPSQGRSPSYAS

SEQ ID NO: 2089 - protein, 473 aa, Artificial Sequence
  Fusion Protein
YGEGTFTSDKSQLLEKRLAHLFIEWLIKGGHSSIKPPPKGGGGGGGSGGGGSGGGGSAESKYGPPCPPCPAPEFEGGPSVFLFPPKPKDTLMISRTPEVTCVVVDVSQEDPEVQFNWYVDGVEVHNAKTKPREEQFNSTYRVVSVLTVLHQDWLNGKEYKCKVSNKGLPSSIEKTISKAKGQPREPQVYTLPPSQEEMTKNQVSLTCLVKGFYPSDIAVEWESNGQPENNYKTTPPVLDSDGSFFLYSRLTVDKSRWQEGNVFSCSVMHEALHNHYTQKSLSLSLGGGGSGSAHPIPDSSPLLQFGGQVRQRYLYTDDACQTEAHLEIREDGTVGGAADQSPESLLQLKALKPGVIQILGVKTSRFLCQRPDGALYGSLHFDPEACSFRELLLEDGYNVYQSEAHGLPLHLCGNKSPHRDPAPRGPARFLPLPGLPPAPPEPPGILAPQPPDVGSSDPLSMVGSQGRSPSYAS

SEQ ID NO: 2090 - protein, 474 aa, Artificial Sequence
  Fusion Protein
YGEGTFTSDKSQLLEKRLAHLFIEWLIKGGHSSIKPPPKGGGGGGGSGGGGSGGGGSAESKYGPPCPPCPAPEFEGGPSVFLFPPKPKDTLMISRTPEVTCVVVDVSQEDPEVQFNWYVDGVEVHNAKTKPREEQFNSTYRVVSVLTVLHQDWLNGKEYKCKVSNKGLPSSIEKTISKAKGQPREPQVYTLPPSQEEMTKNQVSLTCLVKGFYPSDIAVEWESNGQPENNYKTTPPVLDSDGSFFLYSRLTVDKSRWQEGNVFSCSVMHEALHNHYTQKSLSLSLGGGGSGSAHPIPDSSPLLQFGGQVRQRYLYTDDACQTEAHLEIREDGTVGGAADQSPESLLQLKALKPGVIQILGVKTSRFLCQRPDGALYGSLHFDPEACSFRELLLEDGYNVYQSEAHGLPLHLCGNKSPHRDPAPRGPARFLPLPGLPPAPPEPPGILAPQPPDVGSSDPLSMVYPSQGRSPSYAS

SEQ ID NO: 2091 - protein, 472 aa, Artificial Sequence
  Fusion Protein
GYGEGTFTSDKSQLLEERLVHLFIEWLIAGGHSSIKPPPKGGGGGGGSGGGGSGGGGSADKTHTCPPCPAPEAAGGPSVFLFPPKPKDTLMISRTPEVTCVVVDVSHEDPEVKFNWYVDGVEVHNAKTKPREEQYNSTYRVVSVLTVLHQDWLNGKEYKCKVSNKALPAPIEKTISKAKGQPREPQVYTLPPSRDELTKNQVSLTCLVKGFYPSDIAVEWESNGQPENNYKTTPPVLDSDGSFFLYSKLTVDKSRWQQGNVFSCSVMHEALHNHYTQKSLSLSPGGGGSGSAHPIPDSSPLLQFGGQVRQRYLYTDDACQTEAHLEIREDGTVGGAADQSPESLLQLKALKPGVIQILGVKTSRFLCQRPDGALYGSLHFDPEACSFRELLLEDGYNVYQSEAHGLPLHLPGCKSPHRDPAPRGPARFLPLPGLPPAPPEPPGILAPQPPDVGSSDPLSMVGSQGRSPSYAS

SEQ ID NO: 2092 - protein, 473 aa, Artificial Sequence
  Fusion Protein
GYGEGTFTSDKSQLLEERLVHLFIEWLIAGGHSSIKPPPKGGGGGGGSGGGGSGGGGSADKTHTCPPCPAPEAAGGPSVFLFPPKPKDTLMISRTPEVTCVVVDVSHEDPEVKFNWYVDGVEVHNAKTKPREEQYNSTYRVVSVLTVLHQDWLNGKEYKCKVSNKALPAPIEKTISKAKGQPREPQVYTLPPSRDELTKNQVSLTCLVKGFYPSDIAVEWESNGQPENNYKTTPPVLDSDGSFFLYSKLTVDKSRWQQGNVFSCSVMHEALHNHYTQKSLSLSPGGGGSGSAHPIPDSSPLLQFGGQVRQRYLYTDDACQTEAHLEIREDGTVGGAADQSPESLLQLKALKPGVIQILGVKTSRFLCQRPDGALYGSLHFDPEACSFRELLLEDGYNVYQSEAHGLPLHLPGCKSPHRDPAPRGPARFLPLPGLPPAPPEPPGILAPQPPDVGSSDPLSMVYPSQGRSPSYAS

SEQ ID NO: 2093 - protein, 472 aa, Artificial Sequence
  Fusion Protein
GYGEGTFTSDKSQLLEERLVHLFIEWLIAGGHSSIKPPPKGGGGGGGSGGGGSGGGGSADKTHTCPPCPAPEAAGGPSVFLFPPKPKDTLMISRTPEVTCVVVDVSHEDPEVKFNWYVDGVEVHNAKTKPREEQYNSTYRVVSVLTVLHQDWLNGKEYKCKVSNKALPAPIEKTISKAKGQPREPQVYTLPPSRDELTKNQVSLTCLVKGFYPSDIAVEWESNGQPENNYKTTPPVLDSDGSFFLYSKLTVDKSRWQQGNVFSCSVMHEALHNHYTQKSLSLSPGGGGSGSAHPIPDSSPLLQFGGQVRQRYLYTDDACQTEAHLEIREDGTVGGAADQSPESLLQLKALKPGVIQILGVKTSRFLCQRPDGALYGSLHFDPEACSFRELLLEDGYNVYQSEAHGLPLHLCGNKSPHRDPAPRGPARFLPLPGLPPAPPEPPGILAPQPPDVGSSDPLSMVGSQGRSPSYAS

SEQ ID NO: 2094 - protein, 473 aa, Artificial Sequence
  Fusion Protein
GYGEGTFTSDKSQLLEERLVHLFIEWLIAGGHSSIKPPPKGGGGGGGSGGGGSGGGGSADKTHTCPPCPAPEAAGGPSVFLFPPKPKDTLMISRTPEVTCVVVDVSHEDPEVKFNWYVDGVEVHNAKTKPREEQYNSTYRVVSVLTVLHQDWLNGKEYKCKVSNKALPAPIEKTISKAKGQPREPQVYTLPPSRDELTKNQVSLTCLVKGFYPSDIAVEWESNGQPENNYKTTPPVLDSDGSFFLYSKLTVDKSRWQQGNVFSCSVMHEALHNHYTQKSLSLSPGGGGSGSAHPIPDSSPLLQFGGQVRQRYLYTDDACQTEAHLEIREDGTVGGAADQSPESLLQLKALKPGVIQILGVKTSRFLCQRPDGALYGSLHFDPEACSFRELLLEDGYNVYQSEAHGLPLHLCGNKSPHRDPAPRGPARFLPLPGLPPAPPEPPGILAPQPPDVGSSDPLSMVYPSQGRSPSYAS

SEQ ID NO: 2095 - protein, 472 aa, Artificial Sequence
  Fusion Protein
GYGEGTFTSDKSQLLEERLVHLFIEWLIAGGHSSIKPPPKGGGGGGGSGGGGSGGGGSADKTHTCPPCPAPELLGGPSVFLFPPKPKDTLMISRTPEVTCVVVDVSHEDPEVKFNWYVDGVEVHNAKTKPREEQYNNASRVVSVLTVLHQDWLNGKEYKCKVSNKALPAPIEKTISKAKGQPREPQVYTLPPSRDELTKNQVSLTCLVKGFYPSDIAVEWESNGQPENNYKTTPPVLDSDGSFFLYSKLTVDKSRWQQGNVFSCSVMHEALHNHYTQKSLSLSPGGGGSGSAHPIPDSSPLLQFGGQVRQRYLYTDDACQTEAHLEIREDGTVGGAADQSPESLLQLKALKPGVIQILGVKTSRFLCQRPDGALYGSLHFDPEACSFRELLLEDGYNVYQSEAHGLPLHLPGCKSPHRDPAPRGPARFLPLPGLPPAPPEPPGILAPQPPDVGSSDPLSMVGSQGRSPSYAS

SEQ ID NO: 2096 - protein, 473 aa, Artificial Sequence
  Fusion Protein
GYGEGTFTSDKSQLLEERLVHLFIEWLIAGGHSSIKPPPKGGGGGGGSGGGGSGGGGSADKTHTCPPCPAPELLGGPSVFLFPPKPKDTLMISRTPEVTCVVVDVSHEDPEVKFNWYVDGVEVHNAKTKPREEQYNNASRVVSVLTVLHQDWLNGKEYKCKVSNKALPAPIEKTISKAKGQPREPQVYTLPPSRDELTKNQVSLTCLVKGFYPSDIAVEWESNGQPENNYKTTPPVLDSDGSFFLYSKLTVDKSRWQQGNVFSCSVMHEALHNHYTQKSLSLSPGGGGSGSAHPIPDSSPLLQFGGQVRQRYLYTDDACQTEAHLEIREDGTVGGAADQSPESLLQLKALKPGVIQILGVKTSRFLCQRPDGALYGSLHFDPEACSFRELLLEDGYNVYQSEAHGLPLHLPGCKSPHRDPAPRGPARFLPLPGLPPAPPEPPGILAPQPPDVGSSDPLSMVYPSQGRSPSYAS

SEQ ID NO: 2097 - protein, 472 aa, Artificial Sequence
  Fusion Protein
GYGEGTFTSDKSQLLEERLVHLFIEWLIAGGHSSIKPPPKGGGGGGGSGGGGSGGGGSADKTHTCPPCPAPELLGGPSVFLFPPKPKDTLMISRTPEVTCVVVDVSHEDPEVKFNWYVDGVEVHNAKTKPREEQYNNASRVVSVLTVLHQDWLNGKEYKCKVSNKALPAPIEKTISKAKGQPREPQVYTLPPSRDELTKNQVSLTCLVKGFYPSDIAVEWESNGQPENNYKTTPPVLDSDGSFFLYSKLTVDKSRWQQGNVFSCSVMHEALHNHYTQKSLSLSPGGGGSGSAHPIPDSSPLLQFGGQVRQRYLYTDDACQTEAHLEIREDGTVGGAADQSPESLLQLKALKPGVIQILGVKTSRFLCQRPDGALYGSLHFDPEACSFRELLLEDGYNVYQSEAHGLPLHLCGNKSPHRDPAPRGPARFLPLPGLPPAPPEPPGILAPQPPDVGSSDPLSMVGSQGRSPSYAS

SEQ ID NO: 2098 - protein, 473 aa, Artificial Sequence
  Fusion Protein
GYGEGTFTSDKSQLLEERLVHLFIEWLIAGGHSSIKPPPKGGGGGGGSGGGGSGGGGSADKTHTCPPCPAPELLGGPSVFLFPPKPKDTLMISRTPEVTCVVVDVSHEDPEVKFNWYVDGVEVHNAKTKPREEQYNNASRVVSVLTVLHQDWLNGKEYKCKVSNKALPAPIEKTISKAKGQPREPQVYTLPPSRDELTKNQVSLTCLVKGFYPSDIAVEWESNGQPENNYKTTPPVLDSDGSFFLYSKLTVDKSRWQQGNVFSCSVMHEALHNHYTQKSLSLSPGGGGSGSAHPIPDSSPLLQFGGQVRQRYLYTDDACQTEAHLEIREDGTVGGAADQSPESLLQLKALKPGVIQILGVKTSRFLCQRPDGALYGSLHFDPEACSFRELLLEDGYNVYQSEAHGLPLHLCGNKSPHRDPAPRGPARFLPLPGLPPAPPEPPGILAPQPPDVGSSDPLSMVYPSQGRSPSYAS

SEQ ID NO: 2099 - protein, 474 aa, Artificial Sequence
  Fusion Protein
GYGEGTFTSDKSQLLEERLVHLFIEWLIAGGHSSIKPPPKGGGGGGGSGGGGSGGGGSAESKYGPPCPPCPAPEFEGGPSVFLFPPKPKDTLMISRTPEVTCVVVDVSQEDPEVQFNWYVDGVEVHNAKTKPREEQFNSTYRVVSVLTVLHQDWLNGKEYKCKVSNKGLPSSIEKTISKAKGQPREPQVYTLPPSQEEMTKNQVSLTCLVKGFYPSDIAVEWESNGQPENNYKTTPPVLDSDGSFFLYSRLTVDKSRWQEGNVFSCSVMHEALHNHYTQKSLSLSLGGGGSGSAHPIPDSSPLLQFGGQVRQRYLYTDDACQTEAHLEIREDGTVGGAADQSPESLLQLKALKPGVIQILGVKTSRFLCQRPDGALYGSLHFDPEACSFRELLLEDGYNVYQSEAHGLPLHLPGCKSPHRDPAPRGPARFLPLPGLPPAPPEPPGILAPQPPDVGSSDPLSMVGSQGRSPSYAS

SEQ ID NO: 2100 - protein, 475 aa, Artificial Sequence
  Fusion Protein
GYGEGTFTSDKSQLLEERLVHLFIEWLIAGGHSSIKPPPKGGGGGGGSGGGGSGGGGSAESKYGPPCPPCPAPEFEGGPSVFLFPPKPKDTLMISRTPEVTCVVVDVSQEDPEVQFNWYVDGVEVHNAKTKPREEQFNSTYRVVSVLTVLHQDWLNGKEYKCKVSNKGLPSSIEKTISKAKGQPREPQVYTLPPSQEEMTKNQVSLTCLVKGFYPSDIAVEWESNGQPENNYKTTPPVLDSDGSFFLYSRLTVDKSRWQEGNVFSCSVMHEALHNHYTQKSLSLSLGGGGSGSAHPIPDSSPLLQFGGQVRQRYLYTDDACQTEAHLEIREDGTVGGAADQSPESLLQLKALKPGVIQILGVKTSRFLCQRPDGALYGSLHFDPEACSFRELLLEDGYNVYQSEAHGLPLHLPGCKSPHRDPAPRGPARFLPLPGLPPAPPEPPGILAPQPPDVGSSDPLSMVYPSQGRSPSYAS

SEQ ID NO: 2101 - protein, 474 aa, Artificial Sequence
  Fusion Protein
GYGEGTFTSDKSQLLEERLVHLFIEWLIAGGHSSIKPPPKGGGGGGGSGGGGSGGGGSAESKYGPPCPPCPAPEFEGGPSVFLFPPKPKDTLMISRTPEVTCVVVDVSQEDPEVQFNWYVDGVEVHNAKTKPREEQFNSTYRVVSVLTVLHQDWLNGKEYKCKVSNKGLPSSIEKTISKAKGQPREPQVYTLPPSQEEMTKNQVSLTCLVKGFYPSDIAVEWESNGQPENNYKTTPPVLDSDGSFFLYSRLTVDKSRWQEGNVFSCSVMHEALHNHYTQKSLSLSLGGGGSGSAHPIPDSSPLLQFGGQVRQRYLYTDDACQTEAHLEIREDGTVGGAADQSPESLLQLKALKPGVIQILGVKTSRFLCQRPDGALYGSLHFDPEACSFRELLLEDGYNVYQSEAHGLPLHLCGNKSPHRDPAPRGPARFLPLPGLPPAPPEPPGILAPQPPDVGSSDPLSMVGSQGRSPSYAS

SEQ ID NO: 2102 - protein, 475 aa, Artificial Sequence
  Fusion Protein
GYGEGTFTSDKSQLLEERLVHLFIEWLIAGGHSSIKPPPKGGGGGGGSGGGGSGGGGSAESKYGPPCPPCPAPEFEGGPSVFLFPPKPKDTLMISRTPEVTCVVVDVSQEDPEVQFNWYVDGVEVHNAKTKPREEQFNSTYRVVSVLTVLHQDWLNGKEYKCKVSNKGLPSSIEKTISKAKGQPREPQVYTLPPSQEEMTKNQVSLTCLVKGFYPSDIAVEWESNGQPENNYKTTPPVLDSDGSFFLYSRLTVDKSRWQEGNVFSCSVMHEALHNHYTQKSLSLSLGGGGSGSAHPIPDSSPLLQFGGQVRQRYLYTDDACQTEAHLEIREDGTVGGAADQSPESLLQLKALKPGVIQILGVKTSRFLCQRPDGALYGSLHFDPEACSFRELLLEDGYNVYQSEAHGLPLHLCGNKSPHRDPAPRGPARFLPLPGLPPAPPEPPGILAPQPPDVGSSDPLSMVYPSQGRSPSYAS

SEQ ID NO: 2103 - protein, 471 aa, Artificial Sequence
  Fusion Protein
HGEGTFTSDKSQLLEKRLAHLFIEWLIAGGPSKGKPPPKGGGGGGGSGGGGSGGGGSADKTHTCPPCPAPEAAGGPSVFLFPPKPKDTLMISRTPEVTCVVVDVSHEDPEVKFNWYVDGVEVHNAKTKPREEQYNSTYRVVSVLTVLHQDWLNGKEYKCKVSNKALPAPIEKTISKAKGQPREPQVYTLPPSRDELTKNQVSLTCLVKGFYPSDIAVEWESNGQPENNYKTTPPVLDSDGSFFLYSKLTVDKSRWQQGNVFSCSVMHEALHNHYTQKSLSLSPGGGGSGSAHPIPDSSPLLQFGGQVRQRYLYTDDACQTEAHLEIREDGTVGGAADQSPESLLQLKALKPGVIQILGVKTSRFLCQRPDGALYGSLHFDPEACSFRELLLEDGYNVYQSEAHGLPLHLPGCKSPHRDPAPRGPARFLPLPGLPPAPPEPPGILAPQPPDVGSSDPLSMVGSQGRSPSYAS

SEQ ID NO: 2104 - protein, 472 aa, Artificial Sequence
  Fusion Protein
HGEGTFTSDKSQLLEKRLAHLFIEWLIAGGPSKGKPPPKGGGGGGGSGGGGSGGGGSADKTHTCPPCPAPEAAGGPSVFLFPPKPKDTLMISRTPEVTCVVVDVSHEDPEVKFNWYVDGVEVHNAKTKPREEQYNSTYRVVSVLTVLHQDWLNGKEYKCKVSNKALPAPIEKTISKAKGQPREPQVYTLPPSRDELTKNQVSLTCLVKGFYPSDIAVEWESNGQPENNYKTTPPVLDSDGSFFLYSKLTVDKSRWQQGNVFSCSVMHEALHNHYTQKSLSLSPGGGGSGSAHPIPDSSPLLQFGGQVRQRYLYTDDACQTEAHLEIREDGTVGGAADQSPESLLQLKALKPGVIQILGVKTSRFLCQRPDGALYGSLHFDPEACSFRELLLEDGYNVYQSEAHGLPLHLPGCKSPHRDPAPRGPARFLPLPGLPPAPPEPPGILAPQPPDVGSSDPLSMVYPSQGRSPSYAS

SEQ ID NO: 2105 - protein, 471 aa, Artificial Sequence
  Fusion Protein
HGEGTFTSDKSQLLEKRLAHLFIEWLIAGGPSKGKPPPKGGGGGGGSGGGGSGGGGSADKTHTCPPCPAPEAAGGPSVFLFPPKPKDTLMISRTPEVTCVVVDVSHEDPEVKFNWYVDGVEVHNAKTKPREEQYNSTYRVVSVLTVLHQDWLNGKEYKCKVSNKALPAPIEKTISKAKGQPREPQVYTLPPSRDELTKNQVSLTCLVKGFYPSDIAVEWESNGQPENNYKTTPPVLDSDGSFFLYSKLTVDKSRWQQGNVFSCSVMHEALHNHYTQKSLSLSPGGGGSGSAHPIPDSSPLLQFGGQVRQRYLYTDDACQTEAHLEIREDGTVGGAADQSPESLLQLKALKPGVIQILGVKTSRFLCQRPDGALYGSLHFDPEACSFRELLLEDGYNVYQSEAHGLPLHLCGNKSPHRDPAPRGPARFLPLPGLPPAPPEPPGILAPQPPDVGSSDPLSMVGSQGRSPSYAS

SEQ ID NO: 2106 - protein, 472 aa, Artificial Sequence
  Fusion Protein
HGEGTFTSDKSQLLEKRLAHLFIEWLIAGGPSKGKPPPKGGGGGGGSGGGGSGGGGSADKTHTCPPCPAPEAAGGPSVFLFPPKPKDTLMISRTPEVTCVVVDVSHEDPEVKFNWYVDGVEVHNAKTKPREEQYNSTYRVVSVLTVLHQDWLNGKEYKCKVSNKALPAPIEKTISKAKGQPREPQVYTLPPSRDELTKNQVSLTCLVKGFYPSDIAVEWESNGQPENNYKTTPPVLDSDGSFFLYSKLTVDKSRWQQGNVFSCSVMHEALHNHYTQKSLSLSPGGGGSGSAHPIPDSSPLLQFGGQVRQRYLYTDDACQTEAHLEIREDGTVGGAADQSPESLLQLKALKPGVIQILGVKTSRFLCQRPDGALYGSLHFDPEACSFRELLLEDGYNVYQSEAHGLPLHLCGNKSPHRDPAPRGPARFLPLPGLPPAPPEPPGILAPQPPDVGSSDPLSMVYPSQGRSPSYAS

SEQ ID NO: 2107 - protein, 471 aa, Artificial Sequence
  Fusion Protein
HGEGTFTSDKSQLLEKRLAHLFIEWLIAGGPSKGKPPPKGGGGGGGSGGGGSGGGGSADKTHTCPPCPAPELLGGPSVFLFPPKPKDTLMISRTPEVTCVVVDVSHEDPEVKFNWYVDGVEVHNAKTKPREEQYNNASRVVSVLTVLHQDWLNGKEYKCKVSNKALPAPIEKTISKAKGQPREPQVYTLPPSRDELTKNQVSLTCLVKGFYPSDIAVEWESNGQPENNYKTTPPVLDSDGSFFLYSKLTVDKSRWQQGNVFSCSVMHEALHNHYTQKSLSLSPGGGGSGSAHPIPDSSPLLQFGGQVRQRYLYTDDACQTEAHLEIREDGTVGGAADQSPESLLQLKALKPGVIQILGVKTSRFLCQRPDGALYGSLHFDPEACSFRELLLEDGYNVYQSEAHGLPLHLPGCKSPHRDPAPRGPARFLPLPGLPPAPPEPPGILAPQPPDVGSSDPLSMVGSQGRSPSYAS

SEQ ID NO: 2108 - protein, 472 aa, Artificial Sequence
  Fusion Protein
HGEGTFTSDKSQLLEKRLAHLFIEWLIAGGPSKGKPPPKGGGGGGGSGGGGSGGGGSADKTHTCPPCPAPELLGGPSVFLFPPKPKDTLMISRTPEVTCVVVDVSHEDPEVKFNWYVDGVEVHNAKTKPREEQYNNASRVVSVLTVLHQDWLNGKEYKCKVSNKALPAPIEKTISKAKGQPREPQVYTLPPSRDELTKNQVSLTCLVKGFYPSDIAVEWESNGQPENNYKTTPPVLDSDGSFFLYSKLTVDKSRWQQGNVFSCSVMHEALHNHYTQKSLSLSPGGGGSGSAHPIPDSSPLLQFGGQVRQRYLYTDDACQTEAHLEIREDGTVGGAADQSPESLLQLKALKPGVIQILGVKTSRFLCQRPDGALYGSLHFDPEACSFRELLLEDGYNVYQSEAHGLPLHLPGCKSPHRDPAPRGPARFLPLPGLPPAPPEPPGILAPQPPDVGSSDPLSMVYPSQGRSPSYAS

SEQ ID NO: 2109 - protein, 471 aa, Artificial Sequence
  Fusion Protein
HGEGTFTSDKSQLLEKRLAHLFIEWLIAGGPSKGKPPPKGGGGGGGSGGGGSGGGGSADKTHTCPPCPAPELLGGPSVFLFPPKPKDTLMISRTPEVTCVVVDVSHEDPEVKFNWYVDGVEVHNAKTKPREEQYNNASRVVSVLTVLHQDWLNGKEYKCKVSNKALPAPIEKTISKAKGQPREPQVYTLPPSRDELTKNQVSLTCLVKGFYPSDIAVEWESNGQPENNYKTTPPVLDSDGSFFLYSKLTVDKSRWQQGNVFSCSVMHEALHNHYTQKSLSLSPGGGGSGSAHPIPDSSPLLQFGGQVRQRYLYTDDACQTEAHLEIREDGTVGGAADQSPESLLQLKALKPGVIQILGVKTSRFLCQRPDGALYGSLHFDPEACSFRELLLEDGYNVYQSEAHGLPLHLCGNKSPHRDPAPRGPARFLPLPGLPPAPPEPPGILAPQPPDVGSSDPLSMVGSQGRSPSYAS

SEQ ID NO: 2110 - protein, 472 aa, Artificial Sequence
  Fusion Protein
HGEGTFTSDKSQLLEKRLAHLFIEWLIAGGPSKGKPPPKGGGGGGGSGGGGSGGGGSADKTHTCPPCPAPELLGGPSVFLFPPKPKDTLMISRTPEVTCVVVDVSHEDPEVKFNWYVDGVEVHNAKTKPREEQYNNASRVVSVLTVLHQDWLNGKEYKCKVSNKALPAPIEKTISKAKGQPREPQVYTLPPSRDELTKNQVSLTCLVKGFYPSDIAVEWESNGQPENNYKTTPPVLDSDGSFFLYSKLTVDKSRWQQGNVFSCSVMHEALHNHYTQKSLSLSPGGGGSGSAHPIPDSSPLLQFGGQVRQRYLYTDDACQTEAHLEIREDGTVGGAADQSPESLLQLKALKPGVIQILGVKTSRFLCQRPDGALYGSLHFDPEACSFRELLLEDGYNVYQSEAHGLPLHLCGNKSPHRDPAPRGPARFLPLPGLPPAPPEPPGILAPQPPDVGSSDPLSMVYPSQGRSPSYAS

SEQ ID NO: 2111 - protein, 474 aa, Artificial Sequence
  Fusion Protein
HGEGTFTSDKSQLLEKRLAHLFIEWLIAGGPSKGKPPPKGGGGGGGSGGGGSGGGGSAESKYGPPCPPCPAPEFEGGPSVFLFPPKPKDTLMISRTPEVTCVVVDVSQEDPEVQFNWYVDGVEVHNAKTKPREEQFNSTYRVVSVLTVLHQDWLNGKEYKCKVSNKGLPSSIEKTISKAKGQPREPQVYTLPPSQEEMTKNQVSLTCLVKGFYPSDIAVEWESNGQPENNYKTTPPVLDSDGSFFLYSRLTVDKSRWQEGNVFSCSVMHEALHNHYTQKSLSLSLGGGGSGSAHPIPDSSPLLQFGGQVRQRYLYTDDACQTEAHLEIREDGTVGGAADQSPESLLQLKALKPGVIQILGVKTSRFLCQRPDGALYGSLHFDPEACSFRELLLEDGYNVYQSEAHGLPLHLPGCKSPHRDPAPRGPARFLPLPGLPPAPPEPPGILAPQPPDVGSSDPLSMVYPSQGRSPSYAS

SEQ ID NO: 2112 - protein, 473 aa, Artificial Sequence
  Fusion Protein
HGEGTFTSDKSQLLEKRLAHLFIEWLIAGGPSKGKPPPKGGGGGGGSGGGGSGGGGSAESKYGPPCPPCPAPEFEGGPSVFLFPPKPKDTLMISRTPEVTCVVVDVSQEDPEVQFNWYVDGVEVHNAKTKPREEQFNSTYRVVSVLTVLHQDWLNGKEYKCKVSNKGLPSSIEKTISKAKGQPREPQVYTLPPSQEEMTKNQVSLTCLVKGFYPSDIAVEWESNGQPENNYKTTPPVLDSDGSFFLYSRLTVDKSRWQEGNVFSCSVMHEALHNHYTQKSLSLSLGGGGSGSAHPIPDSSPLLQFGGQVRQRYLYTDDACQTEAHLEIREDGTVGGAADQSPESLLQLKALKPGVIQILGVKTSRFLCQRPDGALYGSLHFDPEACSFRELLLEDGYNVYQSEAHGLPLHLCGNKSPHRDPAPRGPARFLPLPGLPPAPPEPPGILAPQPPDVGSSDPLSMVGSQGRSPSYAS

SEQ ID NO: 2113 - protein, 474 aa, Artificial Sequence
  Fusion Protein
HGEGTFTSDKSQLLEKRLAHLFIEWLIAGGPSKGKPPPKGGGGGGGSGGGGSGGGGSAESKYGPPCPPCPAPEFEGGPSVFLFPPKPKDTLMISRTPEVTCVVVDVSQEDPEVQFNWYVDGVEVHNAKTKPREEQFNSTYRVVSVLTVLHQDWLNGKEYKCKVSNKGLPSSIEKTISKAKGQPREPQVYTLPPSQEEMTKNQVSLTCLVKGFYPSDIAVEWESNGQPENNYKTTPPVLDSDGSFFLYSRLTVDKSRWQEGNVFSCSVMHEALHNHYTQKSLSLSLGGGGSGSAHPIPDSSPLLQFGGQVRQRYLYTDDACQTEAHLEIREDGTVGGAADQSPESLLQLKALKPGVIQILGVKTSRFLCQRPDGALYGSLHFDPEACSFRELLLEDGYNVYQSEAHGLPLHLCGNKSPHRDPAPRGPARFLPLPGLPPAPPEPPGILAPQPPDVGSSDPLSMVYPSQGRSPSYAS

SEQ ID NO: 2114 - protein, 471 aa, Artificial Sequence
  Fusion Protein
HGEGTFTSDKSKQLDEQRAKEFIEWLKAGGHPSGKPPPKGGGGGGGSGGGGSGGGGSADKTHTCPPCPAPEAAGGPSVFLFPPKPKDTLMISRTPEVTCVVVDVSHEDPEVKFNWYVDGVEVHNAKTKPREEQYNSTYRVVSVLTVLHQDWLNGKEYKCKVSNKALPAPIEKTISKAKGQPREPQVYTLPPSRDELTKNQVSLTCLVKGFYPSDIAVEWESNGQPENNYKTTPPVLDSDGSFFLYSKLTVDKSRWQQGNVFSCSVMHEALHNHYTQKSLSLSPGGGGSGSAHPIPDSSPLLQFGGQVRQRYLYTDDACQTEAHLEIREDGTVGGAADQSPESLLQLKALKPGVIQILGVKTSRFLCQRPDGALYGSLHFDPEACSFRELLLEDGYNVYQSEAHGLPLHLPGCKSPHRDPAPRGPARFLPLPGLPPAPPEPPGILAPQPPDVGSSDPLSMVGSQGRSPSYAS

SEQ ID NO: 2115 - protein, 472 aa, Artificial Sequence
  Fusion Protein
HGEGTFTSDKSKQLDEQRAKEFIEWLKAGGHPSGKPPPKGGGGGGGSGGGGSGGGGSADKTHTCPPCPAPEAAGGPSVFLFPPKPKDTLMISRTPEVTCVVVDVSHEDPEVKFNWYVDGVEVHNAKTKPREEQYNSTYRVVSVLTVLHQDWLNGKEYKCKVSNKALPAPIEKTISKAKGQPREPQVYTLPPSRDELTKNQVSLTCLVKGFYPSDIAVEWESNGQPENNYKTTPPVLDSDGSFFLYSKLTVDKSRWQQGNVFSCSVMHEALHNHYTQKSLSLSPGGGGSGSAHPIPDSSPLLQFGGQVRQRYLYTDDACQTEAHLEIREDGTVGGAADQSPESLLQLKALKPGVIQILGVKTSRFLCQRPDGALYGSLHFDPEACSFRELLLEDGYNVYQSEAHGLPLHLPGCKSPHRDPAPRGPARFLPLPGLPPAPPEPPGILAPQPPDVGSSDPLSMVYPSQGRSPSYAS

SEQ ID NO: 2116 - protein, 471 aa, Artificial Sequence
  Fusion Protein
HGEGTFTSDKSKQLDEQRAKEFIEWLKAGGHPSGKPPPKGGGGGGGSGGGGSGGGGSADKTHTCPPCPAPEAAGGPSVFLFPPKPKDTLMISRTPEVTCVVVDVSHEDPEVKFNWYVDGVEVHNAKTKPREEQYNSTYRVVSVLTVLHQDWLNGKEYKCKVSNKALPAPIEKTISKAKGQPREPQVYTLPPSRDELTKNQVSLTCLVKGFYPSDIAVEWESNGQPENNYKTTPPVLDSDGSFFLYSKLTVDKSRWQQGNVFSCSVMHEALHNHYTQKSLSLSPGGGGSGSAHPIPDSSPLLQFGGQVRQRYLYTDDACQTEAHLEIREDGTVGGAADQSPESLLQLKALKPGVIQILGVKTSRFLCQRPDGALYGSLHFDPEACSFRELLLEDGYNVYQSEAHGLPLHLCGNKSPHRDPAPRGPARFLPLPGLPPAPPEPPGILAPQPPDVGSSDPLSMVGSQGRSPSYAS

SEQ ID NO: 2117 - protein, 472 aa, Artificial Sequence
  Fusion Protein
HGEGTFTSDKSKQLDEQRAKEFIEWLKAGGHPSGKPPPKGGGGGGGSGGGGSGGGGSADKTHTCPPCPAPEAAGGPSVFLFPPKPKDTLMISRTPEVTCVVVDVSHEDPEVKFNWYVDGVEVHNAKTKPREEQYNSTYRVVSVLTVLHQDWLNGKEYKCKVSNKALPAPIEKTISKAKGQPREPQVYTLPPSRDELTKNQVSLTCLVKGFYPSDIAVEWESNGQPENNYKTTPPVLDSDGSFFLYSKLTVDKSRWQQGNVFSCSVMHEALHNHYTQKSLSLSPGGGGSGSAHPIPDSSPLLQFGGQVRQRYLYTDDACQTEAHLEIREDGTVGGAADQSPESLLQLKALKPGVIQILGVKTSRFLCQRPDGALYGSLHFDPEACSFRELLLEDGYNVYQSEAHGLPLHLCGNKSPHRDPAPRGPARFLPLPGLPPAPPEPPGILAPQPPDVGSSDPLSMVYPSQGRSPSYAS

SEQ ID NO: 2118 - protein, 471 aa, Artificial Sequence
  Fusion Protein
HGEGTFTSDKSKQLDEQRAKEFIEWLKAGGHPSGKPPPKGGGGGGGSGGGGSGGGGSADKTHTCPPCPAPELLGGPSVFLFPPKPKDTLMISRTPEVTCVVVDVSHEDPEVKFNWYVDGVEVHNAKTKPREEQYNNASRVVSVLTVLHQDWLNGKEYKCKVSNKALPAPIEKTISKAKGQPREPQVYTLPPSRDELTKNQVSLTCLVKGFYPSDIAVEWESNGQPENNYKTTPPVLDSDGSFFLYSKLTVDKSRWQQGNVFSCSVMHEALHNHYTQKSLSLSPGGGGSGSAHPIPDSSPLLQFGGQVRQRYLYTDDACQTEAHLEIREDGTVGGAADQSPESLLQLKALKPGVIQILGVKTSRFLCQRPDGALYGSLHFDPEACSFRELLLEDGYNVYQSEAHGLPLHLPGCKSPHRDPAPRGPARFLPLPGLPPAPPEPPGILAPQPPDVGSSDPLSMVGSQGRSPSYAS

SEQ ID NO: 2119 - protein, 472 aa, Artificial Sequence
  Fusion Protein
HGEGTFTSDKSKQLDEQRAKEFIEWLKAGGHPSGKPPPKGGGGGGGSGGGGSGGGGSADKTHTCPPCPAPELLGGPSVFLFPPKPKDTLMISRTPEVTCVVVDVSHEDPEVKFNWYVDGVEVHNAKTKPREEQYNNASRVVSVLTVLHQDWLNGKEYKCKVSNKALPAPIEKTISKAKGQPREPQVYTLPPSRDELTKNQVSLTCLVKGFYPSDIAVEWESNGQPENNYKTTPPVLDSDGSFFLYSKLTVDKSRWQQGNVFSCSVMHEALHNHYTQKSLSLSPGGGGSGSAHPIPDSSPLLQFGGQVRQRYLYTDDACQTEAHLEIREDGTVGGAADQSPESLLQLKALKPGVIQILGVKTSRFLCQRPDGALYGSLHFDPEACSFRELLLEDGYNVYQSEAHGLPLHLPGCKSPHRDPAPRGPARFLPLPGLPPAPPEPPGILAPQPPDVGSSDPLSMVYPSQGRSPSYAS

SEQ ID NO: 2120 - protein, 471 aa, Artificial Sequence
  Fusion Protein
HGEGTFTSDKSKQLDEQRAKEFIEWLKAGGHPSGKPPPKGGGGGGGSGGGGSGGGGSADKTHTCPPCPAPELLGGPSVFLFPPKPKDTLMISRTPEVTCVVVDVSHEDPEVKFNWYVDGVEVHNAKTKPREEQYNNASRVVSVLTVLHQDWLNGKEYKCKVSNKALPAPIEKTISKAKGQPREPQVYTLPPSRDELTKNQVSLTCLVKGFYPSDIAVEWESNGQPENNYKTTPPVLDSDGSFFLYSKLTVDKSRWQQGNVFSCSVMHEALHNHYTQKSLSLSPGGGGSGSAHPIPDSSPLLQFGGQVRQRYLYTDDACQTEAHLEIREDGTVGGAADQSPESLLQLKALKPGVIQILGVKTSRFLCQRPDGALYGSLHFDPEACSFRELLLEDGYNVYQSEAHGLPLHLCGNKSPHRDPAPRGPARFLPLPGLPPAPPEPPGILAPQPPDVGSSDPLSMVGSQGRSPSYAS

SEQ ID NO: 2121 - protein, 472 aa, Artificial Sequence
  Fusion Protein
HGEGTFTSDKSKQLDEQRAKEFIEWLKAGGHPSGKPPPKGGGGGGGSGGGGSGGGGSADKTHTCPPCPAPELLGGPSVFLFPPKPKDTLMISRTPEVTCVVVDVSHEDPEVKFNWYVDGVEVHNAKTKPREEQYNNASRVVSVLTVLHQDWLNGKEYKCKVSNKALPAPIEKTISKAKGQPREPQVYTLPPSRDELTKNQVSLTCLVKGFYPSDIAVEWESNGQPENNYKTTPPVLDSDGSFFLYSKLTVDKSRWQQGNVFSCSVMHEALHNHYTQKSLSLSPGGGGSGSAHPIPDSSPLLQFGGQVRQRYLYTDDACQTEAHLEIREDGTVGGAADQSPESLLQLKALKPGVIQILGVKTSRFLCQRPDGALYGSLHFDPEACSFRELLLEDGYNVYQSEAHGLPLHLCGNKSPHRDPAPRGPARFLPLPGLPPAPPEPPGILAPQPPDVGSSDPLSMVYPSQGRSPSYAS

SEQ ID NO: 2122 - protein, 474 aa, Artificial Sequence
  Fusion Protein
HGEGTFTSDKSKQLDEQRAKEFIEWLKAGGHPSGKPPPKGGGGGGGSGGGGSGGGGSAESKYGPPCPPCPAPEFEGGPSVFLFPPKPKDTLMISRTPEVTCVVVDVSQEDPEVQFNWYVDGVEVHNAKTKPREEQFNSTYRVVSVLTVLHQDWLNGKEYKCKVSNKGLPSSIEKTISKAKGQPREPQVYTLPPSQEEMTKNQVSLTCLVKGFYPSDIAVEWESNGQPENNYKTTPPVLDSDGSFFLYSRLTVDKSRWQEGNVFSCSVMHEALHNHYTQKSLSLSLGGGGSGSAHPIPDSSPLLQFGGQVRQRYLYTDDACQTEAHLEIREDGTVGGAADQSPESLLQLKALKPGVIQILGVKTSRFLCQRPDGALYGSLHFDPEACSFRELLLEDGYNVYQSEAHGLPLHLPGCKSPHRDPAPRGPARFLPLPGLPPAPPEPPGILAPQPPDVGSSDPLSMVYPSQGRSPSYAS

SEQ ID NO: 2123 - protein, 473 aa, Artificial Sequence
  Fusion Protein
HGEGTFTSDKSKQLDEQRAKEFIEWLKAGGHPSGKPPPKGGGGGGGSGGGGSGGGGSAESKYGPPCPPCPAPEFEGGPSVFLFPPKPKDTLMISRTPEVTCVVVDVSQEDPEVQFNWYVDGVEVHNAKTKPREEQFNSTYRVVSVLTVLHQDWLNGKEYKCKVSNKGLPSSIEKTISKAKGQPREPQVYTLPPSQEEMTKNQVSLTCLVKGFYPSDIAVEWESNGQPENNYKTTPPVLDSDGSFFLYSRLTVDKSRWQEGNVFSCSVMHEALHNHYTQKSLSLSLGGGGSGSAHPIPDSSPLLQFGGQVRQRYLYTDDACQTEAHLEIREDGTVGGAADQSPESLLQLKALKPGVIQILGVKTSRFLCQRPDGALYGSLHFDPEACSFRELLLEDGYNVYQSEAHGLPLHLCGNKSPHRDPAPRGPARFLPLPGLPPAPPEPPGILAPQPPDVGSSDPLSMVGSQGRSPSYAS

SEQ ID NO: 2124 - protein, 474 aa, Artificial Sequence
  Fusion Protein
HGEGTFTSDKSKQLDEQRAKEFIEWLKAGGHPSGKPPPKGGGGGGGSGGGGSGGGGSAESKYGPPCPPCPAPEFEGGPSVFLFPPKPKDTLMISRTPEVTCVVVDVSQEDPEVQFNWYVDGVEVHNAKTKPREEQFNSTYRVVSVLTVLHQDWLNGKEYKCKVSNKGLPSSIEKTISKAKGQPREPQVYTLPPSQEEMTKNQVSLTCLVKGFYPSDIAVEWESNGQPENNYKTTPPVLDSDGSFFLYSRLTVDKSRWQEGNVFSCSVMHEALHNHYTQKSLSLSLGGGGSGSAHPIPDSSPLLQFGGQVRQRYLYTDDACQTEAHLEIREDGTVGGAADQSPESLLQLKALKPGVIQILGVKTSRFLCQRPDGALYGSLHFDPEACSFRELLLEDGYNVYQSEAHGLPLHLCGNKSPHRDPAPRGPARFLPLPGLPPAPPEPPGILAPQPPDVGSSDPLSMVYPSQGRSPSYAS

SEQ ID NO: 2125 - protein, 471 aa, Artificial Sequence
  Fusion Protein
HGEGTFTSDKSQLLEKRAAHLFIEWLIKGGHSSIKPPPKGGGGGGGSGGGGSGGGGSADKTHTCPPCPAPEAAGGPSVFLFPPKPKDTLMISRTPEVTCVVVDVSHEDPEVKFNWYVDGVEVHNAKTKPREEQYNSTYRVVSVLTVLHQDWLNGKEYKCKVSNKALPAPIEKTISKAKGQPREPQVYTLPPSRDELTKNQVSLTCLVKGFYPSDIAVEWESNGQPENNYKTTPPVLDSDGSFFLYSKLTVDKSRWQQGNVFSCSVMHEALHNHYTQKSLSLSPGGGGSGSAHPIPDSSPLLQFGGQVRQRYLYTDDACQTEAHLEIREDGTVGGAADQSPESLLQLKALKPGVIQILGVKTSRFLCQRPDGALYGSLHFDPEACSFRELLLEDGYNVYQSEAHGLPLHLPGCKSPHRDPAPRGPARFLPLPGLPPAPPEPPGILAPQPPDVGSSDPLSMVGSQGRSPSYAS

SEQ ID NO: 2126 - protein, 472 aa, Artificial Sequence
  Fusion Protein
HGEGTFTSDKSQLLEKRAAHLFIEWLIKGGHSSIKPPPKGGGGGGGSGGGGSGGGGSADKTHTCPPCPAPEAAGGPSVFLFPPKPKDTLMISRTPEVTCVVVDVSHEDPEVKFNWYVDGVEVHNAKTKPREEQYNSTYRVVSVLTVLHQDWLNGKEYKCKVSNKALPAPIEKTISKAKGQPREPQVYTLPPSRDELTKNQVSLTCLVKGFYPSDIAVEWESNGQPENNYKTTPPVLDSDGSFFLYSKLTVDKSRWQQGNVFSCSVMHEALHNHYTQKSLSLSPGGGGSGSAHPIPDSSPLLQFGGQVRQRYLYTDDACQTEAHLEIREDGTVGGAADQSPESLLQLKALKPGVIQILGVKTSRFLCQRPDGALYGSLHFDPEACSFRELLLEDGYNVYQSEAHGLPLHLPGCKSPHRDPAPRGPARFLPLPGLPPAPPEPPGILAPQPPDVGSSDPLSMVYPSQGRSPSYAS

SEQ ID NO: 2127 - protein, 471 aa, Artificial Sequence
  Fusion Protein
HGEGTFTSDKSQLLEKRAAHLFIEWLIKGGHSSIKPPPKGGGGGGGSGGGGSGGGGSADKTHTCPPCPAPEAAGGPSVFLFPPKPKDTLMISRTPEVTCVVVDVSHEDPEVKFNWYVDGVEVHNAKTKPREEQYNSTYRVVSVLTVLHQDWLNGKEYKCKVSNKALPAPIEKTISKAKGQPREPQVYTLPPSRDELTKNQVSLTCLVKGFYPSDIAVEWESNGQPENNYKTTPPVLDSDGSFFLYSKLTVDKSRWQQGNVFSCSVMHEALHNHYTQKSLSLSPGGGGSGSAHPIPDSSPLLQFGGQVRQRYLYTDDACQTEAHLEIREDGTVGGAADQSPESLLQLKALKPGVIQILGVKTSRFLCQRPDGALYGSLHFDPEACSFRELLLEDGYNVYQSEAHGLPLHLCGNKSPHRDPAPRGPARFLPLPGLPPAPPEPPGILAPQPPDVGSSDPLSMVGSQGRSPSYAS

SEQ ID NO: 2128 - protein, 472 aa, Artificial Sequence
  Fusion Protein
HGEGTFTSDKSQLLEKRAAHLFIEWLIKGGHSSIKPPPKGGGGGGGSGGGGSGGGGSADKTHTCPPCPAPEAAGGPSVFLFPPKPKDTLMISRTPEVTCVVVDVSHEDPEVKFNWYVDGVEVHNAKTKPREEQYNSTYRVVSVLTVLHQDWLNGKEYKCKVSNKALPAPIEKTISKAKGQPREPQVYTLPPSRDELTKNQVSLTCLVKGFYPSDIAVEWESNGQPENNYKTTPPVLDSDGSFFLYSKLTVDKSRWQQGNVFSCSVMHEALHNHYTQKSLSLSPGGGGSGSAHPIPDSSPLLQFGGQVRQRYLYTDDACQTEAHLEIREDGTVGGAADQSPESLLQLKALKPGVIQILGVKTSRFLCQRPDGALYGSLHFDPEACSFRELLLEDGYNVYQSEAHGLPLHLCGNKSPHRDPAPRGPARFLPLPGLPPAPPEPPGILAPQPPDVGSSDPLSMVYPSQGRSPSYAS

SEQ ID NO: 2129 - protein, 471 aa, Artificial Sequence
  Fusion Protein
HGEGTFTSDKSQLLEKRAAHLFIEWLIKGGHSSIKPPPKGGGGGGGSGGGGSGGGGSADKTHTCPPCPAPELLGGPSVFLFPPKPKDTLMISRTPEVTCVVVDVSHEDPEVKFNWYVDGVEVHNAKTKPREEQYNNASRVVSVLTVLHQDWLNGKEYKCKVSNKALPAPIEKTISKAKGQPREPQVYTLPPSRDELTKNQVSLTCLVKGFYPSDIAVEWESNGQPENNYKTTPPVLDSDGSFFLYSKLTVDKSRWQQGNVFSCSVMHEALHNHYTQKSLSLSPGGGGSGSAHPIPDSSPLLQFGGQVRQRYLYTDDACQTEAHLEIREDGTVGGAADQSPESLLQLKALKPGVIQILGVKTSRFLCQRPDGALYGSLHFDPEACSFRELLLEDGYNVYQSEAHGLPLHLPGCKSPHRDPAPRGPARFLPLPGLPPAPPEPPGILAPQPPDVGSSDPLSMVGSQGRSPSYAS

SEQ ID NO: 2130 - protein, 472 aa, Artificial Sequence
  Fusion Protein
HGEGTFTSDKSQLLEKRAAHLFIEWLIKGGHSSIKPPPKGGGGGGGSGGGGSGGGGSADKTHTCPPCPAPELLGGPSVFLFPPKPKDTLMISRTPEVTCVVVDVSHEDPEVKFNWYVDGVEVHNAKTKPREEQYNNASRVVSVLTVLHQDWLNGKEYKCKVSNKALPAPIEKTISKAKGQPREPQVYTLPPSRDELTKNQVSLTCLVKGFYPSDIAVEWESNGQPENNYKTTPPVLDSDGSFFLYSKLTVDKSRWQQGNVFSCSVMHEALHNHYTQKSLSLSPGGGGSGSAHPIPDSSPLLQFGGQVRQRYLYTDDACQTEAHLEIREDGTVGGAADQSPESLLQLKALKPGVIQILGVKTSRFLCQRPDGALYGSLHFDPEACSFRELLLEDGYNVYQSEAHGLPLHLPGCKSPHRDPAPRGPARFLPLPGLPPAPPEPPGILAPQPPDVGSSDPLSMVYPSQGRSPSYAS

SEQ ID NO: 2131 - protein, 471 aa, Artificial Sequence
  Fusion Protein
HGEGTFTSDKSQLLEKRAAHLFIEWLIKGGHSSIKPPPKGGGGGGGSGGGGSGGGGSADKTHTCPPCPAPELLGGPSVFLFPPKPKDTLMISRTPEVTCVVVDVSHEDPEVKFNWYVDGVEVHNAKTKPREEQYNNASRVVSVLTVLHQDWLNGKEYKCKVSNKALPAPIEKTISKAKGQPREPQVYTLPPSRDELTKNQVSLTCLVKGFYPSDIAVEWESNGQPENNYKTTPPVLDSDGSFFLYSKLTVDKSRWQQGNVFSCSVMHEALHNHYTQKSLSLSPGGGGSGSAHPIPDSSPLLQFGGQVRQRYLYTDDACQTEAHLEIREDGTVGGAADQSPESLLQLKALKPGVIQILGVKTSRFLCQRPDGALYGSLHFDPEACSFRELLLEDGYNVYQSEAHGLPLHLCGNKSPHRDPAPRGPARFLPLPGLPPAPPEPPGILAPQPPDVGSSDPLSMVGSQGRSPSYAS

SEQ ID NO: 2132 - protein, 472 aa, Artificial Sequence
  Fusion Protein
HGEGTFTSDKSQLLEKRAAHLFIEWLIKGGHSSIKPPPKGGGGGGGSGGGGSGGGGSADKTHTCPPCPAPELLGGPSVFLFPPKPKDTLMISRTPEVTCVVVDVSHEDPEVKFNWYVDGVEVHNAKTKPREEQYNNASRVVSVLTVLHQDWLNGKEYKCKVSNKALPAPIEKTISKAKGQPREPQVYTLPPSRDELTKNQVSLTCLVKGFYPSDIAVEWESNGQPENNYKTTPPVLDSDGSFFLYSKLTVDKSRWQQGNVFSCSVMHEALHNHYTQKSLSLSPGGGGSGSAHPIPDSSPLLQFGGQVRQRYLYTDDACQTEAHLEIREDGTVGGAADQSPESLLQLKALKPGVIQILGVKTSRFLCQRPDGALYGSLHFDPEACSFRELLLEDGYNVYQSEAHGLPLHLCGNKSPHRDPAPRGPARFLPLPGLPPAPPEPPGILAPQPPDVGSSDPLSMVYPSQGRSPSYAS

SEQ ID NO: 2133 - protein, 474 aa, Artificial Sequence
  Fusion Protein
HGEGTFTSDKSQLLEKRAAHLFIEWLIKGGHSSIKPPPKGGGGGGGSGGGGSGGGGSAESKYGPPCPPCPAPEFEGGPSVFLFPPKPKDTLMISRTPEVTCVVVDVSQEDPEVQFNWYVDGVEVHNAKTKPREEQFNSTYRVVSVLTVLHQDWLNGKEYKCKVSNKGLPSSIEKTISKAKGQPREPQVYTLPPSQEEMTKNQVSLTCLVKGFYPSDIAVEWESNGQPENNYKTTPPVLDSDGSFFLYSRLTVDKSRWQEGNVFSCSVMHEALHNHYTQKSLSLSLGGGGSGSAHPIPDSSPLLQFGGQVRQRYLYTDDACQTEAHLEIREDGTVGGAADQSPESLLQLKALKPGVIQILGVKTSRFLCQRPDGALYGSLHFDPEACSFRELLLEDGYNVYQSEAHGLPLHLPGCKSPHRDPAPRGPARFLPLPGLPPAPPEPPGILAPQPPDVGSSDPLSMVYPSQGRSPSYAS

SEQ ID NO: 2134 - protein, 473 aa, Artificial Sequence
  Fusion Protein
HGEGTFTSDKSQLLEKRAAHLFIEWLIKGGHSSIKPPPKGGGGGGGSGGGGSGGGGSAESKYGPPCPPCPAPEFEGGPSVFLFPPKPKDTLMISRTPEVTCVVVDVSQEDPEVQFNWYVDGVEVHNAKTKPREEQFNSTYRVVSVLTVLHQDWLNGKEYKCKVSNKGLPSSIEKTISKAKGQPREPQVYTLPPSQEEMTKNQVSLTCLVKGFYPSDIAVEWESNGQPENNYKTTPPVLDSDGSFFLYSRLTVDKSRWQEGNVFSCSVMHEALHNHYTQKSLSLSLGGGGSGSAHPIPDSSPLLQFGGQVRQRYLYTDDACQTEAHLEIREDGTVGGAADQSPESLLQLKALKPGVIQILGVKTSRFLCQRPDGALYGSLHFDPEACSFRELLLEDGYNVYQSEAHGLPLHLCGNKSPHRDPAPRGPARFLPLPGLPPAPPEPPGILAPQPPDVGSSDPLSMVGSQGRSPSYAS

SEQ ID NO: 2135 - protein, 474 aa, Artificial Sequence
  Fusion Protein
HGEGTFTSDKSQLLEKRAAHLFIEWLIKGGHSSIKPPPKGGGGGGGSGGGGSGGGGSAESKYGPPCPPCPAPEFEGGPSVFLFPPKPKDTLMISRTPEVTCVVVDVSQEDPEVQFNWYVDGVEVHNAKTKPREEQFNSTYRVVSVLTVLHQDWLNGKEYKCKVSNKGLPSSIEKTISKAKGQPREPQVYTLPPSQEEMTKNQVSLTCLVKGFYPSDIAVEWESNGQPENNYKTTPPVLDSDGSFFLYSRLTVDKSRWQEGNVFSCSVMHEALHNHYTQKSLSLSLGGGGSGSAHPIPDSSPLLQFGGQVRQRYLYTDDACQTEAHLEIREDGTVGGAADQSPESLLQLKALKPGVIQILGVKTSRFLCQRPDGALYGSLHFDPEACSFRELLLEDGYNVYQSEAHGLPLHLCGNKSPHRDPAPRGPARFLPLPGLPPAPPEPPGILAPQPPDVGSSDPLSMVYPSQGRSPSYAS

SEQ ID NO: 2136 - protein, 471 aa, Artificial Sequence
  Fusion Protein
HGEGTFTSDKSQLLEKRLAHLFIEWLIAGGHSKIKYPPKGGGGGGGSGGGGSGGGGSADKTHTCPPCPAPEAAGGPSVFLFPPKPKDTLMISRTPEVTCVVVDVSHEDPEVKFNWYVDGVEVHNAKTKPREEQYNSTYRVVSVLTVLHQDWLNGKEYKCKVSNKALPAPIEKTISKAKGQPREPQVYTLPPSRDELTKNQVSLTCLVKGFYPSDIAVEWESNGQPENNYKTTPPVLDSDGSFFLYSKLTVDKSRWQQGNVFSCSVMHEALHNHYTQKSLSLSPGGGGSGSAHPIPDSSPLLQFGGQVRQRYLYTDDACQTEAHLEIREDGTVGGAADQSPESLLQLKALKPGVIQILGVKTSRFLCQRPDGALYGSLHFDPEACSFRELLLEDGYNVYQSEAHGLPLHLPGCKSPHRDPAPRGPARFLPLPGLPPAPPEPPGILAPQPPDVGSSDPLSMVGSQGRSPSYAS

SEQ ID NO: 2137 - protein, 472 aa, Artificial Sequence
  Fusion Protein
HGEGTFTSDKSQLLEKRLAHLFIEWLIAGGHSKIKYPPKGGGGGGGSGGGGSGGGGSADKTHTCPPCPAPEAAGGPSVFLFPPKPKDTLMISRTPEVTCVVVDVSHEDPEVKFNWYVDGVEVHNAKTKPREEQYNSTYRVVSVLTVLHQDWLNGKEYKCKVSNKALPAPIEKTISKAKGQPREPQVYTLPPSRDELTKNQVSLTCLVKGFYPSDIAVEWESNGQPENNYKTTPPVLDSDGSFFLYSKLTVDKSRWQQGNVFSCSVMHEALHNHYTQKSLSLSPGGGGSGSAHPIPDSSPLLQFGGQVRQRYLYTDDACQTEAHLEIREDGTVGGAADQSPESLLQLKALKPGVIQILGVKTSRFLCQRPDGALYGSLHFDPEACSFRELLLEDGYNVYQSEAHGLPLHLPGCKSPHRDPAPRGPARFLPLPGLPPAPPEPPGILAPQPPDVGSSDPLSMVYPSQGRSPSYAS

SEQ ID NO: 2138 - protein, 471 aa, Artificial Sequence
  Fusion Protein
HGEGTFTSDKSQLLEKRLAHLFIEWLIAGGHSKIKYPPKGGGGGGGSGGGGSGGGGSADKTHTCPPCPAPEAAGGPSVFLFPPKPKDTLMISRTPEVTCVVVDVSHEDPEVKFNWYVDGVEVHNAKTKPREEQYNSTYRVVSVLTVLHQDWLNGKEYKCKVSNKALPAPIEKTISKAKGQPREPQVYTLPPSRDELTKNQVSLTCLVKGFYPSDIAVEWESNGQPENNYKTTPPVLDSDGSFFLYSKLTVDKSRWQQGNVFSCSVMHEALHNHYTQKSLSLSPGGGGSGSAHPIPDSSPLLQFGGQVRQRYLYTDDACQTEAHLEIREDGTVGGAADQSPESLLQLKALKPGVIQILGVKTSRFLCQRPDGALYGSLHFDPEACSFRELLLEDGYNVYQSEAHGLPLHLCGNKSPHRDPAPRGPARFLPLPGLPPAPPEPPGILAPQPPDVGSSDPLSMVGSQGRSPSYAS

SEQ ID NO: 2139 - protein, 472 aa, Artificial Sequence
  Fusion Protein
HGEGTFTSDKSQLLEKRLAHLFIEWLIAGGHSKIKYPPKGGGGGGGSGGGGSGGGGSADKTHTCPPCPAPEAAGGPSVFLFPPKPKDTLMISRTPEVTCVVVDVSHEDPEVKFNWYVDGVEVHNAKTKPREEQYNSTYRVVSVLTVLHQDWLNGKEYKCKVSNKALPAPIEKTISKAKGQPREPQVYTLPPSRDELTKNQVSLTCLVKGFYPSDIAVEWESNGQPENNYKTTPPVLDSDGSFFLYSKLTVDKSRWQQGNVFSCSVMHEALHNHYTQKSLSLSPGGGGSGSAHPIPDSSPLLQFGGQVRQRYLYTDDACQTEAHLEIREDGTVGGAADQSPESLLQLKALKPGVIQILGVKTSRFLCQRPDGALYGSLHFDPEACSFRELLLEDGYNVYQSEAHGLPLHLCGNKSPHRDPAPRGPARFLPLPGLPPAPPEPPGILAPQPPDVGSSDPLSMVYPSQGRSPSYAS

SEQ ID NO: 2140 - protein, 471 aa, Artificial Sequence
  Fusion Protein
HGEGTFTSDKSQLLEKRLAHLFIEWLIAGGHSKIKYPPKGGGGGGGSGGGGSGGGGSADKTHTCPPCPAPELLGGPSVFLFPPKPKDTLMISRTPEVTCVVVDVSHEDPEVKFNWYVDGVEVHNAKTKPREEQYNNASRVVSVLTVLHQDWLNGKEYKCKVSNKALPAPIEKTISKAKGQPREPQVYTLPPSRDELTKNQVSLTCLVKGFYPSDIAVEWESNGQPENNYKTTPPVLDSDGSFFLYSKLTVDKSRWQQGNVFSCSVMHEALHNHYTQKSLSLSPGGGGSGSAHPIPDSSPLLQFGGQVRQRYLYTDDACQTEAHLEIREDGTVGGAADQSPESLLQLKALKPGVIQILGVKTSRFLCQRPDGALYGSLHFDPEACSFRELLLEDGYNVYQSEAHGLPLHLPGCKSPHRDPAPRGPARFLPLPGLPPAPPEPPGILAPQPPDVGSSDPLSMVGSQGRSPSYAS

SEQ ID NO: 2141 - protein, 472 aa, Artificial Sequence
  Fusion Protein
HGEGTFTSDKSQLLEKRLAHLFIEWLIAGGHSKIKYPPKGGGGGGGSGGGGSGGGGSADKTHTCPPCPAPELLGGPSVFLFPPKPKDTLMISRTPEVTCVVVDVSHEDPEVKFNWYVDGVEVHNAKTKPREEQYNNASRVVSVLTVLHQDWLNGKEYKCKVSNKALPAPIEKTISKAKGQPREPQVYTLPPSRDELTKNQVSLTCLVKGFYPSDIAVEWESNGQPENNYKTTPPVLDSDGSFFLYSKLTVDKSRWQQGNVFSCSVMHEALHNHYTQKSLSLSPGGGGSGSAHPIPDSSPLLQFGGQVRQRYLYTDDACQTEAHLEIREDGTVGGAADQSPESLLQLKALKPGVIQILGVKTSRFLCQRPDGALYGSLHFDPEACSFRELLLEDGYNVYQSEAHGLPLHLPGCKSPHRDPAPRGPARFLPLPGLPPAPPEPPGILAPQPPDVGSSDPLSMVYPSQGRSPSYAS

SEQ ID NO: 2142 - protein, 471 aa, Artificial Sequence
  Fusion Protein
HGEGTFTSDKSQLLEKRLAHLFIEWLIAGGHSKIKYPPKGGGGGGGSGGGGSGGGGSADKTHTCPPCPAPELLGGPSVFLFPPKPKDTLMISRTPEVTCVVVDVSHEDPEVKFNWYVDGVEVHNAKTKPREEQYNNASRVVSVLTVLHQDWLNGKEYKCKVSNKALPAPIEKTISKAKGQPREPQVYTLPPSRDELTKNQVSLTCLVKGFYPSDIAVEWESNGQPENNYKTTPPVLDSDGSFFLYSKLTVDKSRWQQGNVFSCSVMHEALHNHYTQKSLSLSPGGGGSGSAHPIPDSSPLLQFGGQVRQRYLYTDDACQTEAHLEIREDGTVGGAADQSPESLLQLKALKPGVIQILGVKTSRFLCQRPDGALYGSLHFDPEACSFRELLLEDGYNVYQSEAHGLPLHLCGNKSPHRDPAPRGPARFLPLPGLPPAPPEPPGILAPQPPDVGSSDPLSMVGSQGRSPSYAS

SEQ ID NO: 2143 - protein, 472 aa, Artificial Sequence
  Fusion Protein
HGEGTFTSDKSQLLEKRLAHLFIEWLIAGGHSKIKYPPKGGGGGGGSGGGGSGGGGSADKTHTCPPCPAPELLGGPSVFLFPPKPKDTLMISRTPEVTCVVVDVSHEDPEVKFNWYVDGVEVHNAKTKPREEQYNNASRVVSVLTVLHQDWLNGKEYKCKVSNKALPAPIEKTISKAKGQPREPQVYTLPPSRDELTKNQVSLTCLVKGFYPSDIAVEWESNGQPENNYKTTPPVLDSDGSFFLYSKLTVDKSRWQQGNVFSCSVMHEALHNHYTQKSLSLSPGGGGSGSAHPIPDSSPLLQFGGQVRQRYLYTDDACQTEAHLEIREDGTVGGAADQSPESLLQLKALKPGVIQILGVKTSRFLCQRPDGALYGSLHFDPEACSFRELLLEDGYNVYQSEAHGLPLHLCGNKSPHRDPAPRGPARFLPLPGLPPAPPEPPGILAPQPPDVGSSDPLSMVYPSQGRSPSYAS

SEQ ID NO: 2144 - protein, 474 aa, Artificial Sequence
  Fusion Protein
HGEGTFTSDKSQLLEKRLAHLFIEWLIAGGHSKIKYPPKGGGGGGGSGGGGSGGGGSAESKYGPPCPPCPAPEFEGGPSVFLFPPKPKDTLMISRTPEVTCVVVDVSQEDPEVQFNWYVDGVEVHNAKTKPREEQFNSTYRVVSVLTVLHQDWLNGKEYKCKVSNKGLPSSIEKTISKAKGQPREPQVYTLPPSQEEMTKNQVSLTCLVKGFYPSDIAVEWESNGQPENNYKTTPPVLDSDGSFFLYSRLTVDKSRWQEGNVFSCSVMHEALHNHYTQKSLSLSLGGGGSGSAHPIPDSSPLLQFGGQVRQRYLYTDDACQTEAHLEIREDGTVGGAADQSPESLLQLKALKPGVIQILGVKTSRFLCQRPDGALYGSLHFDPEACSFRELLLEDGYNVYQSEAHGLPLHLPGCKSPHRDPAPRGPARFLPLPGLPPAPPEPPGILAPQPPDVGSSDPLSMVYPSQGRSPSYAS

SEQ ID NO: 2145 - protein, 473 aa, Artificial Sequence
  Fusion Protein
HGEGTFTSDKSQLLEKRLAHLFIEWLIAGGHSKIKYPPKGGGGGGGSGGGGSGGGGSAESKYGPPCPPCPAPEFEGGPSVFLFPPKPKDTLMISRTPEVTCVVVDVSQEDPEVQFNWYVDGVEVHNAKTKPREEQFNSTYRVVSVLTVLHQDWLNGKEYKCKVSNKGLPSSIEKTISKAKGQPREPQVYTLPPSQEEMTKNQVSLTCLVKGFYPSDIAVEWESNGQPENNYKTTPPVLDSDGSFFLYSRLTVDKSRWQEGNVFSCSVMHEALHNHYTQKSLSLSLGGGGSGSAHPIPDSSPLLQFGGQVRQRYLYTDDACQTEAHLEIREDGTVGGAADQSPESLLQLKALKPGVIQILGVKTSRFLCQRPDGALYGSLHFDPEACSFRELLLEDGYNVYQSEAHGLPLHLCGNKSPHRDPAPRGPARFLPLPGLPPAPPEPPGILAPQPPDVGSSDPLSMVGSQGRSPSYAS

SEQ ID NO: 2146 - protein, 474 aa, Artificial Sequence
  Fusion Protein
HGEGTFTSDKSQLLEKRLAHLFIEWLIAGGHSKIKYPPKGGGGGGGSGGGGSGGGGSAESKYGPPCPPCPAPEFEGGPSVFLFPPKPKDTLMISRTPEVTCVVVDVSQEDPEVQFNWYVDGVEVHNAKTKPREEQFNSTYRVVSVLTVLHQDWLNGKEYKCKVSNKGLPSSIEKTISKAKGQPREPQVYTLPPSQEEMTKNQVSLTCLVKGFYPSDIAVEWESNGQPENNYKTTPPVLDSDGSFFLYSRLTVDKSRWQEGNVFSCSVMHEALHNHYTQKSLSLSLGGGGSGSAHPIPDSSPLLQFGGQVRQRYLYTDDACQTEAHLEIREDGTVGGAADQSPESLLQLKALKPGVIQILGVKTSRFLCQRPDGALYGSLHFDPEACSFRELLLEDGYNVYQSEAHGLPLHLCGNKSPHRDPAPRGPARFLPLPGLPPAPPEPPGILAPQPPDVGSSDPLSMVYPSQGRSPSYAS

SEQ ID NO: 2147 - protein, 471 aa, Artificial Sequence
  Fusion Protein
HGEGTFTSDKSQLLEKELAHLFIEWLIAGGHSSIKPPPKGGGGGGGSGGGGSGGGGSADKTHTCPPCPAPEAAGGPSVFLFPPKPKDTLMISRTPEVTCVVVDVSHEDPEVKFNWYVDGVEVHNAKTKPREEQYNSTYRVVSVLTVLHQDWLNGKEYKCKVSNKALPAPIEKTISKAKGQPREPQVYTLPPSRDELTKNQVSLTCLVKGFYPSDIAVEWESNGQPENNYKTTPPVLDSDGSFFLYSKLTVDKSRWQQGNVFSCSVMHEALHNHYTQKSLSLSPGGGGSGSAHPIPDSSPLLQFGGQVRQRYLYTDDACQTEAHLEIREDGTVGGAADQSPESLLQLKALKPGVIQILGVKTSRFLCQRPDGALYGSLHFDPEACSFRELLLEDGYNVYQSEAHGLPLHLPGCKSPHRDPAPRGPARFLPLPGLPPAPPEPPGILAPQPPDVGSSDPLSMVGSQGRSPSYAS

SEQ ID NO: 2148 - protein, 472 aa, Artificial Sequence
  Fusion Protein
HGEGTFTSDKSQLLEKELAHLFIEWLIAGGHSSIKPPPKGGGGGGGSGGGGSGGGGSADKTHTCPPCPAPEAAGGPSVFLFPPKPKDTLMISRTPEVTCVVVDVSHEDPEVKFNWYVDGVEVHNAKTKPREEQYNSTYRVVSVLTVLHQDWLNGKEYKCKVSNKALPAPIEKTISKAKGQPREPQVYTLPPSRDELTKNQVSLTCLVKGFYPSDIAVEWESNGQPENNYKTTPPVLDSDGSFFLYSKLTVDKSRWQQGNVFSCSVMHEALHNHYTQKSLSLSPGGGGSGSAHPIPDSSPLLQFGGQVRQRYLYTDDACQTEAHLEIREDGTVGGAADQSPESLLQLKALKPGVIQILGVKTSRFLCQRPDGALYGSLHFDPEACSFRELLLEDGYNVYQSEAHGLPLHLPGCKSPHRDPAPRGPARFLPLPGLPPAPPEPPGILAPQPPDVGSSDPLSMVYPSQGRSPSYAS

SEQ ID NO: 2149 - protein, 471 aa, Artificial Sequence
  Fusion Protein
HGEGTFTSDKSQLLEKELAHLFIEWLIAGGHSSIKPPPKGGGGGGGSGGGGSGGGGSADKTHTCPPCPAPEAAGGPSVFLFPPKPKDTLMISRTPEVTCVVVDVSHEDPEVKFNWYVDGVEVHNAKTKPREEQYNSTYRVVSVLTVLHQDWLNGKEYKCKVSNKALPAPIEKTISKAKGQPREPQVYTLPPSRDELTKNQVSLTCLVKGFYPSDIAVEWESNGQPENNYKTTPPVLDSDGSFFLYSKLTVDKSRWQQGNVFSCSVMHEALHNHYTQKSLSLSPGGGGSGSAHPIPDSSPLLQFGGQVRQRYLYTDDACQTEAHLEIREDGTVGGAADQSPESLLQLKALKPGVIQILGVKTSRFLCQRPDGALYGSLHFDPEACSFRELLLEDGYNVYQSEAHGLPLHLCGNKSPHRDPAPRGPARFLPLPGLPPAPPEPPGILAPQPPDVGSSDPLSMVGSQGRSPSYAS

SEQ ID NO: 2150 - protein, 472 aa, Artificial Sequence
  Fusion Protein
HGEGTFTSDKSQLLEKELAHLFIEWLIAGGHSSIKPPPKGGGGGGGSGGGGSGGGGSADKTHTCPPCPAPEAAGGPSVFLFPPKPKDTLMISRTPEVTCVVVDVSHEDPEVKFNWYVDGVEVHNAKTKPREEQYNSTYRVVSVLTVLHQDWLNGKEYKCKVSNKALPAPIEKTISKAKGQPREPQVYTLPPSRDELTKNQVSLTCLVKGFYPSDIAVEWESNGQPENNYKTTPPVLDSDGSFFLYSKLTVDKSRWQQGNVFSCSVMHEALHNHYTQKSLSLSPGGGGSGSAHPIPDSSPLLQFGGQVRQRYLYTDDACQTEAHLEIREDGTVGGAADQSPESLLQLKALKPGVIQILGVKTSRFLCQRPDGALYGSLHFDPEACSFRELLLEDGYNVYQSEAHGLPLHLCGNKSPHRDPAPRGPARFLPLPGLPPAPPEPPGILAPQPPDVGSSDPLSMVYPSQGRSPSYAS

SEQ ID NO: 2151 - protein, 471 aa, Artificial Sequence
  Fusion Protein
HGEGTFTSDKSQLLEKELAHLFIEWLIAGGHSSIKPPPKGGGGGGGSGGGGSGGGGSADKTHTCPPCPAPELLGGPSVFLFPPKPKDTLMISRTPEVTCVVVDVSHEDPEVKFNWYVDGVEVHNAKTKPREEQYNNASRVVSVLTVLHQDWLNGKEYKCKVSNKALPAPIEKTISKAKGQPREPQVYTLPPSRDELTKNQVSLTCLVKGFYPSDIAVEWESNGQPENNYKTTPPVLDSDGSFFLYSKLTVDKSRWQQGNVFSCSVMHEALHNHYTQKSLSLSPGGGGSGSAHPIPDSSPLLQFGGQVRQRYLYTDDACQTEAHLEIREDGTVGGAADQSPESLLQLKALKPGVIQILGVKTSRFLCQRPDGALYGSLHFDPEACSFRELLLEDGYNVYQSEAHGLPLHLPGCKSPHRDPAPRGPARFLPLPGLPPAPPEPPGILAPQPPDVGSSDPLSMVGSQGRSPSYAS

SEQ ID NO: 2152 - protein, 472 aa, Artificial Sequence
  Fusion Protein
HGEGTFTSDKSQLLEKELAHLFIEWLIAGGHSSIKPPPKGGGGGGGSGGGGSGGGGSADKTHTCPPCPAPELLGGPSVFLFPPKPKDTLMISRTPEVTCVVVDVSHEDPEVKFNWYVDGVEVHNAKTKPREEQYNNASRVVSVLTVLHQDWLNGKEYKCKVSNKALPAPIEKTISKAKGQPREPQVYTLPPSRDELTKNQVSLTCLVKGFYPSDIAVEWESNGQPENNYKTTPPVLDSDGSFFLYSKLTVDKSRWQQGNVFSCSVMHEALHNHYTQKSLSLSPGGGGSGSAHPIPDSSPLLQFGGQVRQRYLYTDDACQTEAHLEIREDGTVGGAADQSPESLLQLKALKPGVIQILGVKTSRFLCQRPDGALYGSLHFDPEACSFRELLLEDGYNVYQSEAHGLPLHLPGCKSPHRDPAPRGPARFLPLPGLPPAPPEPPGILAPQPPDVGSSDPLSMVYPSQGRSPSYAS

SEQ ID NO: 2153 - protein, 471 aa, Artificial Sequence
  Fusion Protein
HGEGTFTSDKSQLLEKELAHLFIEWLIAGGHSSIKPPPKGGGGGGGSGGGGSGGGGSADKTHTCPPCPAPELLGGPSVFLFPPKPKDTLMISRTPEVTCVVVDVSHEDPEVKFNWYVDGVEVHNAKTKPREEQYNNASRVVSVLTVLHQDWLNGKEYKCKVSNKALPAPIEKTISKAKGQPREPQVYTLPPSRDELTKNQVSLTCLVKGFYPSDIAVEWESNGQPENNYKTTPPVLDSDGSFFLYSKLTVDKSRWQQGNVFSCSVMHEALHNHYTQKSLSLSPGGGGSGSAHPIPDSSPLLQFGGQVRQRYLYTDDACQTEAHLEIREDGTVGGAADQSPESLLQLKALKPGVIQILGVKTSRFLCQRPDGALYGSLHFDPEACSFRELLLEDGYNVYQSEAHGLPLHLCGNKSPHRDPAPRGPARFLPLPGLPPAPPEPPGILAPQPPDVGSSDPLSMVGSQGRSPSYAS

SEQ ID NO: 2154 - protein, 472 aa, Artificial Sequence
  Fusion Protein
HGEGTFTSDKSQLLEKELAHLFIEWLIAGGHSSIKPPPKGGGGGGGSGGGGSGGGGSADKTHTCPPCPAPELLGGPSVFLFPPKPKDTLMISRTPEVTCVVVDVSHEDPEVKFNWYVDGVEVHNAKTKPREEQYNNASRVVSVLTVLHQDWLNGKEYKCKVSNKALPAPIEKTISKAKGQPREPQVYTLPPSRDELTKNQVSLTCLVKGFYPSDIAVEWESNGQPENNYKTTPPVLDSDGSFFLYSKLTVDKSRWQQGNVFSCSVMHEALHNHYTQKSLSLSPGGGGSGSAHPIPDSSPLLQFGGQVRQRYLYTDDACQTEAHLEIREDGTVGGAADQSPESLLQLKALKPGVIQILGVKTSRFLCQRPDGALYGSLHFDPEACSFRELLLEDGYNVYQSEAHGLPLHLCGNKSPHRDPAPRGPARFLPLPGLPPAPPEPPGILAPQPPDVGSSDPLSMVYPSQGRSPSYAS

SEQ ID NO: 2155 - protein, 474 aa, Artificial Sequence
  Fusion Protein
HGEGTFTSDKSQLLEKELAHLFIEWLIAGGHSSIKPPPKGGGGGGGSGGGGSGGGGSAESKYGPPCPPCPAPEFEGGPSVFLFPPKPKDTLMISRTPEVTCVVVDVSQEDPEVQFNWYVDGVEVHNAKTKPREEQFNSTYRVVSVLTVLHQDWLNGKEYKCKVSNKGLPSSIEKTISKAKGQPREPQVYTLPPSQEEMTKNQVSLTCLVKGFYPSDIAVEWESNGQPENNYKTTPPVLDSDGSFFLYSRLTVDKSRWQEGNVFSCSVMHEALHNHYTQKSLSLSLGGGGSGSAHPIPDSSPLLQFGGQVRQRYLYTDDACQTEAHLEIREDGTVGGAADQSPESLLQLKALKPGVIQILGVKTSRFLCQRPDGALYGSLHFDPEACSFRELLLEDGYNVYQSEAHGLPLHLPGCKSPHRDPAPRGPARFLPLPGLPPAPPEPPGILAPQPPDVGSSDPLSMVYPSQGRSPSYAS

SEQ ID NO: 2156 - protein, 473 aa, Artificial Sequence
  Fusion Protein
HGEGTFTSDKSQLLEKELAHLFIEWLIAGGHSSIKPPPKGGGGGGGSGGGGSGGGGSAESKYGPPCPPCPAPEFEGGPSVFLFPPKPKDTLMISRTPEVTCVVVDVSQEDPEVQFNWYVDGVEVHNAKTKPREEQFNSTYRVVSVLTVLHQDWLNGKEYKCKVSNKGLPSSIEKTISKAKGQPREPQVYTLPPSQEEMTKNQVSLTCLVKGFYPSDIAVEWESNGQPENNYKTTPPVLDSDGSFFLYSRLTVDKSRWQEGNVFSCSVMHEALHNHYTQKSLSLSLGGGGSGSAHPIPDSSPLLQFGGQVRQRYLYTDDACQTEAHLEIREDGTVGGAADQSPESLLQLKALKPGVIQILGVKTSRFLCQRPDGALYGSLHFDPEACSFRELLLEDGYNVYQSEAHGLPLHLCGNKSPHRDPAPRGPARFLPLPGLPPAPPEPPGILAPQPPDVGSSDPLSMVGSQGRSPSYAS

SEQ ID NO: 2157 - protein, 474 aa, Artificial Sequence
  Fusion Protein
HGEGTFTSDKSQLLEKELAHLFIEWLIAGGHSSIKPPPKGGGGGGGSGGGGSGGGGSAESKYGPPCPPCPAPEFEGGPSVFLFPPKPKDTLMISRTPEVTCVVVDVSQEDPEVQFNWYVDGVEVHNAKTKPREEQFNSTYRVVSVLTVLHQDWLNGKEYKCKVSNKGLPSSIEKTISKAKGQPREPQVYTLPPSQEEMTKNQVSLTCLVKGFYPSDIAVEWESNGQPENNYKTTPPVLDSDGSFFLYSRLTVDKSRWQEGNVFSCSVMHEALHNHYTQKSLSLSLGGGGSGSAHPIPDSSPLLQFGGQVRQRYLYTDDACQTEAHLEIREDGTVGGAADQSPESLLQLKALKPGVIQILGVKTSRFLCQRPDGALYGSLHFDPEACSFRELLLEDGYNVYQSEAHGLPLHLCGNKSPHRDPAPRGPARFLPLPGLPPAPPEPPGILAPQPPDVGSSDPLSMVYPSQGRSPSYAS

SEQ ID NO: 2158 - protein, 471 aa, Artificial Sequence
  Fusion Protein
HGEGTFTSDKSQLLEKRLAHLFIEWLIAGGHKKGKYPPKGGGGGGGSGGGGSGGGGSADKTHTCPPCPAPEAAGGPSVFLFPPKPKDTLMISRTPEVTCVVVDVSHEDPEVKFNWYVDGVEVHNAKTKPREEQYNSTYRVVSVLTVLHQDWLNGKEYKCKVSNKALPAPIEKTISKAKGQPREPQVYTLPPSRDELTKNQVSLTCLVKGFYPSDIAVEWESNGQPENNYKTTPPVLDSDGSFFLYSKLTVDKSRWQQGNVFSCSVMHEALHNHYTQKSLSLSPGGGGSGSAHPIPDSSPLLQFGGQVRQRYLYTDDACQTEAHLEIREDGTVGGAADQSPESLLQLKALKPGVIQILGVKTSRFLCQRPDGALYGSLHFDPEACSFRELLLEDGYNVYQSEAHGLPLHLPGCKSPHRDPAPRGPARFLPLPGLPPAPPEPPGILAPQPPDVGSSDPLSMVGSQGRSPSYAS

SEQ ID NO: 2159 - protein, 472 aa, Artificial Sequence
  Fusion Protein
HGEGTFTSDKSQLLEKRLAHLFIEWLIAGGHKKGKYPPKGGGGGGGSGGGGSGGGGSADKTHTCPPCPAPEAAGGPSVFLFPPKPKDTLMISRTPEVTCVVVDVSHEDPEVKFNWYVDGVEVHNAKTKPREEQYNSTYRVVSVLTVLHQDWLNGKEYKCKVSNKALPAPIEKTISKAKGQPREPQVYTLPPSRDELTKNQVSLTCLVKGFYPSDIAVEWESNGQPENNYKTTPPVLDSDGSFFLYSKLTVDKSRWQQGNVFSCSVMHEALHNHYTQKSLSLSPGGGGSGSAHPIPDSSPLLQFGGQVRQRYLYTDDACQTEAHLEIREDGTVGGAADQSPESLLQLKALKPGVIQILGVKTSRFLCQRPDGALYGSLHFDPEACSFRELLLEDGYNVYQSEAHGLPLHLPGCKSPHRDPAPRGPARFLPLPGLPPAPPEPPGILAPQPPDVGSSDPLSMVYPSQGRSPSYAS

SEQ ID NO: 2160 - protein, 471 aa, Artificial Sequence
  Fusion Protein
HGEGTFTSDKSQLLEKRLAHLFIEWLIAGGHKKGKYPPKGGGGGGGSGGGGSGGGGSADKTHTCPPCPAPEAAGGPSVFLFPPKPKDTLMISRTPEVTCVVVDVSHEDPEVKFNWYVDGVEVHNAKTKPREEQYNSTYRVVSVLTVLHQDWLNGKEYKCKVSNKALPAPIEKTISKAKGQPREPQVYTLPPSRDELTKNQVSLTCLVKGFYPSDIAVEWESNGQPENNYKTTPPVLDSDGSFFLYSKLTVDKSRWQQGNVFSCSVMHEALHNHYTQKSLSLSPGGGGSGSAHPIPDSSPLLQFGGQVRQRYLYTDDACQTEAHLEIREDGTVGGAADQSPESLLQLKALKPGVIQILGVKTSRFLCQRPDGALYGSLHFDPEACSFRELLLEDGYNVYQSEAHGLPLHLCGNKSPHRDPAPRGPARFLPLPGLPPAPPEPPGILAPQPPDVGSSDPLSMVGSQGRSPSYAS

SEQ ID NO: 2161 - protein, 472 aa, Artificial Sequence
  Fusion Protein
HGEGTFTSDKSQLLEKRLAHLFIEWLIAGGHKKGKYPPKGGGGGGGSGGGGSGGGGSADKTHTCPPCPAPEAAGGPSVFLFPPKPKDTLMISRTPEVTCVVVDVSHEDPEVKFNWYVDGVEVHNAKTKPREEQYNSTYRVVSVLTVLHQDWLNGKEYKCKVSNKALPAPIEKTISKAKGQPREPQVYTLPPSRDELTKNQVSLTCLVKGFYPSDIAVEWESNGQPENNYKTTPPVLDSDGSFFLYSKLTVDKSRWQQGNVFSCSVMHEALHNHYTQKSLSLSPGGGGSGSAHPIPDSSPLLQFGGQVRQRYLYTDDACQTEAHLEIREDGTVGGAADQSPESLLQLKALKPGVIQILGVKTSRFLCQRPDGALYGSLHFDPEACSFRELLLEDGYNVYQSEAHGLPLHLCGNKSPHRDPAPRGPARFLPLPGLPPAPPEPPGILAPQPPDVGSSDPLSMVYPSQGRSPSYAS

SEQ ID NO: 2162 - protein, 471 aa, Artificial Sequence
  Fusion Protein
HGEGTFTSDKSQLLEKRLAHLFIEWLIAGGHKKGKYPPKGGGGGGGSGGGGSGGGGSADKTHTCPPCPAPELLGGPSVFLFPPKPKDTLMISRTPEVTCVVVDVSHEDPEVKFNWYVDGVEVHNAKTKPREEQYNNASRVVSVLTVLHQDWLNGKEYKCKVSNKALPAPIEKTISKAKGQPREPQVYTLPPSRDELTKNQVSLTCLVKGFYPSDIAVEWESNGQPENNYKTTPPVLDSDGSFFLYSKLTVDKSRWQQGNVFSCSVMHEALHNHYTQKSLSLSPGGGGSGSAHPIPDSSPLLQFGGQVRQRYLYTDDACQTEAHLEIREDGTVGGAADQSPESLLQLKALKPGVIQILGVKTSRFLCQRPDGALYGSLHFDPEACSFRELLLEDGYNVYQSEAHGLPLHLPGCKSPHRDPAPRGPARFLPLPGLPPAPPEPPGILAPQPPDVGSSDPLSMVGSQGRSPSYAS

SEQ ID NO: 2163 - protein, 472 aa, Artificial Sequence
  Fusion Protein
HGEGTFTSDKSQLLEKRLAHLFIEWLIAGGHKKGKYPPKGGGGGGGSGGGGSGGGGSADKTHTCPPCPAPELLGGPSVFLFPPKPKDTLMISRTPEVTCVVVDVSHEDPEVKFNWYVDGVEVHNAKTKPREEQYNNASRVVSVLTVLHQDWLNGKEYKCKVSNKALPAPIEKTISKAKGQPREPQVYTLPPSRDELTKNQVSLTCLVKGFYPSDIAVEWESNGQPENNYKTTPPVLDSDGSFFLYSKLTVDKSRWQQGNVFSCSVMHEALHNHYTQKSLSLSPGGGGSGSAHPIPDSSPLLQFGGQVRQRYLYTDDACQTEAHLEIREDGTVGGAADQSPESLLQLKALKPGVIQILGVKTSRFLCQRPDGALYGSLHFDPEACSFRELLLEDGYNVYQSEAHGLPLHLPGCKSPHRDPAPRGPARFLPLPGLPPAPPEPPGILAPQPPDVGSSDPLSMVYPSQGRSPSYAS

SEQ ID NO: 2164 - protein, 471 aa, Artificial Sequence
  Fusion Protein
HGEGTFTSDKSQLLEKRLAHLFIEWLIAGGHKKGKYPPKGGGGGGGSGGGGSGGGGSADKTHTCPPCPAPELLGGPSVFLFPPKPKDTLMISRTPEVTCVVVDVSHEDPEVKFNWYVDGVEVHNAKTKPREEQYNNASRVVSVLTVLHQDWLNGKEYKCKVSNKALPAPIEKTISKAKGQPREPQVYTLPPSRDELTKNQVSLTCLVKGFYPSDIAVEWESNGQPENNYKTTPPVLDSDGSFFLYSKLTVDKSRWQQGNVFSCSVMHEALHNHYTQKSLSLSPGGGGSGSAHPIPDSSPLLQFGGQVRQRYLYTDDACQTEAHLEIREDGTVGGAADQSPESLLQLKALKPGVIQILGVKTSRFLCQRPDGALYGSLHFDPEACSFRELLLEDGYNVYQSEAHGLPLHLCGNKSPHRDPAPRGPARFLPLPGLPPAPPEPPGILAPQPPDVGSSDPLSMVGSQGRSPSYAS

SEQ ID NO: 2165 - protein, 472 aa, Artificial Sequence
  Fusion Protein
HGEGTFTSDKSQLLEKRLAHLFIEWLIAGGHKKGKYPPKGGGGGGGSGGGGSGGGGSADKTHTCPPCPAPELLGGPSVFLFPPKPKDTLMISRTPEVTCVVVDVSHEDPEVKFNWYVDGVEVHNAKTKPREEQYNNASRVVSVLTVLHQDWLNGKEYKCKVSNKALPAPIEKTISKAKGQPREPQVYTLPPSRDELTKNQVSLTCLVKGFYPSDIAVEWESNGQPENNYKTTPPVLDSDGSFFLYSKLTVDKSRWQQGNVFSCSVMHEALHNHYTQKSLSLSPGGGGSGSAHPIPDSSPLLQFGGQVRQRYLYTDDACQTEAHLEIREDGTVGGAADQSPESLLQLKALKPGVIQILGVKTSRFLCQRPDGALYGSLHFDPEACSFRELLLEDGYNVYQSEAHGLPLHLCGNKSPHRDPAPRGPARFLPLPGLPPAPPEPPGILAPQPPDVGSSDPLSMVYPSQGRSPSYAS

SEQ ID NO: 2166 - protein, 474 aa, Artificial Sequence
  Fusion Protein
HGEGTFTSDKSQLLEKRLAHLFIEWLIAGGHKKGKYPPKGGGGGGGSGGGGSGGGGSAESKYGPPCPPCPAPEFEGGPSVFLFPPKPKDTLMISRTPEVTCVVVDVSQEDPEVQFNWYVDGVEVHNAKTKPREEQFNSTYRVVSVLTVLHQDWLNGKEYKCKVSNKGLPSSIEKTISKAKGQPREPQVYTLPPSQEEMTKNQVSLTCLVKGFYPSDIAVEWESNGQPENNYKTTPPVLDSDGSFFLYSRLTVDKSRWQEGNVFSCSVMHEALHNHYTQKSLSLSLGGGGSGSAHPIPDSSPLLQFGGQVRQRYLYTDDACQTEAHLEIREDGTVGGAADQSPESLLQLKALKPGVIQILGVKTSRFLCQRPDGALYGSLHFDPEACSFRELLLEDGYNVYQSEAHGLPLHLPGCKSPHRDPAPRGPARFLPLPGLPPAPPEPPGILAPQPPDVGSSDPLSMVYPSQGRSPSYAS

SEQ ID NO: 2167 - protein, 473 aa, Artificial Sequence
  Fusion Protein
HGEGTFTSDKSQLLEKRLAHLFIEWLIAGGHKKGKYPPKGGGGGGGSGGGGSGGGGSAESKYGPPCPPCPAPEFEGGPSVFLFPPKPKDTLMISRTPEVTCVVVDVSQEDPEVQFNWYVDGVEVHNAKTKPREEQFNSTYRVVSVLTVLHQDWLNGKEYKCKVSNKGLPSSIEKTISKAKGQPREPQVYTLPPSQEEMTKNQVSLTCLVKGFYPSDIAVEWESNGQPENNYKTTPPVLDSDGSFFLYSRLTVDKSRWQEGNVFSCSVMHEALHNHYTQKSLSLSLGGGGSGSAHPIPDSSPLLQFGGQVRQRYLYTDDACQTEAHLEIREDGTVGGAADQSPESLLQLKALKPGVIQILGVKTSRFLCQRPDGALYGSLHFDPEACSFRELLLEDGYNVYQSEAHGLPLHLCGNKSPHRDPAPRGPARFLPLPGLPPAPPEPPGILAPQPPDVGSSDPLSMVGSQGRSPSYAS

SEQ ID NO: 2168 - protein, 474 aa, Artificial Sequence
  Fusion Protein
HGEGTFTSDKSQLLEKRLAHLFIEWLIAGGHKKGKYPPKGGGGGGGSGGGGSGGGGSAESKYGPPCPPCPAPEFEGGPSVFLFPPKPKDTLMISRTPEVTCVVVDVSQEDPEVQFNWYVDGVEVHNAKTKPREEQFNSTYRVVSVLTVLHQDWLNGKEYKCKVSNKGLPSSIEKTISKAKGQPREPQVYTLPPSQEEMTKNQVSLTCLVKGFYPSDIAVEWESNGQPENNYKTTPPVLDSDGSFFLYSRLTVDKSRWQEGNVFSCSVMHEALHNHYTQKSLSLSLGGGGSGSAHPIPDSSPLLQFGGQVRQRYLYTDDACQTEAHLEIREDGTVGGAADQSPESLLQLKALKPGVIQILGVKTSRFLCQRPDGALYGSLHFDPEACSFRELLLEDGYNVYQSEAHGLPLHLCGNKSPHRDPAPRGPARFLPLPGLPPAPPEPPGILAPQPPDVGSSDPLSMVYPSQGRSPSYAS

SEQ ID NO: 2169 - protein, 471 aa, Artificial Sequence
  Fusion Protein
HGEGTFTSDKSQLLEKRLAHLFIEWLIAGGPSSGRYPPKGGGGGGGSGGGGSGGGGSADKTHTCPPCPAPEAAGGPSVFLFPPKPKDTLMISRTPEVTCVVVDVSHEDPEVKFNWYVDGVEVHNAKTKPREEQYNSTYRVVSVLTVLHQDWLNGKEYKCKVSNKALPAPIEKTISKAKGQPREPQVYTLPPSRDELTKNQVSLTCLVKGFYPSDIAVEWESNGQPENNYKTTPPVLDSDGSFFLYSKLTVDKSRWQQGNVFSCSVMHEALHNHYTQKSLSLSPGGGGSGSAHPIPDSSPLLQFGGQVRQRYLYTDDACQTEAHLEIREDGTVGGAADQSPESLLQLKALKPGVIQILGVKTSRFLCQRPDGALYGSLHFDPEACSFRELLLEDGYNVYQSEAHGLPLHLPGCKSPHRDPAPRGPARFLPLPGLPPAPPEPPGILAPQPPDVGSSDPLSMVGSQGRSPSYAS

SEQ ID NO: 2170 - protein, 472 aa, Artificial Sequence
  Fusion Protein
HGEGTFTSDKSQLLEKRLAHLFIEWLIAGGPSSGRYPPKGGGGGGGSGGGGSGGGGSADKTHTCPPCPAPEAAGGPSVFLFPPKPKDTLMISRTPEVTCVVVDVSHEDPEVKFNWYVDGVEVHNAKTKPREEQYNSTYRVVSVLTVLHQDWLNGKEYKCKVSNKALPAPIEKTISKAKGQPREPQVYTLPPSRDELTKNQVSLTCLVKGFYPSDIAVEWESNGQPENNYKTTPPVLDSDGSFFLYSKLTVDKSRWQQGNVFSCSVMHEALHNHYTQKSLSLSPGGGGSGSAHPIPDSSPLLQFGGQVRQRYLYTDDACQTEAHLEIREDGTVGGAADQSPESLLQLKALKPGVIQILGVKTSRFLCQRPDGALYGSLHFDPEACSFRELLLEDGYNVYQSEAHGLPLHLPGCKSPHRDPAPRGPARFLPLPGLPPAPPEPPGILAPQPPDVGSSDPLSMVYPSQGRSPSYAS

SEQ ID NO: 2171 - protein, 471 aa, Artificial Sequence
  Fusion Protein
HGEGTFTSDKSQLLEKRLAHLFIEWLIAGGPSSGRYPPKGGGGGGGSGGGGSGGGGSADKTHTCPPCPAPEAAGGPSVFLFPPKPKDTLMISRTPEVTCVVVDVSHEDPEVKFNWYVDGVEVHNAKTKPREEQYNSTYRVVSVLTVLHQDWLNGKEYKCKVSNKALPAPIEKTISKAKGQPREPQVYTLPPSRDELTKNQVSLTCLVKGFYPSDIAVEWESNGQPENNYKTTPPVLDSDGSFFLYSKLTVDKSRWQQGNVFSCSVMHEALHNHYTQKSLSLSPGGGGSGSAHPIPDSSPLLQFGGQVRQRYLYTDDACQTEAHLEIREDGTVGGAADQSPESLLQLKALKPGVIQILGVKTSRFLCQRPDGALYGSLHFDPEACSFRELLLEDGYNVYQSEAHGLPLHLCGNKSPHRDPAPRGPARFLPLPGLPPAPPEPPGILAPQPPDVGSSDPLSMVGSQGRSPSYAS

SEQ ID NO: 2172 - protein, 472 aa, Artificial Sequence
  Fusion Protein
HGEGTFTSDKSQLLEKRLAHLFIEWLIAGGPSSGRYPPKGGGGGGGSGGGGSGGGGSADKTHTCPPCPAPEAAGGPSVFLFPPKPKDTLMISRTPEVTCVVVDVSHEDPEVKFNWYVDGVEVHNAKTKPREEQYNSTYRVVSVLTVLHQDWLNGKEYKCKVSNKALPAPIEKTISKAKGQPREPQVYTLPPSRDELTKNQVSLTCLVKGFYPSDIAVEWESNGQPENNYKTTPPVLDSDGSFFLYSKLTVDKSRWQQGNVFSCSVMHEALHNHYTQKSLSLSPGGGGSGSAHPIPDSSPLLQFGGQVRQRYLYTDDACQTEAHLEIREDGTVGGAADQSPESLLQLKALKPGVIQILGVKTSRFLCQRPDGALYGSLHFDPEACSFRELLLEDGYNVYQSEAHGLPLHLCGNKSPHRDPAPRGPARFLPLPGLPPAPPEPPGILAPQPPDVGSSDPLSMVYPSQGRSPSYAS

SEQ ID NO: 2173 - protein, 471 aa, Artificial Sequence
  Fusion Protein
HGEGTFTSDKSQLLEKRLAHLFIEWLIAGGPSSGRYPPKGGGGGGGSGGGGSGGGGSADKTHTCPPCPAPELLGGPSVFLFPPKPKDTLMISRTPEVTCVVVDVSHEDPEVKFNWYVDGVEVHNAKTKPREEQYNNASRVVSVLTVLHQDWLNGKEYKCKVSNKALPAPIEKTISKAKGQPREPQVYTLPPSRDELTKNQVSLTCLVKGFYPSDIAVEWESNGQPENNYKTTPPVLDSDGSFFLYSKLTVDKSRWQQGNVFSCSVMHEALHNHYTQKSLSLSPGGGGSGSAHPIPDSSPLLQFGGQVRQRYLYTDDACQTEAHLEIREDGTVGGAADQSPESLLQLKALKPGVIQILGVKTSRFLCQRPDGALYGSLHFDPEACSFRELLLEDGYNVYQSEAHGLPLHLPGCKSPHRDPAPRGPARFLPLPGLPPAPPEPPGILAPQPPDVGSSDPLSMVGSQGRSPSYAS

SEQ ID NO: 2174 - protein, 472 aa, Artificial Sequence
  Fusion Protein
HGEGTFTSDKSQLLEKRLAHLFIEWLIAGGPSSGRYPPKGGGGGGGSGGGGSGGGGSADKTHTCPPCPAPELLGGPSVFLFPPKPKDTLMISRTPEVTCVVVDVSHEDPEVKFNWYVDGVEVHNAKTKPREEQYNNASRVVSVLTVLHQDWLNGKEYKCKVSNKALPAPIEKTISKAKGQPREPQVYTLPPSRDELTKNQVSLTCLVKGFYPSDIAVEWESNGQPENNYKTTPPVLDSDGSFFLYSKLTVDKSRWQQGNVFSCSVMHEALHNHYTQKSLSLSPGGGGSGSAHPIPDSSPLLQFGGQVRQRYLYTDDACQTEAHLEIREDGTVGGAADQSPESLLQLKALKPGVIQILGVKTSRFLCQRPDGALYGSLHFDPEACSFRELLLEDGYNVYQSEAHGLPLHLPGCKSPHRDPAPRGPARFLPLPGLPPAPPEPPGILAPQPPDVGSSDPLSMVYPSQGRSPSYAS

SEQ ID NO: 2175 - protein, 471 aa, Artificial Sequence
  Fusion Protein
HGEGTFTSDKSQLLEKRLAHLFIEWLIAGGPSSGRYPPKGGGGGGGSGGGGSGGGGSADKTHTCPPCPAPELLGGPSVFLFPPKPKDTLMISRTPEVTCVVVDVSHEDPEVKFNWYVDGVEVHNAKTKPREEQYNNASRVVSVLTVLHQDWLNGKEYKCKVSNKALPAPIEKTISKAKGQPREPQVYTLPPSRDELTKNQVSLTCLVKGFYPSDIAVEWESNGQPENNYKTTPPVLDSDGSFFLYSKLTVDKSRWQQGNVFSCSVMHEALHNHYTQKSLSLSPGGGGSGSAHPIPDSSPLLQFGGQVRQRYLYTDDACQTEAHLEIREDGTVGGAADQSPESLLQLKALKPGVIQILGVKTSRFLCQRPDGALYGSLHFDPEACSFRELLLEDGYNVYQSEAHGLPLHLCGNKSPHRDPAPRGPARFLPLPGLPPAPPEPPGILAPQPPDVGSSDPLSMVGSQGRSPSYAS

SEQ ID NO: 2176 - protein, 472 aa, Artificial Sequence
  Fusion Protein
HGEGTFTSDKSQLLEKRLAHLFIEWLIAGGPSSGRYPPKGGGGGGGSGGGGSGGGGSADKTHTCPPCPAPELLGGPSVFLFPPKPKDTLMISRTPEVTCVVVDVSHEDPEVKFNWYVDGVEVHNAKTKPREEQYNNASRVVSVLTVLHQDWLNGKEYKCKVSNKALPAPIEKTISKAKGQPREPQVYTLPPSRDELTKNQVSLTCLVKGFYPSDIAVEWESNGQPENNYKTTPPVLDSDGSFFLYSKLTVDKSRWQQGNVFSCSVMHEALHNHYTQKSLSLSPGGGGSGSAHPIPDSSPLLQFGGQVRQRYLYTDDACQTEAHLEIREDGTVGGAADQSPESLLQLKALKPGVIQILGVKTSRFLCQRPDGALYGSLHFDPEACSFRELLLEDGYNVYQSEAHGLPLHLCGNKSPHRDPAPRGPARFLPLPGLPPAPPEPPGILAPQPPDVGSSDPLSMVYPSQGRSPSYAS

SEQ ID NO: 2177 - protein, 474 aa, Artificial Sequence
  Fusion Protein
HGEGTFTSDKSQLLEKRLAHLFIEWLIAGGPSSGRYPPKGGGGGGGSGGGGSGGGGSAESKYGPPCPPCPAPEFEGGPSVFLFPPKPKDTLMISRTPEVTCVVVDVSQEDPEVQFNWYVDGVEVHNAKTKPREEQFNSTYRVVSVLTVLHQDWLNGKEYKCKVSNKGLPSSIEKTISKAKGQPREPQVYTLPPSQEEMTKNQVSLTCLVKGFYPSDIAVEWESNGQPENNYKTTPPVLDSDGSFFLYSRLTVDKSRWQEGNVFSCSVMHEALHNHYTQKSLSLSLGGGGSGSAHPIPDSSPLLQFGGQVRQRYLYTDDACQTEAHLEIREDGTVGGAADQSPESLLQLKALKPGVIQILGVKTSRFLCQRPDGALYGSLHFDPEACSFRELLLEDGYNVYQSEAHGLPLHLPGCKSPHRDPAPRGPARFLPLPGLPPAPPEPPGILAPQPPDVGSSDPLSMVYPSQGRSPSYAS

SEQ ID NO: 2178 - protein, 473 aa, Artificial Sequence
  Fusion Protein
HGEGTFTSDKSQLLEKRLAHLFIEWLIAGGPSSGRYPPKGGGGGGGSGGGGSGGGGSAESKYGPPCPPCPAPEFEGGPSVFLFPPKPKDTLMISRTPEVTCVVVDVSQEDPEVQFNWYVDGVEVHNAKTKPREEQFNSTYRVVSVLTVLHQDWLNGKEYKCKVSNKGLPSSIEKTISKAKGQPREPQVYTLPPSQEEMTKNQVSLTCLVKGFYPSDIAVEWESNGQPENNYKTTPPVLDSDGSFFLYSRLTVDKSRWQEGNVFSCSVMHEALHNHYTQKSLSLSLGGGGSGSAHPIPDSSPLLQFGGQVRQRYLYTDDACQTEAHLEIREDGTVGGAADQSPESLLQLKALKPGVIQILGVKTSRFLCQRPDGALYGSLHFDPEACSFRELLLEDGYNVYQSEAHGLPLHLCGNKSPHRDPAPRGPARFLPLPGLPPAPPEPPGILAPQPPDVGSSDPLSMVGSQGRSPSYAS

SEQ ID NO: 2179 - protein, 474 aa, Artificial Sequence
  Fusion Protein
HGEGTFTSDKSQLLEKRLAHLFIEWLIAGGPSSGRYPPKGGGGGGGSGGGGSGGGGSAESKYGPPCPPCPAPEFEGGPSVFLFPPKPKDTLMISRTPEVTCVVVDVSQEDPEVQFNWYVDGVEVHNAKTKPREEQFNSTYRVVSVLTVLHQDWLNGKEYKCKVSNKGLPSSIEKTISKAKGQPREPQVYTLPPSQEEMTKNQVSLTCLVKGFYPSDIAVEWESNGQPENNYKTTPPVLDSDGSFFLYSRLTVDKSRWQEGNVFSCSVMHEALHNHYTQKSLSLSLGGGGSGSAHPIPDSSPLLQFGGQVRQRYLYTDDACQTEAHLEIREDGTVGGAADQSPESLLQLKALKPGVIQILGVKTSRFLCQRPDGALYGSLHFDPEACSFRELLLEDGYNVYQSEAHGLPLHLCGNKSPHRDPAPRGPARFLPLPGLPPAPPEPPGILAPQPPDVGSSDPLSMVYPSQGRSPSYAS

SEQ ID NO: 2180 - protein, 471 aa, Artificial Sequence
  Fusion Protein
HGEGTFTSDLSKQLEEEAVQLFIEWLLATGPSSGKPPPKGGGGGGGSGGGGSGGGGSADKTHTCPPCPAPEAAGGPSVFLFPPKPKDTLMISRTPEVTCVVVDVSHEDPEVKFNWYVDGVEVHNAKTKPREEQYNSTYRVVSVLTVLHQDWLNGKEYKCKVSNKALPAPIEKTISKAKGQPREPQVYTLPPSRDELTKNQVSLTCLVKGFYPSDIAVEWESNGQPENNYKTTPPVLDSDGSFFLYSKLTVDKSRWQQGNVFSCSVMHEALHNHYTQKSLSLSPGGGGSGSAHPIPDSSPLLQFGGQVRQRYLYTDDACQTEAHLEIREDGTVGGAADQSPESLLQLKALKPGVIQILGVKTSRFLCQRPDGALYGSLHFDPEACSFRELLLEDGYNVYQSEAHGLPLHLPGCKSPHRDPAPRGPARFLPLPGLPPAPPEPPGILAPQPPDVGSSDPLSMVGSQGRSPSYAS

SEQ ID NO: 2181 - protein, 472 aa, Artificial Sequence
  Fusion Protein
HGEGTFTSDLSKQLEEEAVQLFIEWLLATGPSSGKPPPKGGGGGGGSGGGGSGGGGSADKTHTCPPCPAPEAAGGPSVFLFPPKPKDTLMISRTPEVTCVVVDVSHEDPEVKFNWYVDGVEVHNAKTKPREEQYNSTYRVVSVLTVLHQDWLNGKEYKCKVSNKALPAPIEKTISKAKGQPREPQVYTLPPSRDELTKNQVSLTCLVKGFYPSDIAVEWESNGQPENNYKTTPPVLDSDGSFFLYSKLTVDKSRWQQGNVFSCSVMHEALHNHYTQKSLSLSPGGGGSGSAHPIPDSSPLLQFGGQVRQRYLYTDDACQTEAHLEIREDGTVGGAADQSPESLLQLKALKPGVIQILGVKTSRFLCQRPDGALYGSLHFDPEACSFRELLLEDGYNVYQSEAHGLPLHLPGCKSPHRDPAPRGPARFLPLPGLPPAPPEPPGILAPQPPDVGSSDPLSMVYPSQGRSPSYAS

SEQ ID NO: 2182 - protein, 471 aa, Artificial Sequence
  Fusion Protein
HGEGTFTSDLSKQLEEEAVQLFIEWLLATGPSSGKPPPKGGGGGGGSGGGGSGGGGSADKTHTCPPCPAPEAAGGPSVFLFPPKPKDTLMISRTPEVTCVVVDVSHEDPEVKFNWYVDGVEVHNAKTKPREEQYNSTYRVVSVLTVLHQDWLNGKEYKCKVSNKALPAPIEKTISKAKGQPREPQVYTLPPSRDELTKNQVSLTCLVKGFYPSDIAVEWESNGQPENNYKTTPPVLDSDGSFFLYSKLTVDKSRWQQGNVFSCSVMHEALHNHYTQKSLSLSPGGGGSGSAHPIPDSSPLLQFGGQVRQRYLYTDDACQTEAHLEIREDGTVGGAADQSPESLLQLKALKPGVIQILGVKTSRFLCQRPDGALYGSLHFDPEACSFRELLLEDGYNVYQSEAHGLPLHLCGNKSPHRDPAPRGPARFLPLPGLPPAPPEPPGILAPQPPDVGSSDPLSMVGSQGRSPSYAS

SEQ ID NO: 2183 - protein, 472 aa, Artificial Sequence
  Fusion Protein
HGEGTFTSDLSKQLEEEAVQLFIEWLLATGPSSGKPPPKGGGGGGGSGGGGSGGGGSADKTHTCPPCPAPEAAGGPSVFLFPPKPKDTLMISRTPEVTCVVVDVSHEDPEVKFNWYVDGVEVHNAKTKPREEQYNSTYRVVSVLTVLHQDWLNGKEYKCKVSNKALPAPIEKTISKAKGQPREPQVYTLPPSRDELTKNQVSLTCLVKGFYPSDIAVEWESNGQPENNYKTTPPVLDSDGSFFLYSKLTVDKSRWQQGNVFSCSVMHEALHNHYTQKSLSLSPGGGGSGSAHPIPDSSPLLQFGGQVRQRYLYTDDACQTEAHLEIREDGTVGGAADQSPESLLQLKALKPGVIQILGVKTSRFLCQRPDGALYGSLHFDPEACSFRELLLEDGYNVYQSEAHGLPLHLCGNKSPHRDPAPRGPARFLPLPGLPPAPPEPPGILAPQPPDVGSSDPLSMVYPSQGRSPSYAS

SEQ ID NO: 2184 - protein, 471 aa, Artificial Sequence
  Fusion Protein
HGEGTFTSDLSKQLEEEAVQLFIEWLLATGPSSGKPPPKGGGGGGGSGGGGSGGGGSADKTHTCPPCPAPELLGGPSVFLFPPKPKDTLMISRTPEVTCVVVDVSHEDPEVKFNWYVDGVEVHNAKTKPREEQYNNASRVVSVLTVLHQDWLNGKEYKCKVSNKALPAPIEKTISKAKGQPREPQVYTLPPSRDELTKNQVSLTCLVKGFYPSDIAVEWESNGQPENNYKTTPPVLDSDGSFFLYSKLTVDKSRWQQGNVFSCSVMHEALHNHYTQKSLSLSPGGGGSGSAHPIPDSSPLLQFGGQVRQRYLYTDDACQTEAHLEIREDGTVGGAADQSPESLLQLKALKPGVIQILGVKTSRFLCQRPDGALYGSLHFDPEACSFRELLLEDGYNVYQSEAHGLPLHLPGCKSPHRDPAPRGPARFLPLPGLPPAPPEPPGILAPQPPDVGSSDPLSMVGSQGRSPSYAS

SEQ ID NO: 2185 - protein, 472 aa, Artificial Sequence
  Fusion Protein
HGEGTFTSDLSKQLEEEAVQLFIEWLLATGPSSGKPPPKGGGGGGGSGGGGSGGGGSADKTHTCPPCPAPELLGGPSVFLFPPKPKDTLMISRTPEVTCVVVDVSHEDPEVKFNWYVDGVEVHNAKTKPREEQYNNASRVVSVLTVLHQDWLNGKEYKCKVSNKALPAPIEKTISKAKGQPREPQVYTLPPSRDELTKNQVSLTCLVKGFYPSDIAVEWESNGQPENNYKTTPPVLDSDGSFFLYSKLTVDKSRWQQGNVFSCSVMHEALHNHYTQKSLSLSPGGGGSGSAHPIPDSSPLLQFGGQVRQRYLYTDDACQTEAHLEIREDGTVGGAADQSPESLLQLKALKPGVIQILGVKTSRFLCQRPDGALYGSLHFDPEACSFRELLLEDGYNVYQSEAHGLPLHLPGCKSPHRDPAPRGPARFLPLPGLPPAPPEPPGILAPQPPDVGSSDPLSMVYPSQGRSPSYAS

SEQ ID NO: 2186 - protein, 471 aa, Artificial Sequence
  Fusion Protein
HGEGTFTSDLSKQLEEEAVQLFIEWLLATGPSSGKPPPKGGGGGGGSGGGGSGGGGSADKTHTCPPCPAPELLGGPSVFLFPPKPKDTLMISRTPEVTCVVVDVSHEDPEVKFNWYVDGVEVHNAKTKPREEQYNNASRVVSVLTVLHQDWLNGKEYKCKVSNKALPAPIEKTISKAKGQPREPQVYTLPPSRDELTKNQVSLTCLVKGFYPSDIAVEWESNGQPENNYKTTPPVLDSDGSFFLYSKLTVDKSRWQQGNVFSCSVMHEALHNHYTQKSLSLSPGGGGSGSAHPIPDSSPLLQFGGQVRQRYLYTDDACQTEAHLEIREDGTVGGAADQSPESLLQLKALKPGVIQILGVKTSRFLCQRPDGALYGSLHFDPEACSFRELLLEDGYNVYQSEAHGLPLHLCGNKSPHRDPAPRGPARFLPLPGLPPAPPEPPGILAPQPPDVGSSDPLSMVGSQGRSPSYAS

SEQ ID NO: 2187 - protein, 472 aa, Artificial Sequence
  Fusion Protein
HGEGTFTSDLSKQLEEEAVQLFIEWLLATGPSSGKPPPKGGGGGGGSGGGGSGGGGSADKTHTCPPCPAPELLGGPSVFLFPPKPKDTLMISRTPEVTCVVVDVSHEDPEVKFNWYVDGVEVHNAKTKPREEQYNNASRVVSVLTVLHQDWLNGKEYKCKVSNKALPAPIEKTISKAKGQPREPQVYTLPPSRDELTKNQVSLTCLVKGFYPSDIAVEWESNGQPENNYKTTPPVLDSDGSFFLYSKLTVDKSRWQQGNVFSCSVMHEALHNHYTQKSLSLSPGGGGSGSAHPIPDSSPLLQFGGQVRQRYLYTDDACQTEAHLEIREDGTVGGAADQSPESLLQLKALKPGVIQILGVKTSRFLCQRPDGALYGSLHFDPEACSFRELLLEDGYNVYQSEAHGLPLHLCGNKSPHRDPAPRGPARFLPLPGLPPAPPEPPGILAPQPPDVGSSDPLSMVYPSQGRSPSYAS

SEQ ID NO: 2188 - protein, 473 aa, Artificial Sequence
  Fusion Protein
HGEGTFTSDLSKQLEEEAVQLFIEWLLATGPSSGKPPPKGGGGGGGSGGGGSGGGGSAESKYGPPCPPCPAPEFEGGPSVFLFPPKPKDTLMISRTPEVTCVVVDVSQEDPEVQFNWYVDGVEVHNAKTKPREEQFNSTYRVVSVLTVLHQDWLNGKEYKCKVSNKGLPSSIEKTISKAKGQPREPQVYTLPPSQEEMTKNQVSLTCLVKGFYPSDIAVEWESNGQPENNYKTTPPVLDSDGSFFLYSRLTVDKSRWQEGNVFSCSVMHEALHNHYTQKSLSLSLGGGGSGSAHPIPDSSPLLQFGGQVRQRYLYTDDACQTEAHLEIREDGTVGGAADQSPESLLQLKALKPGVIQILGVKTSRFLCQRPDGALYGSLHFDPEACSFRELLLEDGYNVYQSEAHGLPLHLPGCKSPHRDPAPRGPARFLPLPGLPPAPPEPPGILAPQPPDVGSSDPLSMVGSQGRSPSYAS

SEQ ID NO: 2189 - protein, 473 aa, Artificial Sequence
  Fusion Protein
HGEGTFTSDLSKQLEEEAVQLFIEWLLATGPSSGKPPPKGGGGGGGSGGGGSGGGGSAESKYGPPCPPCPAPEFEGGPSVFLFPPKPKDTLMISRTPEVTCVVVDVSQEDPEVQFNWYVDGVEVHNAKTKPREEQFNSTYRVVSVLTVLHQDWLNGKEYKCKVSNKGLPSSIEKTISKAKGQPREPQVYTLPPSQEEMTKNQVSLTCLVKGFYPSDIAVEWESNGQPENNYKTTPPVLDSDGSFFLYSRLTVDKSRWQEGNVFSCSVMHEALHNHYTQKSLSLSLGGGGSGSAHPIPDSSPLLQFGGQVRQRYLYTDDACQTEAHLEIREDGTVGGAADQSPESLLQLKALKPGVIQILGVKTSRFLCQRPDGALYGSLHFDPEACSFRELLLEDGYNVYQSEAHGLPLHLCGNKSPHRDPAPRGPARFLPLPGLPPAPPEPPGILAPQPPDVGSSDPLSMVGSQGRSPSYAS

SEQ ID NO: 2190 - protein, 474 aa, Artificial Sequence
  Fusion Protein
HGEGTFTSDLSKQLEEEAVQLFIEWLLATGPSSGKPPPKGGGGGGGSGGGGSGGGGSAESKYGPPCPPCPAPEFEGGPSVFLFPPKPKDTLMISRTPEVTCVVVDVSQEDPEVQFNWYVDGVEVHNAKTKPREEQFNSTYRVVSVLTVLHQDWLNGKEYKCKVSNKGLPSSIEKTISKAKGQPREPQVYTLPPSQEEMTKNQVSLTCLVKGFYPSDIAVEWESNGQPENNYKTTPPVLDSDGSFFLYSRLTVDKSRWQEGNVFSCSVMHEALHNHYTQKSLSLSLGGGGSGSAHPIPDSSPLLQFGGQVRQRYLYTDDACQTEAHLEIREDGTVGGAADQSPESLLQLKALKPGVIQILGVKTSRFLCQRPDGALYGSLHFDPEACSFRELLLEDGYNVYQSEAHGLPLHLCGNKSPHRDPAPRGPARFLPLPGLPPAPPEPPGILAPQPPDVGSSDPLSMVYPSQGRSPSYAS

SEQ ID NO: 2191 - protein, 471 aa, Artificial Sequence
  Fusion Protein
HGEGTFTSDKSQLLEKRLAHLFIEWLIAGGHSSIKPPPKGGGGGGGSGGGGSGGGGSADKTHTCPPCPAPEAAGGPSVFLFPPKPKDTLMISRTPEVTCVVVDVSHEDPEVKFNWYVDGVEVHNAKTKPREEQYNSTYRVVSVLTVLHQDWLNGKEYKCKVSNKALPAPIEKTISKAKGQPREPQVYTLPPSRDELTKNQVSLTCLVKGFYPSDIAVEWESNGQPENNYKTTPPVLDSDGSFFLYSKLTVDKSRWQQGNVFSCSVMHEALHNHYTQKSLSLSPGGGGSGSAHPIPDSSPLLQFGGQVRQRYLYTDDACQTEAHLEIREDGTVGGAADQSPESLLQLKALKPGVIQILGVKTSRFLCQRPDGALYGSLHFDPEACSFRELLLEDGYNVYQSEAHGLPLHLPGCKSPHRDPAPRGPARFLPLPGLPPAPPEPPGILAPQPPDVGSSDPLSMVGSQGRSPSYAS

SEQ ID NO: 2192 - protein, 472 aa, Artificial Sequence
  Fusion Protein
HGEGTFTSDKSQLLEKRLAHLFIEWLIAGGHSSIKPPPKGGGGGGGSGGGGSGGGGSADKTHTCPPCPAPEAAGGPSVFLFPPKPKDTLMISRTPEVTCVVVDVSHEDPEVKFNWYVDGVEVHNAKTKPREEQYNSTYRVVSVLTVLHQDWLNGKEYKCKVSNKALPAPIEKTISKAKGQPREPQVYTLPPSRDELTKNQVSLTCLVKGFYPSDIAVEWESNGQPENNYKTTPPVLDSDGSFFLYSKLTVDKSRWQQGNVFSCSVMHEALHNHYTQKSLSLSPGGGGSGSAHPIPDSSPLLQFGGQVRQRYLYTDDACQTEAHLEIREDGTVGGAADQSPESLLQLKALKPGVIQILGVKTSRFLCQRPDGALYGSLHFDPEACSFRELLLEDGYNVYQSEAHGLPLHLPGCKSPHRDPAPRGPARFLPLPGLPPAPPEPPGILAPQPPDVGSSDPLSMVYPSQGRSPSYAS

SEQ ID NO: 2193 - protein, 471 aa, Artificial Sequence
  Fusion Protein
HGEGTFTSDKSQLLEKRLAHLFIEWLIAGGHSSIKPPPKGGGGGGGSGGGGSGGGGSADKTHTCPPCPAPEAAGGPSVFLFPPKPKDTLMISRTPEVTCVVVDVSHEDPEVKFNWYVDGVEVHNAKTKPREEQYNSTYRVVSVLTVLHQDWLNGKEYKCKVSNKALPAPIEKTISKAKGQPREPQVYTLPPSRDELTKNQVSLTCLVKGFYPSDIAVEWESNGQPENNYKTTPPVLDSDGSFFLYSKLTVDKSRWQQGNVFSCSVMHEALHNHYTQKSLSLSPGGGGSGSAHPIPDSSPLLQFGGQVRQRYLYTDDACQTEAHLEIREDGTVGGAADQSPESLLQLKALKPGVIQILGVKTSRFLCQRPDGALYGSLHFDPEACSFRELLLEDGYNVYQSEAHGLPLHLCGNKSPHRDPAPRGPARFLPLPGLPPAPPEPPGILAPQPPDVGSSDPLSMVGSQGRSPSYAS

SEQ ID NO: 2194 - protein, 472 aa, Artificial Sequence
  Fusion Protein
HGEGTFTSDKSQLLEKRLAHLFIEWLIAGGHSSIKPPPKGGGGGGGSGGGGSGGGGSADKTHTCPPCPAPEAAGGPSVFLFPPKPKDTLMISRTPEVTCVVVDVSHEDPEVKFNWYVDGVEVHNAKTKPREEQYNSTYRVVSVLTVLHQDWLNGKEYKCKVSNKALPAPIEKTISKAKGQPREPQVYTLPPSRDELTKNQVSLTCLVKGFYPSDIAVEWESNGQPENNYKTTPPVLDSDGSFFLYSKLTVDKSRWQQGNVFSCSVMHEALHNHYTQKSLSLSPGGGGSGSAHPIPDSSPLLQFGGQVRQRYLYTDDACQTEAHLEIREDGTVGGAADQSPESLLQLKALKPGVIQILGVKTSRFLCQRPDGALYGSLHFDPEACSFRELLLEDGYNVYQSEAHGLPLHLCGNKSPHRDPAPRGPARFLPLPGLPPAPPEPPGILAPQPPDVGSSDPLSMVYPSQGRSPSYAS

SEQ ID NO: 2195 - protein, 471 aa, Artificial Sequence
  Fusion Protein
HGEGTFTSDKSQLLEKRLAHLFIEWLIAGGHSSIKPPPKGGGGGGGSGGGGSGGGGSADKTHTCPPCPAPELLGGPSVFLFPPKPKDTLMISRTPEVTCVVVDVSHEDPEVKFNWYVDGVEVHNAKTKPREEQYNNASRVVSVLTVLHQDWLNGKEYKCKVSNKALPAPIEKTISKAKGQPREPQVYTLPPSRDELTKNQVSLTCLVKGFYPSDIAVEWESNGQPENNYKTTPPVLDSDGSFFLYSKLTVDKSRWQQGNVFSCSVMHEALHNHYTQKSLSLSPGGGGSGSAHPIPDSSPLLQFGGQVRQRYLYTDDACQTEAHLEIREDGTVGGAADQSPESLLQLKALKPGVIQILGVKTSRFLCQRPDGALYGSLHFDPEACSFRELLLEDGYNVYQSEAHGLPLHLPGCKSPHRDPAPRGPARFLPLPGLPPAPPEPPGILAPQPPDVGSSDPLSMVGSQGRSPSYAS

SEQ ID NO: 2196 - protein, 472 aa, Artificial Sequence
  Fusion Protein
HGEGTFTSDKSQLLEKRLAHLFIEWLIAGGHSSIKPPPKGGGGGGGSGGGGSGGGGSADKTHTCPPCPAPELLGGPSVFLFPPKPKDTLMISRTPEVTCVVVDVSHEDPEVKFNWYVDGVEVHNAKTKPREEQYNNASRVVSVLTVLHQDWLNGKEYKCKVSNKALPAPIEKTISKAKGQPREPQVYTLPPSRDELTKNQVSLTCLVKGFYPSDIAVEWESNGQPENNYKTTPPVLDSDGSFFLYSKLTVDKSRWQQGNVFSCSVMHEALHNHYTQKSLSLSPGGGGSGSAHPIPDSSPLLQFGGQVRQRYLYTDDACQTEAHLEIREDGTVGGAADQSPESLLQLKALKPGVIQILGVKTSRFLCQRPDGALYGSLHFDPEACSFRELLLEDGYNVYQSEAHGLPLHLPGCKSPHRDPAPRGPARFLPLPGLPPAPPEPPGILAPQPPDVGSSDPLSMVYPSQGRSPSYAS

SEQ ID NO: 2197 - protein, 471 aa, Artificial Sequence
  Fusion Protein
HGEGTFTSDKSQLLEKRLAHLFIEWLIAGGHSSIKPPPKGGGGGGGSGGGGSGGGGSADKTHTCPPCPAPELLGGPSVFLFPPKPKDTLMISRTPEVTCVVVDVSHEDPEVKFNWYVDGVEVHNAKTKPREEQYNNASRVVSVLTVLHQDWLNGKEYKCKVSNKALPAPIEKTISKAKGQPREPQVYTLPPSRDELTKNQVSLTCLVKGFYPSDIAVEWESNGQPENNYKTTPPVLDSDGSFFLYSKLTVDKSRWQQGNVFSCSVMHEALHNHYTQKSLSLSPGGGGSGSAHPIPDSSPLLQFGGQVRQRYLYTDDACQTEAHLEIREDGTVGGAADQSPESLLQLKALKPGVIQILGVKTSRFLCQRPDGALYGSLHFDPEACSFRELLLEDGYNVYQSEAHGLPLHLCGNKSPHRDPAPRGPARFLPLPGLPPAPPEPPGILAPQPPDVGSSDPLSMVGSQGRSPSYAS

SEQ ID NO: 2198 - protein, 472 aa, Artificial Sequence
  Fusion Protein
HGEGTFTSDKSQLLEKRLAHLFIEWLIAGGHSSIKPPPKGGGGGGGSGGGGSGGGGSADKTHTCPPCPAPELLGGPSVFLFPPKPKDTLMISRTPEVTCVVVDVSHEDPEVKFNWYVDGVEVHNAKTKPREEQYNNASRVVSVLTVLHQDWLNGKEYKCKVSNKALPAPIEKTISKAKGQPREPQVYTLPPSRDELTKNQVSLTCLVKGFYPSDIAVEWESNGQPENNYKTTPPVLDSDGSFFLYSKLTVDKSRWQQGNVFSCSVMHEALHNHYTQKSLSLSPGGGGSGSAHPIPDSSPLLQFGGQVRQRYLYTDDACQTEAHLEIREDGTVGGAADQSPESLLQLKALKPGVIQILGVKTSRFLCQRPDGALYGSLHFDPEACSFRELLLEDGYNVYQSEAHGLPLHLCGNKSPHRDPAPRGPARFLPLPGLPPAPPEPPGILAPQPPDVGSSDPLSMVYPSQGRSPSYAS

SEQ ID NO: 2199 - protein, 474 aa, Artificial Sequence
  Fusion Protein
HGEGTFTSDKSQLLEKRLAHLFIEWLIAGGHSSIKPPPKGGGGGGGSGGGGSGGGGSAESKYGPPCPPCPAPEFEGGPSVFLFPPKPKDTLMISRTPEVTCVVVDVSQEDPEVQFNWYVDGVEVHNAKTKPREEQFNSTYRVVSVLTVLHQDWLNGKEYKCKVSNKGLPSSIEKTISKAKGQPREPQVYTLPPSQEEMTKNQVSLTCLVKGFYPSDIAVEWESNGQPENNYKTTPPVLDSDGSFFLYSRLTVDKSRWQEGNVFSCSVMHEALHNHYTQKSLSLSLGGGGSGSAHPIPDSSPLLQFGGQVRQRYLYTDDACQTEAHLEIREDGTVGGAADQSPESLLQLKALKPGVIQILGVKTSRFLCQRPDGALYGSLHFDPEACSFRELLLEDGYNVYQSEAHGLPLHLPGCKSPHRDPAPRGPARFLPLPGLPPAPPEPPGILAPQPPDVGSSDPLSMVYPSQGRSPSYAS

SEQ ID NO: 2200 - protein, 473 aa, Artificial Sequence
  Fusion Protein
HGEGTFTSDKSQLLEKRLAHLFIEWLIAGGHSSIKPPPKGGGGGGGSGGGGSGGGGSAESKYGPPCPPCPAPEFEGGPSVFLFPPKPKDTLMISRTPEVTCVVVDVSQEDPEVQFNWYVDGVEVHNAKTKPREEQFNSTYRVVSVLTVLHQDWLNGKEYKCKVSNKGLPSSIEKTISKAKGQPREPQVYTLPPSQEEMTKNQVSLTCLVKGFYPSDIAVEWESNGQPENNYKTTPPVLDSDGSFFLYSRLTVDKSRWQEGNVFSCSVMHEALHNHYTQKSLSLSLGGGGSGSAHPIPDSSPLLQFGGQVRQRYLYTDDACQTEAHLEIREDGTVGGAADQSPESLLQLKALKPGVIQILGVKTSRFLCQRPDGALYGSLHFDPEACSFRELLLEDGYNVYQSEAHGLPLHLCGNKSPHRDPAPRGPARFLPLPGLPPAPPEPPGILAPQPPDVGSSDPLSMVGSQGRSPSYAS

SEQ ID NO: 2201 - protein, 474 aa, Artificial Sequence
  Fusion Protein
HGEGTFTSDKSQLLEKRLAHLFIEWLIAGGHSSIKPPPKGGGGGGGSGGGGSGGGGSAESKYGPPCPPCPAPEFEGGPSVFLFPPKPKDTLMISRTPEVTCVVVDVSQEDPEVQFNWYVDGVEVHNAKTKPREEQFNSTYRVVSVLTVLHQDWLNGKEYKCKVSNKGLPSSIEKTISKAKGQPREPQVYTLPPSQEEMTKNQVSLTCLVKGFYPSDIAVEWESNGQPENNYKTTPPVLDSDGSFFLYSRLTVDKSRWQEGNVFSCSVMHEALHNHYTQKSLSLSLGGGGSGSAHPIPDSSPLLQFGGQVRQRYLYTDDACQTEAHLEIREDGTVGGAADQSPESLLQLKALKPGVIQILGVKTSRFLCQRPDGALYGSLHFDPEACSFRELLLEDGYNVYQSEAHGLPLHLCGNKSPHRDPAPRGPARFLPLPGLPPAPPEPPGILAPQPPDVGSSDPLSMVYPSQGRSPSYAS

SEQ ID NO: 2202 - protein, 471 aa, Artificial Sequence
  Fusion Protein
HGEGTFTSDKSKLLEKRLAHLFIEWLIKGGHSSIKPPPKGGGGGGGSGGGGSGGGGSADKTHTCPPCPAPEAAGGPSVFLFPPKPKDTLMISRTPEVTCVVVDVSHEDPEVKFNWYVDGVEVHNAKTKPREEQYNSTYRVVSVLTVLHQDWLNGKEYKCKVSNKALPAPIEKTISKAKGQPREPQVYTLPPSRDELTKNQVSLTCLVKGFYPSDIAVEWESNGQPENNYKTTPPVLDSDGSFFLYSKLTVDKSRWQQGNVFSCSVMHEALHNHYTQKSLSLSPGGGGSGSAHPIPDSSPLLQFGGQVRQRYLYTDDACQTEAHLEIREDGTVGGAADQSPESLLQLKALKPGVIQILGVKTSRFLCQRPDGALYGSLHFDPEACSFRELLLEDGYNVYQSEAHGLPLHLPGCKSPHRDPAPRGPARFLPLPGLPPAPPEPPGILAPQPPDVGSSDPLSMVGSQGRSPSYAS

SEQ ID NO: 2203 - protein, 472 aa, Artificial Sequence
  Fusion Protein
HGEGTFTSDKSKLLEKRLAHLFIEWLIKGGHSSIKPPPKGGGGGGGSGGGGSGGGGSADKTHTCPPCPAPEAAGGPSVFLFPPKPKDTLMISRTPEVTCVVVDVSHEDPEVKFNWYVDGVEVHNAKTKPREEQYNSTYRVVSVLTVLHQDWLNGKEYKCKVSNKALPAPIEKTISKAKGQPREPQVYTLPPSRDELTKNQVSLTCLVKGFYPSDIAVEWESNGQPENNYKTTPPVLDSDGSFFLYSKLTVDKSRWQQGNVFSCSVMHEALHNHYTQKSLSLSPGGGGSGSAHPIPDSSPLLQFGGQVRQRYLYTDDACQTEAHLEIREDGTVGGAADQSPESLLQLKALKPGVIQILGVKTSRFLCQRPDGALYGSLHFDPEACSFRELLLEDGYNVYQSEAHGLPLHLPGCKSPHRDPAPRGPARFLPLPGLPPAPPEPPGILAPQPPDVGSSDPLSMVYPSQGRSPSYAS

SEQ ID NO: 2204 - protein, 471 aa, Artificial Sequence
  Fusion Protein
HGEGTFTSDKSKLLEKRLAHLFIEWLIKGGHSSIKPPPKGGGGGGGSGGGGSGGGGSADKTHTCPPCPAPEAAGGPSVFLFPPKPKDTLMISRTPEVTCVVVDVSHEDPEVKFNWYVDGVEVHNAKTKPREEQYNSTYRVVSVLTVLHQDWLNGKEYKCKVSNKALPAPIEKTISKAKGQPREPQVYTLPPSRDELTKNQVSLTCLVKGFYPSDIAVEWESNGQPENNYKTTPPVLDSDGSFFLYSKLTVDKSRWQQGNVFSCSVMHEALHNHYTQKSLSLSPGGGGSGSAHPIPDSSPLLQFGGQVRQRYLYTDDACQTEAHLEIREDGTVGGAADQSPESLLQLKALKPGVIQILGVKTSRFLCQRPDGALYGSLHFDPEACSFRELLLEDGYNVYQSEAHGLPLHLCGNKSPHRDPAPRGPARFLPLPGLPPAPPEPPGILAPQPPDVGSSDPLSMVGSQGRSPSYAS

SEQ ID NO: 2205 - protein, 472 aa, Artificial Sequence
  Fusion Protein
HGEGTFTSDKSKLLEKRLAHLFIEWLIKGGHSSIKPPPKGGGGGGGSGGGGSGGGGSADKTHTCPPCPAPEAAGGPSVFLFPPKPKDTLMISRTPEVTCVVVDVSHEDPEVKFNWYVDGVEVHNAKTKPREEQYNSTYRVVSVLTVLHQDWLNGKEYKCKVSNKALPAPIEKTISKAKGQPREPQVYTLPPSRDELTKNQVSLTCLVKGFYPSDIAVEWESNGQPENNYKTTPPVLDSDGSFFLYSKLTVDKSRWQQGNVFSCSVMHEALHNHYTQKSLSLSPGGGGSGSAHPIPDSSPLLQFGGQVRQRYLYTDDACQTEAHLEIREDGTVGGAADQSPESLLQLKALKPGVIQILGVKTSRFLCQRPDGALYGSLHFDPEACSFRELLLEDGYNVYQSEAHGLPLHLCGNKSPHRDPAPRGPARFLPLPGLPPAPPEPPGILAPQPPDVGSSDPLSMVYPSQGRSPSYAS

SEQ ID NO: 2206 - protein, 471 aa, Artificial Sequence
  Fusion Protein
HGEGTFTSDKSKLLEKRLAHLFIEWLIKGGHSSIKPPPKGGGGGGGSGGGGSGGGGSADKTHTCPPCPAPELLGGPSVFLFPPKPKDTLMISRTPEVTCVVVDVSHEDPEVKFNWYVDGVEVHNAKTKPREEQYNNASRVVSVLTVLHQDWLNGKEYKCKVSNKALPAPIEKTISKAKGQPREPQVYTLPPSRDELTKNQVSLTCLVKGFYPSDIAVEWESNGQPENNYKTTPPVLDSDGSFFLYSKLTVDKSRWQQGNVFSCSVMHEALHNHYTQKSLSLSPGGGGSGSAHPIPDSSPLLQFGGQVRQRYLYTDDACQTEAHLEIREDGTVGGAADQSPESLLQLKALKPGVIQILGVKTSRFLCQRPDGALYGSLHFDPEACSFRELLLEDGYNVYQSEAHGLPLHLPGCKSPHRDPAPRGPARFLPLPGLPPAPPEPPGILAPQPPDVGSSDPLSMVGSQGRSPSYAS

SEQ ID NO: 2207 - protein, 472 aa, Artificial Sequence
  Fusion Protein
HGEGTFTSDKSKLLEKRLAHLFIEWLIKGGHSSIKPPPKGGGGGGGSGGGGSGGGGSADKTHTCPPCPAPELLGGPSVFLFPPKPKDTLMISRTPEVTCVVVDVSHEDPEVKFNWYVDGVEVHNAKTKPREEQYNNASRVVSVLTVLHQDWLNGKEYKCKVSNKALPAPIEKTISKAKGQPREPQVYTLPPSRDELTKNQVSLTCLVKGFYPSDIAVEWESNGQPENNYKTTPPVLDSDGSFFLYSKLTVDKSRWQQGNVFSCSVMHEALHNHYTQKSLSLSPGGGGSGSAHPIPDSSPLLQFGGQVRQRYLYTDDACQTEAHLEIREDGTVGGAADQSPESLLQLKALKPGVIQILGVKTSRFLCQRPDGALYGSLHFDPEACSFRELLLEDGYNVYQSEAHGLPLHLPGCKSPHRDPAPRGPARFLPLPGLPPAPPEPPGILAPQPPDVGSSDPLSMVYPSQGRSPSYAS

SEQ ID NO: 2208 - protein, 471 aa, Artificial Sequence
  Fusion Protein
HGEGTFTSDKSKLLEKRLAHLFIEWLIKGGHSSIKPPPKGGGGGGGSGGGGSGGGGSADKTHTCPPCPAPELLGGPSVFLFPPKPKDTLMISRTPEVTCVVVDVSHEDPEVKFNWYVDGVEVHNAKTKPREEQYNNASRVVSVLTVLHQDWLNGKEYKCKVSNKALPAPIEKTISKAKGQPREPQVYTLPPSRDELTKNQVSLTCLVKGFYPSDIAVEWESNGQPENNYKTTPPVLDSDGSFFLYSKLTVDKSRWQQGNVFSCSVMHEALHNHYTQKSLSLSPGGGGSGSAHPIPDSSPLLQFGGQVRQRYLYTDDACQTEAHLEIREDGTVGGAADQSPESLLQLKALKPGVIQILGVKTSRFLCQRPDGALYGSLHFDPEACSFRELLLEDGYNVYQSEAHGLPLHLCGNKSPHRDPAPRGPARFLPLPGLPPAPPEPPGILAPQPPDVGSSDPLSMVGSQGRSPSYAS

SEQ ID NO: 2209 - protein, 472 aa, Artificial Sequence
  Fusion Protein
HGEGTFTSDKSKLLEKRLAHLFIEWLIKGGHSSIKPPPKGGGGGGGSGGGGSGGGGSADKTHTCPPCPAPELLGGPSVFLFPPKPKDTLMISRTPEVTCVVVDVSHEDPEVKFNWYVDGVEVHNAKTKPREEQYNNASRVVSVLTVLHQDWLNGKEYKCKVSNKALPAPIEKTISKAKGQPREPQVYTLPPSRDELTKNQVSLTCLVKGFYPSDIAVEWESNGQPENNYKTTPPVLDSDGSFFLYSKLTVDKSRWQQGNVFSCSVMHEALHNHYTQKSLSLSPGGGGSGSAHPIPDSSPLLQFGGQVRQRYLYTDDACQTEAHLEIREDGTVGGAADQSPESLLQLKALKPGVIQILGVKTSRFLCQRPDGALYGSLHFDPEACSFRELLLEDGYNVYQSEAHGLPLHLCGNKSPHRDPAPRGPARFLPLPGLPPAPPEPPGILAPQPPDVGSSDPLSMVYPSQGRSPSYAS

SEQ ID NO: 2210 - protein, 474 aa, Artificial Sequence
  Fusion Protein
HGEGTFTSDKSKLLEKRLAHLFIEWLIKGGHSSIKPPPKGGGGGGGSGGGGSGGGGSAESKYGPPCPPCPAPEFEGGPSVFLFPPKPKDTLMISRTPEVTCVVVDVSQEDPEVQFNWYVDGVEVHNAKTKPREEQFNSTYRVVSVLTVLHQDWLNGKEYKCKVSNKGLPSSIEKTISKAKGQPREPQVYTLPPSQEEMTKNQVSLTCLVKGFYPSDIAVEWESNGQPENNYKTTPPVLDSDGSFFLYSRLTVDKSRWQEGNVFSCSVMHEALHNHYTQKSLSLSLGGGGSGSAHPIPDSSPLLQFGGQVRQRYLYTDDACQTEAHLEIREDGTVGGAADQSPESLLQLKALKPGVIQILGVKTSRFLCQRPDGALYGSLHFDPEACSFRELLLEDGYNVYQSEAHGLPLHLPGCKSPHRDPAPRGPARFLPLPGLPPAPPEPPGILAPQPPDVGSSDPLSMVYPSQGRSPSYAS

SEQ ID NO: 2211 - protein, 473 aa, Artificial Sequence
  Fusion Protein
HGEGTFTSDKSKLLEKRLAHLFIEWLIKGGHSSIKPPPKGGGGGGGSGGGGSGGGGSAESKYGPPCPPCPAPEFEGGPSVFLFPPKPKDTLMISRTPEVTCVVVDVSQEDPEVQFNWYVDGVEVHNAKTKPREEQFNSTYRVVSVLTVLHQDWLNGKEYKCKVSNKGLPSSIEKTISKAKGQPREPQVYTLPPSQEEMTKNQVSLTCLVKGFYPSDIAVEWESNGQPENNYKTTPPVLDSDGSFFLYSRLTVDKSRWQEGNVFSCSVMHEALHNHYTQKSLSLSLGGGGSGSAHPIPDSSPLLQFGGQVRQRYLYTDDACQTEAHLEIREDGTVGGAADQSPESLLQLKALKPGVIQILGVKTSRFLCQRPDGALYGSLHFDPEACSFRELLLEDGYNVYQSEAHGLPLHLCGNKSPHRDPAPRGPARFLPLPGLPPAPPEPPGILAPQPPDVGSSDPLSMVGSQGRSPSYAS

SEQ ID NO: 2212 - protein, 474 aa, Artificial Sequence
  Fusion Protein
HGEGTFTSDKSKLLEKRLAHLFIEWLIKGGHSSIKPPPKGGGGGGGSGGGGSGGGGSAESKYGPPCPPCPAPEFEGGPSVFLFPPKPKDTLMISRTPEVTCVVVDVSQEDPEVQFNWYVDGVEVHNAKTKPREEQFNSTYRVVSVLTVLHQDWLNGKEYKCKVSNKGLPSSIEKTISKAKGQPREPQVYTLPPSQEEMTKNQVSLTCLVKGFYPSDIAVEWESNGQPENNYKTTPPVLDSDGSFFLYSRLTVDKSRWQEGNVFSCSVMHEALHNHYTQKSLSLSLGGGGSGSAHPIPDSSPLLQFGGQVRQRYLYTDDACQTEAHLEIREDGTVGGAADQSPESLLQLKALKPGVIQILGVKTSRFLCQRPDGALYGSLHFDPEACSFRELLLEDGYNVYQSEAHGLPLHLCGNKSPHRDPAPRGPARFLPLPGLPPAPPEPPGILAPQPPDVGSSDPLSMVYPSQGRSPSYAS

SEQ ID NO: 2213 - protein, 471 aa, Artificial Sequence
  Fusion Protein
HGEGTFTSDKSKLLEKRLAHLFIEWLIAGGHSKGKPPPKGGGGGGGSGGGGSGGGGSADKTHTCPPCPAPEAAGGPSVFLFPPKPKDTLMISRTPEVTCVVVDVSHEDPEVKFNWYVDGVEVHNAKTKPREEQYNSTYRVVSVLTVLHQDWLNGKEYKCKVSNKALPAPIEKTISKAKGQPREPQVYTLPPSRDELTKNQVSLTCLVKGFYPSDIAVEWESNGQPENNYKTTPPVLDSDGSFFLYSKLTVDKSRWQQGNVFSCSVMHEALHNHYTQKSLSLSPGGGGSGSAHPIPDSSPLLQFGGQVRQRYLYTDDACQTEAHLEIREDGTVGGAADQSPESLLQLKALKPGVIQILGVKTSRFLCQRPDGALYGSLHFDPEACSFRELLLEDGYNVYQSEAHGLPLHLPGCKSPHRDPAPRGPARFLPLPGLPPAPPEPPGILAPQPPDVGSSDPLSMVGSQGRSPSYAS

SEQ ID NO: 2214 - protein, 472 aa, Artificial Sequence
  Fusion Protein
HGEGTFTSDKSKLLEKRLAHLFIEWLIAGGHSKGKPPPKGGGGGGGSGGGGSGGGGSADKTHTCPPCPAPEAAGGPSVFLFPPKPKDTLMISRTPEVTCVVVDVSHEDPEVKFNWYVDGVEVHNAKTKPREEQYNSTYRVVSVLTVLHQDWLNGKEYKCKVSNKALPAPIEKTISKAKGQPREPQVYTLPPSRDELTKNQVSLTCLVKGFYPSDIAVEWESNGQPENNYKTTPPVLDSDGSFFLYSKLTVDKSRWQQGNVFSCSVMHEALHNHYTQKSLSLSPGGGGSGSAHPIPDSSPLLQFGGQVRQRYLYTDDACQTEAHLEIREDGTVGGAADQSPESLLQLKALKPGVIQILGVKTSRFLCQRPDGALYGSLHFDPEACSFRELLLEDGYNVYQSEAHGLPLHLPGCKSPHRDPAPRGPARFLPLPGLPPAPPEPPGILAPQPPDVGSSDPLSMVYPSQGRSPSYAS

SEQ ID NO: 2215 - protein, 471 aa, Artificial Sequence
  Fusion Protein
HGEGTFTSDKSKLLEKRLAHLFIEWLIAGGHSKGKPPPKGGGGGGGSGGGGSGGGGSADKTHTCPPCPAPEAAGGPSVFLFPPKPKDTLMISRTPEVTCVVVDVSHEDPEVKFNWYVDGVEVHNAKTKPREEQYNSTYRVVSVLTVLHQDWLNGKEYKCKVSNKALPAPIEKTISKAKGQPREPQVYTLPPSRDELTKNQVSLTCLVKGFYPSDIAVEWESNGQPENNYKTTPPVLDSDGSFFLYSKLTVDKSRWQQGNVFSCSVMHEALHNHYTQKSLSLSPGGGGSGSAHPIPDSSPLLQFGGQVRQRYLYTDDACQTEAHLEIREDGTVGGAADQSPESLLQLKALKPGVIQILGVKTSRFLCQRPDGALYGSLHFDPEACSFRELLLEDGYNVYQSEAHGLPLHLCGNKSPHRDPAPRGPARFLPLPGLPPAPPEPPGILAPQPPDVGSSDPLSMVGSQGRSPSYAS

SEQ ID NO: 2216 - protein, 472 aa, Artificial Sequence
  Fusion Protein
HGEGTFTSDKSKLLEKRLAHLFIEWLIAGGHSKGKPPPKGGGGGGGSGGGGSGGGGSADKTHTCPPCPAPEAAGGPSVFLFPPKPKDTLMISRTPEVTCVVVDVSHEDPEVKFNWYVDGVEVHNAKTKPREEQYNSTYRVVSVLTVLHQDWLNGKEYKCKVSNKALPAPIEKTISKAKGQPREPQVYTLPPSRDELTKNQVSLTCLVKGFYPSDIAVEWESNGQPENNYKTTPPVLDSDGSFFLYSKLTVDKSRWQQGNVFSCSVMHEALHNHYTQKSLSLSPGGGGSGSAHPIPDSSPLLQFGGQVRQRYLYTDDACQTEAHLEIREDGTVGGAADQSPESLLQLKALKPGVIQILGVKTSRFLCQRPDGALYGSLHFDPEACSFRELLLEDGYNVYQSEAHGLPLHLCGNKSPHRDPAPRGPARFLPLPGLPPAPPEPPGILAPQPPDVGSSDPLSMVYPSQGRSPSYAS

SEQ ID NO: 2217 - protein, 471 aa, Artificial Sequence
  Fusion Protein
HGEGTFTSDKSKLLEKRLAHLFIEWLIAGGHSKGKPPPKGGGGGGGSGGGGSGGGGSADKTHTCPPCPAPELLGGPSVFLFPPKPKDTLMISRTPEVTCVVVDVSHEDPEVKFNWYVDGVEVHNAKTKPREEQYNNASRVVSVLTVLHQDWLNGKEYKCKVSNKALPAPIEKTISKAKGQPREPQVYTLPPSRDELTKNQVSLTCLVKGFYPSDIAVEWESNGQPENNYKTTPPVLDSDGSFFLYSKLTVDKSRWQQGNVFSCSVMHEALHNHYTQKSLSLSPGGGGSGSAHPIPDSSPLLQFGGQVRQRYLYTDDACQTEAHLEIREDGTVGGAADQSPESLLQLKALKPGVIQILGVKTSRFLCQRPDGALYGSLHFDPEACSFRELLLEDGYNVYQSEAHGLPLHLPGCKSPHRDPAPRGPARFLPLPGLPPAPPEPPGILAPQPPDVGSSDPLSMVGSQGRSPSYAS

SEQ ID NO: 2218 - protein, 472 aa, Artificial Sequence
  Fusion Protein
HGEGTFTSDKSKLLEKRLAHLFIEWLIAGGHSKGKPPPKGGGGGGGSGGGGSGGGGSADKTHTCPPCPAPELLGGPSVFLFPPKPKDTLMISRTPEVTCVVVDVSHEDPEVKFNWYVDGVEVHNAKTKPREEQYNNASRVVSVLTVLHQDWLNGKEYKCKVSNKALPAPIEKTISKAKGQPREPQVYTLPPSRDELTKNQVSLTCLVKGFYPSDIAVEWESNGQPENNYKTTPPVLDSDGSFFLYSKLTVDKSRWQQGNVFSCSVMHEALHNHYTQKSLSLSPGGGGSGSAHPIPDSSPLLQFGGQVRQRYLYTDDACQTEAHLEIREDGTVGGAADQSPESLLQLKALKPGVIQILGVKTSRFLCQRPDGALYGSLHFDPEACSFRELLLEDGYNVYQSEAHGLPLHLPGCKSPHRDPAPRGPARFLPLPGLPPAPPEPPGILAPQPPDVGSSDPLSMVYPSQGRSPSYAS

SEQ ID NO: 2219 - protein, 471 aa, Artificial Sequence
  Fusion Protein
HGEGTFTSDKSKLLEKRLAHLFIEWLIAGGHSKGKPPPKGGGGGGGSGGGGSGGGGSADKTHTCPPCPAPELLGGPSVFLFPPKPKDTLMISRTPEVTCVVVDVSHEDPEVKFNWYVDGVEVHNAKTKPREEQYNNASRVVSVLTVLHQDWLNGKEYKCKVSNKALPAPIEKTISKAKGQPREPQVYTLPPSRDELTKNQVSLTCLVKGFYPSDIAVEWESNGQPENNYKTTPPVLDSDGSFFLYSKLTVDKSRWQQGNVFSCSVMHEALHNHYTQKSLSLSPGGGGSGSAHPIPDSSPLLQFGGQVRQRYLYTDDACQTEAHLEIREDGTVGGAADQSPESLLQLKALKPGVIQILGVKTSRFLCQRPDGALYGSLHFDPEACSFRELLLEDGYNVYQSEAHGLPLHLCGNKSPHRDPAPRGPARFLPLPGLPPAPPEPPGILAPQPPDVGSSDPLSMVGSQGRSPSYAS

SEQ ID NO: 2220 - protein, 472 aa, Artificial Sequence
  Fusion Protein
HGEGTFTSDKSKLLEKRLAHLFIEWLIAGGHSKGKPPPKGGGGGGGSGGGGSGGGGSADKTHTCPPCPAPELLGGPSVFLFPPKPKDTLMISRTPEVTCVVVDVSHEDPEVKFNWYVDGVEVHNAKTKPREEQYNNASRVVSVLTVLHQDWLNGKEYKCKVSNKALPAPIEKTISKAKGQPREPQVYTLPPSRDELTKNQVSLTCLVKGFYPSDIAVEWESNGQPENNYKTTPPVLDSDGSFFLYSKLTVDKSRWQQGNVFSCSVMHEALHNHYTQKSLSLSPGGGGSGSAHPIPDSSPLLQFGGQVRQRYLYTDDACQTEAHLEIREDGTVGGAADQSPESLLQLKALKPGVIQILGVKTSRFLCQRPDGALYGSLHFDPEACSFRELLLEDGYNVYQSEAHGLPLHLCGNKSPHRDPAPRGPARFLPLPGLPPAPPEPPGILAPQPPDVGSSDPLSMVYPSQGRSPSYAS

SEQ ID NO: 2221 - protein, 474 aa, Artificial Sequence
  Fusion Protein
HGEGTFTSDKSKLLEKRLAHLFIEWLIAGGHSKGKPPPKGGGGGGGSGGGGSGGGGSAESKYGPPCPPCPAPEFEGGPSVFLFPPKPKDTLMISRTPEVTCVVVDVSQEDPEVQFNWYVDGVEVHNAKTKPREEQFNSTYRVVSVLTVLHQDWLNGKEYKCKVSNKGLPSSIEKTISKAKGQPREPQVYTLPPSQEEMTKNQVSLTCLVKGFYPSDIAVEWESNGQPENNYKTTPPVLDSDGSFFLYSRLTVDKSRWQEGNVFSCSVMHEALHNHYTQKSLSLSLGGGGSGSAHPIPDSSPLLQFGGQVRQRYLYTDDACQTEAHLEIREDGTVGGAADQSPESLLQLKALKPGVIQILGVKTSRFLCQRPDGALYGSLHFDPEACSFRELLLEDGYNVYQSEAHGLPLHLPGCKSPHRDPAPRGPARFLPLPGLPPAPPEPPGILAPQPPDVGSSDPLSMVYPSQGRSPSYAS

SEQ ID NO: 2222 - protein, 473 aa, Artificial Sequence
  Fusion Protein
HGEGTFTSDKSKLLEKRLAHLFIEWLIAGGHSKGKPPPKGGGGGGGSGGGGSGGGGSAESKYGPPCPPCPAPEFEGGPSVFLFPPKPKDTLMISRTPEVTCVVVDVSQEDPEVQFNWYVDGVEVHNAKTKPREEQFNSTYRVVSVLTVLHQDWLNGKEYKCKVSNKGLPSSIEKTISKAKGQPREPQVYTLPPSQEEMTKNQVSLTCLVKGFYPSDIAVEWESNGQPENNYKTTPPVLDSDGSFFLYSRLTVDKSRWQEGNVFSCSVMHEALHNHYTQKSLSLSLGGGGSGSAHPIPDSSPLLQFGGQVRQRYLYTDDACQTEAHLEIREDGTVGGAADQSPESLLQLKALKPGVIQILGVKTSRFLCQRPDGALYGSLHFDPEACSFRELLLEDGYNVYQSEAHGLPLHLCGNKSPHRDPAPRGPARFLPLPGLPPAPPEPPGILAPQPPDVGSSDPLSMVGSQGRSPSYAS

SEQ ID NO: 2223 - protein, 474 aa, Artificial Sequence
  Fusion Protein
HGEGTFTSDKSKLLEKRLAHLFIEWLIAGGHSKGKPPPKGGGGGGGSGGGGSGGGGSAESKYGPPCPPCPAPEFEGGPSVFLFPPKPKDTLMISRTPEVTCVVVDVSQEDPEVQFNWYVDGVEVHNAKTKPREEQFNSTYRVVSVLTVLHQDWLNGKEYKCKVSNKGLPSSIEKTISKAKGQPREPQVYTLPPSQEEMTKNQVSLTCLVKGFYPSDIAVEWESNGQPENNYKTTPPVLDSDGSFFLYSRLTVDKSRWQEGNVFSCSVMHEALHNHYTQKSLSLSLGGGGSGSAHPIPDSSPLLQFGGQVRQRYLYTDDACQTEAHLEIREDGTVGGAADQSPESLLQLKALKPGVIQILGVKTSRFLCQRPDGALYGSLHFDPEACSFRELLLEDGYNVYQSEAHGLPLHLCGNKSPHRDPAPRGPARFLPLPGLPPAPPEPPGILAPQPPDVGSSDPLSMVYPSQGRSPSYAS

SEQ ID NO: 2224 - protein, 471 aa, Artificial Sequence
  Fusion Protein
HGEGTFTSDKSQLLEKEAAHLFIEWLIAGGHSKGKPPPKGGGGGGGSGGGGSGGGGSADKTHTCPPCPAPEAAGGPSVFLFPPKPKDTLMISRTPEVTCVVVDVSHEDPEVKFNWYVDGVEVHNAKTKPREEQYNSTYRVVSVLTVLHQDWLNGKEYKCKVSNKALPAPIEKTISKAKGQPREPQVYTLPPSRDELTKNQVSLTCLVKGFYPSDIAVEWESNGQPENNYKTTPPVLDSDGSFFLYSKLTVDKSRWQQGNVFSCSVMHEALHNHYTQKSLSLSPGGGGSGSAHPIPDSSPLLQFGGQVRQRYLYTDDACQTEAHLEIREDGTVGGAADQSPESLLQLKALKPGVIQILGVKTSRFLCQRPDGALYGSLHFDPEACSFRELLLEDGYNVYQSEAHGLPLHLPGCKSPHRDPAPRGPARFLPLPGLPPAPPEPPGILAPQPPDVGSSDPLSMVGSQGRSPSYAS

SEQ ID NO: 2225 - protein, 472 aa, Artificial Sequence
  Fusion Protein
HGEGTFTSDKSQLLEKEAAHLFIEWLIAGGHSKGKPPPKGGGGGGGSGGGGSGGGGSADKTHTCPPCPAPEAAGGPSVFLFPPKPKDTLMISRTPEVTCVVVDVSHEDPEVKFNWYVDGVEVHNAKTKPREEQYNSTYRVVSVLTVLHQDWLNGKEYKCKVSNKALPAPIEKTISKAKGQPREPQVYTLPPSRDELTKNQVSLTCLVKGFYPSDIAVEWESNGQPENNYKTTPPVLDSDGSFFLYSKLTVDKSRWQQGNVFSCSVMHEALHNHYTQKSLSLSPGGGGSGSAHPIPDSSPLLQFGGQVRQRYLYTDDACQTEAHLEIREDGTVGGAADQSPESLLQLKALKPGVIQILGVKTSRFLCQRPDGALYGSLHFDPEACSFRELLLEDGYNVYQSEAHGLPLHLPGCKSPHRDPAPRGPARFLPLPGLPPAPPEPPGILAPQPPDVGSSDPLSMVYPSQGRSPSYAS

SEQ ID NO: 2226 - protein, 471 aa, Artificial Sequence
  Fusion Protein
HGEGTFTSDKSQLLEKEAAHLFIEWLIAGGHSKGKPPPKGGGGGGGSGGGGSGGGGSADKTHTCPPCPAPEAAGGPSVFLFPPKPKDTLMISRTPEVTCVVVDVSHEDPEVKFNWYVDGVEVHNAKTKPREEQYNSTYRVVSVLTVLHQDWLNGKEYKCKVSNKALPAPIEKTISKAKGQPREPQVYTLPPSRDELTKNQVSLTCLVKGFYPSDIAVEWESNGQPENNYKTTPPVLDSDGSFFLYSKLTVDKSRWQQGNVFSCSVMHEALHNHYTQKSLSLSPGGGGSGSAHPIPDSSPLLQFGGQVRQRYLYTDDACQTEAHLEIREDGTVGGAADQSPESLLQLKALKPGVIQILGVKTSRFLCQRPDGALYGSLHFDPEACSFRELLLEDGYNVYQSEAHGLPLHLCGNKSPHRDPAPRGPARFLPLPGLPPAPPEPPGILAPQPPDVGSSDPLSMVGSQGRSPSYAS

SEQ ID NO: 2227 - protein, 472 aa, Artificial Sequence
  Fusion Protein
HGEGTFTSDKSQLLEKEAAHLFIEWLIAGGHSKGKPPPKGGGGGGGSGGGGSGGGGSADKTHTCPPCPAPEAAGGPSVFLFPPKPKDTLMISRTPEVTCVVVDVSHEDPEVKFNWYVDGVEVHNAKTKPREEQYNSTYRVVSVLTVLHQDWLNGKEYKCKVSNKALPAPIEKTISKAKGQPREPQVYTLPPSRDELTKNQVSLTCLVKGFYPSDIAVEWESNGQPENNYKTTPPVLDSDGSFFLYSKLTVDKSRWQQGNVFSCSVMHEALHNHYTQKSLSLSPGGGGSGSAHPIPDSSPLLQFGGQVRQRYLYTDDACQTEAHLEIREDGTVGGAADQSPESLLQLKALKPGVIQILGVKTSRFLCQRPDGALYGSLHFDPEACSFRELLLEDGYNVYQSEAHGLPLHLCGNKSPHRDPAPRGPARFLPLPGLPPAPPEPPGILAPQPPDVGSSDPLSMVYPSQGRSPSYAS

SEQ ID NO: 2228 - protein, 471 aa, Artificial Sequence
  Fusion Protein
HGEGTFTSDKSQLLEKEAAHLFIEWLIAGGHSKGKPPPKGGGGGGGSGGGGSGGGGSADKTHTCPPCPAPELLGGPSVFLFPPKPKDTLMISRTPEVTCVVVDVSHEDPEVKFNWYVDGVEVHNAKTKPREEQYNNASRVVSVLTVLHQDWLNGKEYKCKVSNKALPAPIEKTISKAKGQPREPQVYTLPPSRDELTKNQVSLTCLVKGFYPSDIAVEWESNGQPENNYKTTPPVLDSDGSFFLYSKLTVDKSRWQQGNVFSCSVMHEALHNHYTQKSLSLSPGGGGSGSAHPIPDSSPLLQFGGQVRQRYLYTDDACQTEAHLEIREDGTVGGAADQSPESLLQLKALKPGVIQILGVKTSRFLCQRPDGALYGSLHFDPEACSFRELLLEDGYNVYQSEAHGLPLHLPGCKSPHRDPAPRGPARFLPLPGLPPAPPEPPGILAPQPPDVGSSDPLSMVGSQGRSPSYAS

SEQ ID NO: 2229 - protein, 472 aa, Artificial Sequence
  Fusion Protein
HGEGTFTSDKSQLLEKEAAHLFIEWLIAGGHSKGKPPPKGGGGGGGSGGGGSGGGGSADKTHTCPPCPAPELLGGPSVFLFPPKPKDTLMISRTPEVTCVVVDVSHEDPEVKFNWYVDGVEVHNAKTKPREEQYNNASRVVSVLTVLHQDWLNGKEYKCKVSNKALPAPIEKTISKAKGQPREPQVYTLPPSRDELTKNQVSLTCLVKGFYPSDIAVEWESNGQPENNYKTTPPVLDSDGSFFLYSKLTVDKSRWQQGNVFSCSVMHEALHNHYTQKSLSLSPGGGGSGSAHPIPDSSPLLQFGGQVRQRYLYTDDACQTEAHLEIREDGTVGGAADQSPESLLQLKALKPGVIQILGVKTSRFLCQRPDGALYGSLHFDPEACSFRELLLEDGYNVYQSEAHGLPLHLPGCKSPHRDPAPRGPARFLPLPGLPPAPPEPPGILAPQPPDVGSSDPLSMVYPSQGRSPSYAS

SEQ ID NO: 2230 - protein, 471 aa, Artificial Sequence
  Fusion Protein
HGEGTFTSDKSQLLEKEAAHLFIEWLIAGGHSKGKPPPKGGGGGGGSGGGGSGGGGSADKTHTCPPCPAPELLGGPSVFLFPPKPKDTLMISRTPEVTCVVVDVSHEDPEVKFNWYVDGVEVHNAKTKPREEQYNNASRVVSVLTVLHQDWLNGKEYKCKVSNKALPAPIEKTISKAKGQPREPQVYTLPPSRDELTKNQVSLTCLVKGFYPSDIAVEWESNGQPENNYKTTPPVLDSDGSFFLYSKLTVDKSRWQQGNVFSCSVMHEALHNHYTQKSLSLSPGGGGSGSAHPIPDSSPLLQFGGQVRQRYLYTDDACQTEAHLEIREDGTVGGAADQSPESLLQLKALKPGVIQILGVKTSRFLCQRPDGALYGSLHFDPEACSFRELLLEDGYNVYQSEAHGLPLHLCGNKSPHRDPAPRGPARFLPLPGLPPAPPEPPGILAPQPPDVGSSDPLSMVGSQGRSPSYAS

SEQ ID NO: 2231 - protein, 472 aa, Artificial Sequence
  Fusion Protein
HGEGTFTSDKSQLLEKEAAHLFIEWLIAGGHSKGKPPPKGGGGGGGSGGGGSGGGGSADKTHTCPPCPAPELLGGPSVFLFPPKPKDTLMISRTPEVTCVVVDVSHEDPEVKFNWYVDGVEVHNAKTKPREEQYNNASRVVSVLTVLHQDWLNGKEYKCKVSNKALPAPIEKTISKAKGQPREPQVYTLPPSRDELTKNQVSLTCLVKGFYPSDIAVEWESNGQPENNYKTTPPVLDSDGSFFLYSKLTVDKSRWQQGNVFSCSVMHEALHNHYTQKSLSLSPGGGGSGSAHPIPDSSPLLQFGGQVRQRYLYTDDACQTEAHLEIREDGTVGGAADQSPESLLQLKALKPGVIQILGVKTSRFLCQRPDGALYGSLHFDPEACSFRELLLEDGYNVYQSEAHGLPLHLCGNKSPHRDPAPRGPARFLPLPGLPPAPPEPPGILAPQPPDVGSSDPLSMVYPSQGRSPSYAS

SEQ ID NO: 2232 - protein, 474 aa, Artificial Sequence
  Fusion Protein
HGEGTFTSDKSQLLEKEAAHLFIEWLIAGGHSKGKPPPKGGGGGGGSGGGGSGGGGSAESKYGPPCPPCPAPEFEGGPSVFLFPPKPKDTLMISRTPEVTCVVVDVSQEDPEVQFNWYVDGVEVHNAKTKPREEQFNSTYRVVSVLTVLHQDWLNGKEYKCKVSNKGLPSSIEKTISKAKGQPREPQVYTLPPSQEEMTKNQVSLTCLVKGFYPSDIAVEWESNGQPENNYKTTPPVLDSDGSFFLYSRLTVDKSRWQEGNVFSCSVMHEALHNHYTQKSLSLSLGGGGSGSAHPIPDSSPLLQFGGQVRQRYLYTDDACQTEAHLEIREDGTVGGAADQSPESLLQLKALKPGVIQILGVKTSRFLCQRPDGALYGSLHFDPEACSFRELLLEDGYNVYQSEAHGLPLHLPGCKSPHRDPAPRGPARFLPLPGLPPAPPEPPGILAPQPPDVGSSDPLSMVYPSQGRSPSYAS

SEQ ID NO: 2233 - protein, 473 aa, Artificial Sequence
  Fusion Protein
HGEGTFTSDKSQLLEKEAAHLFIEWLIAGGHSKGKPPPKGGGGGGGSGGGGSGGGGSAESKYGPPCPPCPAPEFEGGPSVFLFPPKPKDTLMISRTPEVTCVVVDVSQEDPEVQFNWYVDGVEVHNAKTKPREEQFNSTYRVVSVLTVLHQDWLNGKEYKCKVSNKGLPSSIEKTISKAKGQPREPQVYTLPPSQEEMTKNQVSLTCLVKGFYPSDIAVEWESNGQPENNYKTTPPVLDSDGSFFLYSRLTVDKSRWQEGNVFSCSVMHEALHNHYTQKSLSLSLGGGGSGSAHPIPDSSPLLQFGGQVRQRYLYTDDACQTEAHLEIREDGTVGGAADQSPESLLQLKALKPGVIQILGVKTSRFLCQRPDGALYGSLHFDPEACSFRELLLEDGYNVYQSEAHGLPLHLCGNKSPHRDPAPRGPARFLPLPGLPPAPPEPPGILAPQPPDVGSSDPLSMVGSQGRSPSYAS

SEQ ID NO: 2234 - protein, 474 aa, Artificial Sequence
  Fusion Protein
HGEGTFTSDKSQLLEKEAAHLFIEWLIAGGHSKGKPPPKGGGGGGGSGGGGSGGGGSAESKYGPPCPPCPAPEFEGGPSVFLFPPKPKDTLMISRTPEVTCVVVDVSQEDPEVQFNWYVDGVEVHNAKTKPREEQFNSTYRVVSVLTVLHQDWLNGKEYKCKVSNKGLPSSIEKTISKAKGQPREPQVYTLPPSQEEMTKNQVSLTCLVKGFYPSDIAVEWESNGQPENNYKTTPPVLDSDGSFFLYSRLTVDKSRWQEGNVFSCSVMHEALHNHYTQKSLSLSLGGGGSGSAHPIPDSSPLLQFGGQVRQRYLYTDDACQTEAHLEIREDGTVGGAADQSPESLLQLKALKPGVIQILGVKTSRFLCQRPDGALYGSLHFDPEACSFRELLLEDGYNVYQSEAHGLPLHLCGNKSPHRDPAPRGPARFLPLPGLPPAPPEPPGILAPQPPDVGSSDPLSMVYPSQGRSPSYAS

SEQ ID NO: 2235 - protein, 471 aa, Artificial Sequence
  Fusion Protein
HGEGTFTSDKSKLLEKRAAHLFIEWLIAGGHSSIKPPPKGGGGGGGSGGGGSGGGGSADKTHTCPPCPAPEAAGGPSVFLFPPKPKDTLMISRTPEVTCVVVDVSHEDPEVKFNWYVDGVEVHNAKTKPREEQYNSTYRVVSVLTVLHQDWLNGKEYKCKVSNKALPAPIEKTISKAKGQPREPQVYTLPPSRDELTKNQVSLTCLVKGFYPSDIAVEWESNGQPENNYKTTPPVLDSDGSFFLYSKLTVDKSRWQQGNVFSCSVMHEALHNHYTQKSLSLSPGGGGSGSAHPIPDSSPLLQFGGQVRQRYLYTDDACQTEAHLEIREDGTVGGAADQSPESLLQLKALKPGVIQILGVKTSRFLCQRPDGALYGSLHFDPEACSFRELLLEDGYNVYQSEAHGLPLHLPGCKSPHRDPAPRGPARFLPLPGLPPAPPEPPGILAPQPPDVGSSDPLSMVGSQGRSPSYAS

SEQ ID NO: 2236 - protein, 472 aa, Artificial Sequence
  Fusion Protein
HGEGTFTSDKSKLLEKRAAHLFIEWLIAGGHSSIKPPPKGGGGGGGSGGGGSGGGGSADKTHTCPPCPAPEAAGGPSVFLFPPKPKDTLMISRTPEVTCVVVDVSHEDPEVKFNWYVDGVEVHNAKTKPREEQYNSTYRVVSVLTVLHQDWLNGKEYKCKVSNKALPAPIEKTISKAKGQPREPQVYTLPPSRDELTKNQVSLTCLVKGFYPSDIAVEWESNGQPENNYKTTPPVLDSDGSFFLYSKLTVDKSRWQQGNVFSCSVMHEALHNHYTQKSLSLSPGGGGSGSAHPIPDSSPLLQFGGQVRQRYLYTDDACQTEAHLEIREDGTVGGAADQSPESLLQLKALKPGVIQILGVKTSRFLCQRPDGALYGSLHFDPEACSFRELLLEDGYNVYQSEAHGLPLHLPGCKSPHRDPAPRGPARFLPLPGLPPAPPEPPGILAPQPPDVGSSDPLSMVYPSQGRSPSYAS

SEQ ID NO: 2237 - protein, 471 aa, Artificial Sequence
  Fusion Protein
HGEGTFTSDKSKLLEKRAAHLFIEWLIAGGHSSIKPPPKGGGGGGGSGGGGSGGGGSADKTHTCPPCPAPEAAGGPSVFLFPPKPKDTLMISRTPEVTCVVVDVSHEDPEVKFNWYVDGVEVHNAKTKPREEQYNSTYRVVSVLTVLHQDWLNGKEYKCKVSNKALPAPIEKTISKAKGQPREPQVYTLPPSRDELTKNQVSLTCLVKGFYPSDIAVEWESNGQPENNYKTTPPVLDSDGSFFLYSKLTVDKSRWQQGNVFSCSVMHEALHNHYTQKSLSLSPGGGGSGSAHPIPDSSPLLQFGGQVRQRYLYTDDACQTEAHLEIREDGTVGGAADQSPESLLQLKALKPGVIQILGVKTSRFLCQRPDGALYGSLHFDPEACSFRELLLEDGYNVYQSEAHGLPLHLCGNKSPHRDPAPRGPARFLPLPGLPPAPPEPPGILAPQPPDVGSSDPLSMVGSQGRSPSYAS

SEQ ID NO: 2238 - protein, 472 aa, Artificial Sequence
  Fusion Protein
HGEGTFTSDKSKLLEKRAAHLFIEWLIAGGHSSIKPPPKGGGGGGGSGGGGSGGGGSADKTHTCPPCPAPEAAGGPSVFLFPPKPKDTLMISRTPEVTCVVVDVSHEDPEVKFNWYVDGVEVHNAKTKPREEQYNSTYRVVSVLTVLHQDWLNGKEYKCKVSNKALPAPIEKTISKAKGQPREPQVYTLPPSRDELTKNQVSLTCLVKGFYPSDIAVEWESNGQPENNYKTTPPVLDSDGSFFLYSKLTVDKSRWQQGNVFSCSVMHEALHNHYTQKSLSLSPGGGGSGSAHPIPDSSPLLQFGGQVRQRYLYTDDACQTEAHLEIREDGTVGGAADQSPESLLQLKALKPGVIQILGVKTSRFLCQRPDGALYGSLHFDPEACSFRELLLEDGYNVYQSEAHGLPLHLCGNKSPHRDPAPRGPARFLPLPGLPPAPPEPPGILAPQPPDVGSSDPLSMVYPSQGRSPSYAS

SEQ ID NO: 2239 - protein, 471 aa, Artificial Sequence
  Fusion Protein
HGEGTFTSDKSKLLEKRAAHLFIEWLIAGGHSSIKPPPKGGGGGGGSGGGGSGGGGSADKTHTCPPCPAPELLGGPSVFLFPPKPKDTLMISRTPEVTCVVVDVSHEDPEVKFNWYVDGVEVHNAKTKPREEQYNNASRVVSVLTVLHQDWLNGKEYKCKVSNKALPAPIEKTISKAKGQPREPQVYTLPPSRDELTKNQVSLTCLVKGFYPSDIAVEWESNGQPENNYKTTPPVLDSDGSFFLYSKLTVDKSRWQQGNVFSCSVMHEALHNHYTQKSLSLSPGGGGSGSAHPIPDSSPLLQFGGQVRQRYLYTDDACQTEAHLEIREDGTVGGAADQSPESLLQLKALKPGVIQILGVKTSRFLCQRPDGALYGSLHFDPEACSFRELLLEDGYNVYQSEAHGLPLHLPGCKSPHRDPAPRGPARFLPLPGLPPAPPEPPGILAPQPPDVGSSDPLSMVGSQGRSPSYAS

SEQ ID NO: 2240 - protein, 472 aa, Artificial Sequence
  Fusion Protein
HGEGTFTSDKSKLLEKRAAHLFIEWLIAGGHSSIKPPPKGGGGGGGSGGGGSGGGGSADKTHTCPPCPAPELLGGPSVFLFPPKPKDTLMISRTPEVTCVVVDVSHEDPEVKFNWYVDGVEVHNAKTKPREEQYNNASRVVSVLTVLHQDWLNGKEYKCKVSNKALPAPIEKTISKAKGQPREPQVYTLPPSRDELTKNQVSLTCLVKGFYPSDIAVEWESNGQPENNYKTTPPVLDSDGSFFLYSKLTVDKSRWQQGNVFSCSVMHEALHNHYTQKSLSLSPGGGGSGSAHPIPDSSPLLQFGGQVRQRYLYTDDACQTEAHLEIREDGTVGGAADQSPESLLQLKALKPGVIQILGVKTSRFLCQRPDGALYGSLHFDPEACSFRELLLEDGYNVYQSEAHGLPLHLPGCKSPHRDPAPRGPARFLPLPGLPPAPPEPPGILAPQPPDVGSSDPLSMVYPSQGRSPSYAS

SEQ ID NO: 2241 - protein, 471 aa, Artificial Sequence
  Fusion Protein
HGEGTFTSDKSKLLEKRAAHLFIEWLIAGGHSSIKPPPKGGGGGGGSGGGGSGGGGSADKTHTCPPCPAPELLGGPSVFLFPPKPKDTLMISRTPEVTCVVVDVSHEDPEVKFNWYVDGVEVHNAKTKPREEQYNNASRVVSVLTVLHQDWLNGKEYKCKVSNKALPAPIEKTISKAKGQPREPQVYTLPPSRDELTKNQVSLTCLVKGFYPSDIAVEWESNGQPENNYKTTPPVLDSDGSFFLYSKLTVDKSRWQQGNVFSCSVMHEALHNHYTQKSLSLSPGGGGSGSAHPIPDSSPLLQFGGQVRQRYLYTDDACQTEAHLEIREDGTVGGAADQSPESLLQLKALKPGVIQILGVKTSRFLCQRPDGALYGSLHFDPEACSFRELLLEDGYNVYQSEAHGLPLHLCGNKSPHRDPAPRGPARFLPLPGLPPAPPEPPGILAPQPPDVGSSDPLSMVGSQGRSPSYAS

SEQ ID NO: 2242 - protein, 472 aa, Artificial Sequence
  Fusion Protein
HGEGTFTSDKSKLLEKRAAHLFIEWLIAGGHSSIKPPPKGGGGGGGSGGGGSGGGGSADKTHTCPPCPAPELLGGPSVFLFPPKPKDTLMISRTPEVTCVVVDVSHEDPEVKFNWYVDGVEVHNAKTKPREEQYNNASRVVSVLTVLHQDWLNGKEYKCKVSNKALPAPIEKTISKAKGQPREPQVYTLPPSRDELTKNQVSLTCLVKGFYPSDIAVEWESNGQPENNYKTTPPVLDSDGSFFLYSKLTVDKSRWQQGNVFSCSVMHEALHNHYTQKSLSLSPGGGGSGSAHPIPDSSPLLQFGGQVRQRYLYTDDACQTEAHLEIREDGTVGGAADQSPESLLQLKALKPGVIQILGVKTSRFLCQRPDGALYGSLHFDPEACSFRELLLEDGYNVYQSEAHGLPLHLCGNKSPHRDPAPRGPARFLPLPGLPPAPPEPPGILAPQPPDVGSSDPLSMVYPSQGRSPSYAS

SEQ ID NO: 2243 - protein, 474 aa, Artificial Sequence
  Fusion Protein
HGEGTFTSDKSKLLEKRAAHLFIEWLIAGGHSSIKPPPKGGGGGGGSGGGGSGGGGSAESKYGPPCPPCPAPEFEGGPSVFLFPPKPKDTLMISRTPEVTCVVVDVSQEDPEVQFNWYVDGVEVHNAKTKPREEQFNSTYRVVSVLTVLHQDWLNGKEYKCKVSNKGLPSSIEKTISKAKGQPREPQVYTLPPSQEEMTKNQVSLTCLVKGFYPSDIAVEWESNGQPENNYKTTPPVLDSDGSFFLYSRLTVDKSRWQEGNVFSCSVMHEALHNHYTQKSLSLSLGGGGSGSAHPIPDSSPLLQFGGQVRQRYLYTDDACQTEAHLEIREDGTVGGAADQSPESLLQLKALKPGVIQILGVKTSRFLCQRPDGALYGSLHFDPEACSFRELLLEDGYNVYQSEAHGLPLHLPGCKSPHRDPAPRGPARFLPLPGLPPAPPEPPGILAPQPPDVGSSDPLSMVYPSQGRSPSYAS

SEQ ID NO: 2244 - protein, 473 aa, Artificial Sequence
  Fusion Protein
HGEGTFTSDKSKLLEKRAAHLFIEWLIAGGHSSIKPPPKGGGGGGGSGGGGSGGGGSAESKYGPPCPPCPAPEFEGGPSVFLFPPKPKDTLMISRTPEVTCVVVDVSQEDPEVQFNWYVDGVEVHNAKTKPREEQFNSTYRVVSVLTVLHQDWLNGKEYKCKVSNKGLPSSIEKTISKAKGQPREPQVYTLPPSQEEMTKNQVSLTCLVKGFYPSDIAVEWESNGQPENNYKTTPPVLDSDGSFFLYSRLTVDKSRWQEGNVFSCSVMHEALHNHYTQKSLSLSLGGGGSGSAHPIPDSSPLLQFGGQVRQRYLYTDDACQTEAHLEIREDGTVGGAADQSPESLLQLKALKPGVIQILGVKTSRFLCQRPDGALYGSLHFDPEACSFRELLLEDGYNVYQSEAHGLPLHLCGNKSPHRDPAPRGPARFLPLPGLPPAPPEPPGILAPQPPDVGSSDPLSMVGSQGRSPSYAS

SEQ ID NO: 2245 - protein, 474 aa, Artificial Sequence
  Fusion Protein
HGEGTFTSDKSKLLEKRAAHLFIEWLIAGGHSSIKPPPKGGGGGGGSGGGGSGGGGSAESKYGPPCPPCPAPEFEGGPSVFLFPPKPKDTLMISRTPEVTCVVVDVSQEDPEVQFNWYVDGVEVHNAKTKPREEQFNSTYRVVSVLTVLHQDWLNGKEYKCKVSNKGLPSSIEKTISKAKGQPREPQVYTLPPSQEEMTKNQVSLTCLVKGFYPSDIAVEWESNGQPENNYKTTPPVLDSDGSFFLYSRLTVDKSRWQEGNVFSCSVMHEALHNHYTQKSLSLSLGGGGSGSAHPIPDSSPLLQFGGQVRQRYLYTDDACQTEAHLEIREDGTVGGAADQSPESLLQLKALKPGVIQILGVKTSRFLCQRPDGALYGSLHFDPEACSFRELLLEDGYNVYQSEAHGLPLHLCGNKSPHRDPAPRGPARFLPLPGLPPAPPEPPGILAPQPPDVGSSDPLSMVYPSQGRSPSYAS

SEQ ID NO: 2246 - protein, 471 aa, Artificial Sequence
  Fusion Protein
HGEGTFTSDKSQLLEKRLAHLFIEWLIKGGHSSGRPPPKGGGGGGGSGGGGSGGGGSADKTHTCPPCPAPEAAGGPSVFLFPPKPKDTLMISRTPEVTCVVVDVSHEDPEVKFNWYVDGVEVHNAKTKPREEQYNSTYRVVSVLTVLHQDWLNGKEYKCKVSNKALPAPIEKTISKAKGQPREPQVYTLPPSRDELTKNQVSLTCLVKGFYPSDIAVEWESNGQPENNYKTTPPVLDSDGSFFLYSKLTVDKSRWQQGNVFSCSVMHEALHNHYTQKSLSLSPGGGGSGSAHPIPDSSPLLQFGGQVRQRYLYTDDACQTEAHLEIREDGTVGGAADQSPESLLQLKALKPGVIQILGVKTSRFLCQRPDGALYGSLHFDPEACSFRELLLEDGYNVYQSEAHGLPLHLPGCKSPHRDPAPRGPARFLPLPGLPPAPPEPPGILAPQPPDVGSSDPLSMVGSQGRSPSYAS

SEQ ID NO: 2247 - protein, 472 aa, Artificial Sequence
  Fusion Protein
HGEGTFTSDKSQLLEKRLAHLFIEWLIKGGHSSGRPPPKGGGGGGGSGGGGSGGGGSADKTHTCPPCPAPEAAGGPSVFLFPPKPKDTLMISRTPEVTCVVVDVSHEDPEVKFNWYVDGVEVHNAKTKPREEQYNSTYRVVSVLTVLHQDWLNGKEYKCKVSNKALPAPIEKTISKAKGQPREPQVYTLPPSRDELTKNQVSLTCLVKGFYPSDIAVEWESNGQPENNYKTTPPVLDSDGSFFLYSKLTVDKSRWQQGNVFSCSVMHEALHNHYTQKSLSLSPGGGGSGSAHPIPDSSPLLQFGGQVRQRYLYTDDACQTEAHLEIREDGTVGGAADQSPESLLQLKALKPGVIQILGVKTSRFLCQRPDGALYGSLHFDPEACSFRELLLEDGYNVYQSEAHGLPLHLPGCKSPHRDPAPRGPARFLPLPGLPPAPPEPPGILAPQPPDVGSSDPLSMVYPSQGRSPSYAS

SEQ ID NO: 2248 - protein, 471 aa, Artificial Sequence
  Fusion Protein
HGEGTFTSDKSQLLEKRLAHLFIEWLIKGGHSSGRPPPKGGGGGGGSGGGGSGGGGSADKTHTCPPCPAPEAAGGPSVFLFPPKPKDTLMISRTPEVTCVVVDVSHEDPEVKFNWYVDGVEVHNAKTKPREEQYNSTYRVVSVLTVLHQDWLNGKEYKCKVSNKALPAPIEKTISKAKGQPREPQVYTLPPSRDELTKNQVSLTCLVKGFYPSDIAVEWESNGQPENNYKTTPPVLDSDGSFFLYSKLTVDKSRWQQGNVFSCSVMHEALHNHYTQKSLSLSPGGGGSGSAHPIPDSSPLLQFGGQVRQRYLYTDDACQTEAHLEIREDGTVGGAADQSPESLLQLKALKPGVIQILGVKTSRFLCQRPDGALYGSLHFDPEACSFRELLLEDGYNVYQSEAHGLPLHLCGNKSPHRDPAPRGPARFLPLPGLPPAPPEPPGILAPQPPDVGSSDPLSMVGSQGRSPSYAS

SEQ ID NO: 2249 - protein, 472 aa, Artificial Sequence
  Fusion Protein
HGEGTFTSDKSQLLEKRLAHLFIEWLIKGGHSSGRPPPKGGGGGGGSGGGGSGGGGSADKTHTCPPCPAPEAAGGPSVFLFPPKPKDTLMISRTPEVTCVVVDVSHEDPEVKFNWYVDGVEVHNAKTKPREEQYNSTYRVVSVLTVLHQDWLNGKEYKCKVSNKALPAPIEKTISKAKGQPREPQVYTLPPSRDELTKNQVSLTCLVKGFYPSDIAVEWESNGQPENNYKTTPPVLDSDGSFFLYSKLTVDKSRWQQGNVFSCSVMHEALHNHYTQKSLSLSPGGGGSGSAHPIPDSSPLLQFGGQVRQRYLYTDDACQTEAHLEIREDGTVGGAADQSPESLLQLKALKPGVIQILGVKTSRFLCQRPDGALYGSLHFDPEACSFRELLLEDGYNVYQSEAHGLPLHLCGNKSPHRDPAPRGPARFLPLPGLPPAPPEPPGILAPQPPDVGSSDPLSMVYPSQGRSPSYAS

SEQ ID NO: 2250 - protein, 471 aa, Artificial Sequence
  Fusion Protein
HGEGTFTSDKSQLLEKRLAHLFIEWLIKGGHSSGRPPPKGGGGGGGSGGGGSGGGGSADKTHTCPPCPAPELLGGPSVFLFPPKPKDTLMISRTPEVTCVVVDVSHEDPEVKFNWYVDGVEVHNAKTKPREEQYNNASRVVSVLTVLHQDWLNGKEYKCKVSNKALPAPIEKTISKAKGQPREPQVYTLPPSRDELTKNQVSLTCLVKGFYPSDIAVEWESNGQPENNYKTTPPVLDSDGSFFLYSKLTVDKSRWQQGNVFSCSVMHEALHNHYTQKSLSLSPGGGGSGSAHPIPDSSPLLQFGGQVRQRYLYTDDACQTEAHLEIREDGTVGGAADQSPESLLQLKALKPGVIQILGVKTSRFLCQRPDGALYGSLHFDPEACSFRELLLEDGYNVYQSEAHGLPLHLPGCKSPHRDPAPRGPARFLPLPGLPPAPPEPPGILAPQPPDVGSSDPLSMVGSQGRSPSYAS

SEQ ID NO: 2251 - protein, 472 aa, Artificial Sequence
  Fusion Protein
HGEGTFTSDKSQLLEKRLAHLFIEWLIKGGHSSGRPPPKGGGGGGGSGGGGSGGGGSADKTHTCPPCPAPELLGGPSVFLFPPKPKDTLMISRTPEVTCVVVDVSHEDPEVKFNWYVDGVEVHNAKTKPREEQYNNASRVVSVLTVLHQDWLNGKEYKCKVSNKALPAPIEKTISKAKGQPREPQVYTLPPSRDELTKNQVSLTCLVKGFYPSDIAVEWESNGQPENNYKTTPPVLDSDGSFFLYSKLTVDKSRWQQGNVFSCSVMHEALHNHYTQKSLSLSPGGGGSGSAHPIPDSSPLLQFGGQVRQRYLYTDDACQTEAHLEIREDGTVGGAADQSPESLLQLKALKPGVIQILGVKTSRFLCQRPDGALYGSLHFDPEACSFRELLLEDGYNVYQSEAHGLPLHLPGCKSPHRDPAPRGPARFLPLPGLPPAPPEPPGILAPQPPDVGSSDPLSMVYPSQGRSPSYAS

SEQ ID NO: 2252 - protein, 471 aa, Artificial Sequence
  Fusion Protein
HGEGTFTSDKSQLLEKRLAHLFIEWLIKGGHSSGRPPPKGGGGGGGSGGGGSGGGGSADKTHTCPPCPAPELLGGPSVFLFPPKPKDTLMISRTPEVTCVVVDVSHEDPEVKFNWYVDGVEVHNAKTKPREEQYNNASRVVSVLTVLHQDWLNGKEYKCKVSNKALPAPIEKTISKAKGQPREPQVYTLPPSRDELTKNQVSLTCLVKGFYPSDIAVEWESNGQPENNYKTTPPVLDSDGSFFLYSKLTVDKSRWQQGNVFSCSVMHEALHNHYTQKSLSLSPGGGGSGSAHPIPDSSPLLQFGGQVRQRYLYTDDACQTEAHLEIREDGTVGGAADQSPESLLQLKALKPGVIQILGVKTSRFLCQRPDGALYGSLHFDPEACSFRELLLEDGYNVYQSEAHGLPLHLCGNKSPHRDPAPRGPARFLPLPGLPPAPPEPPGILAPQPPDVGSSDPLSMVGSQGRSPSYAS

SEQ ID NO: 2253 - protein, 472 aa, Artificial Sequence
  Fusion Protein
HGEGTFTSDKSQLLEKRLAHLFIEWLIKGGHSSGRPPPKGGGGGGGSGGGGSGGGGSADKTHTCPPCPAPELLGGPSVFLFPPKPKDTLMISRTPEVTCVVVDVSHEDPEVKFNWYVDGVEVHNAKTKPREEQYNNASRVVSVLTVLHQDWLNGKEYKCKVSNKALPAPIEKTISKAKGQPREPQVYTLPPSRDELTKNQVSLTCLVKGFYPSDIAVEWESNGQPENNYKTTPPVLDSDGSFFLYSKLTVDKSRWQQGNVFSCSVMHEALHNHYTQKSLSLSPGGGGSGSAHPIPDSSPLLQFGGQVRQRYLYTDDACQTEAHLEIREDGTVGGAADQSPESLLQLKALKPGVIQILGVKTSRFLCQRPDGALYGSLHFDPEACSFRELLLEDGYNVYQSEAHGLPLHLCGNKSPHRDPAPRGPARFLPLPGLPPAPPEPPGILAPQPPDVGSSDPLSMVYPSQGRSPSYAS

SEQ ID NO: 2254 - protein, 474 aa, Artificial Sequence
  Fusion Protein
HGEGTFTSDKSQLLEKRLAHLFIEWLIKGGHSSGRPPPKGGGGGGGSGGGGSGGGGSAESKYGPPCPPCPAPEFEGGPSVFLFPPKPKDTLMISRTPEVTCVVVDVSQEDPEVQFNWYVDGVEVHNAKTKPREEQFNSTYRVVSVLTVLHQDWLNGKEYKCKVSNKGLPSSIEKTISKAKGQPREPQVYTLPPSQEEMTKNQVSLTCLVKGFYPSDIAVEWESNGQPENNYKTTPPVLDSDGSFFLYSRLTVDKSRWQEGNVFSCSVMHEALHNHYTQKSLSLSLGGGGSGSAHPIPDSSPLLQFGGQVRQRYLYTDDACQTEAHLEIREDGTVGGAADQSPESLLQLKALKPGVIQILGVKTSRFLCQRPDGALYGSLHFDPEACSFRELLLEDGYNVYQSEAHGLPLHLPGCKSPHRDPAPRGPARFLPLPGLPPAPPEPPGILAPQPPDVGSSDPLSMVYPSQGRSPSYAS

SEQ ID NO: 2255 - protein, 473 aa, Artificial Sequence
  Fusion Protein
HGEGTFTSDKSQLLEKRLAHLFIEWLIKGGHSSGRPPPKGGGGGGGSGGGGSGGGGSAESKYGPPCPPCPAPEFEGGPSVFLFPPKPKDTLMISRTPEVTCVVVDVSQEDPEVQFNWYVDGVEVHNAKTKPREEQFNSTYRVVSVLTVLHQDWLNGKEYKCKVSNKGLPSSIEKTISKAKGQPREPQVYTLPPSQEEMTKNQVSLTCLVKGFYPSDIAVEWESNGQPENNYKTTPPVLDSDGSFFLYSRLTVDKSRWQEGNVFSCSVMHEALHNHYTQKSLSLSLGGGGSGSAHPIPDSSPLLQFGGQVRQRYLYTDDACQTEAHLEIREDGTVGGAADQSPESLLQLKALKPGVIQILGVKTSRFLCQRPDGALYGSLHFDPEACSFRELLLEDGYNVYQSEAHGLPLHLCGNKSPHRDPAPRGPARFLPLPGLPPAPPEPPGILAPQPPDVGSSDPLSMVGSQGRSPSYAS

SEQ ID NO: 2256 - protein, 474 aa, Artificial Sequence
  Fusion Protein
HGEGTFTSDKSQLLEKRLAHLFIEWLIKGGHSSGRPPPKGGGGGGGSGGGGSGGGGSAESKYGPPCPPCPAPEFEGGPSVFLFPPKPKDTLMISRTPEVTCVVVDVSQEDPEVQFNWYVDGVEVHNAKTKPREEQFNSTYRVVSVLTVLHQDWLNGKEYKCKVSNKGLPSSIEKTISKAKGQPREPQVYTLPPSQEEMTKNQVSLTCLVKGFYPSDIAVEWESNGQPENNYKTTPPVLDSDGSFFLYSRLTVDKSRWQEGNVFSCSVMHEALHNHYTQKSLSLSLGGGGSGSAHPIPDSSPLLQFGGQVRQRYLYTDDACQTEAHLEIREDGTVGGAADQSPESLLQLKALKPGVIQILGVKTSRFLCQRPDGALYGSLHFDPEACSFRELLLEDGYNVYQSEAHGLPLHLCGNKSPHRDPAPRGPARFLPLPGLPPAPPEPPGILAPQPPDVGSSDPLSMVYPSQGRSPSYAS

SEQ ID NO: 2257 - protein, 471 aa, Artificial Sequence
  Fusion Protein
HGEGTFTSDLSKQLEEEAVQLFIEWLLATGPSSGKPPPEGGGGGGGSGGGGSGGGGSADKTHTCPPCPAPEAAGGPSVFLFPPKPKDTLMISRTPEVTCVVVDVSHEDPEVKFNWYVDGVEVHNAKTKPREEQYNSTYRVVSVLTVLHQDWLNGKEYKCKVSNKALPAPIEKTISKAKGQPREPQVYTLPPSRDELTKNQVSLTCLVKGFYPSDIAVEWESNGQPENNYKTTPPVLDSDGSFFLYSKLTVDKSRWQQGNVFSCSVMHEALHNHYTQKSLSLSPGGGGSGSAHPIPDSSPLLQFGGQVRQRYLYTDDACQTEAHLEIREDGTVGGAADQSPESLLQLKALKPGVIQILGVKTSRFLCQRPDGALYGSLHFDPEACSFRELLLEDGYNVYQSEAHGLPLHLPGCKSPHRDPAPRGPARFLPLPGLPPAPPEPPGILAPQPPDVGSSDPLSMVGSQGRSPSYAS

SEQ ID NO: 2258 - protein, 472 aa, Artificial Sequence
  Fusion Protein
HGEGTFTSDLSKQLEEEAVQLFIEWLLATGPSSGKPPPEGGGGGGGSGGGGSGGGGSADKTHTCPPCPAPEAAGGPSVFLFPPKPKDTLMISRTPEVTCVVVDVSHEDPEVKFNWYVDGVEVHNAKTKPREEQYNSTYRVVSVLTVLHQDWLNGKEYKCKVSNKALPAPIEKTISKAKGQPREPQVYTLPPSRDELTKNQVSLTCLVKGFYPSDIAVEWESNGQPENNYKTTPPVLDSDGSFFLYSKLTVDKSRWQQGNVFSCSVMHEALHNHYTQKSLSLSPGGGGSGSAHPIPDSSPLLQFGGQVRQRYLYTDDACQTEAHLEIREDGTVGGAADQSPESLLQLKALKPGVIQILGVKTSRFLCQRPDGALYGSLHFDPEACSFRELLLEDGYNVYQSEAHGLPLHLPGCKSPHRDPAPRGPARFLPLPGLPPAPPEPPGILAPQPPDVGSSDPLSMVYPSQGRSPSYAS

SEQ ID NO: 2259 - protein, 471 aa, Artificial Sequence
  Fusion Protein
HGEGTFTSDLSKQLEEEAVQLFIEWLLATGPSSGKPPPEGGGGGGGSGGGGSGGGGSADKTHTCPPCPAPEAAGGPSVFLFPPKPKDTLMISRTPEVTCVVVDVSHEDPEVKFNWYVDGVEVHNAKTKPREEQYNSTYRVVSVLTVLHQDWLNGKEYKCKVSNKALPAPIEKTISKAKGQPREPQVYTLPPSRDELTKNQVSLTCLVKGFYPSDIAVEWESNGQPENNYKTTPPVLDSDGSFFLYSKLTVDKSRWQQGNVFSCSVMHEALHNHYTQKSLSLSPGGGGSGSAHPIPDSSPLLQFGGQVRQRYLYTDDACQTEAHLEIREDGTVGGAADQSPESLLQLKALKPGVIQILGVKTSRFLCQRPDGALYGSLHFDPEACSFRELLLEDGYNVYQSEAHGLPLHLCGNKSPHRDPAPRGPARFLPLPGLPPAPPEPPGILAPQPPDVGSSDPLSMVGSQGRSPSYAS

SEQ ID NO: 2260 - protein, 472 aa, Artificial Sequence
  Fusion Protein
HGEGTFTSDLSKQLEEEAVQLFIEWLLATGPSSGKPPPEGGGGGGGSGGGGSGGGGSADKTHTCPPCPAPEAAGGPSVFLFPPKPKDTLMISRTPEVTCVVVDVSHEDPEVKFNWYVDGVEVHNAKTKPREEQYNSTYRVVSVLTVLHQDWLNGKEYKCKVSNKALPAPIEKTISKAKGQPREPQVYTLPPSRDELTKNQVSLTCLVKGFYPSDIAVEWESNGQPENNYKTTPPVLDSDGSFFLYSKLTVDKSRWQQGNVFSCSVMHEALHNHYTQKSLSLSPGGGGSGSAHPIPDSSPLLQFGGQVRQRYLYTDDACQTEAHLEIREDGTVGGAADQSPESLLQLKALKPGVIQILGVKTSRFLCQRPDGALYGSLHFDPEACSFRELLLEDGYNVYQSEAHGLPLHLCGNKSPHRDPAPRGPARFLPLPGLPPAPPEPPGILAPQPPDVGSSDPLSMVYPSQGRSPSYAS

SEQ ID NO: 2261 - protein, 471 aa, Artificial Sequence
  Fusion Protein
HGEGTFTSDLSKQLEEEAVQLFIEWLLATGPSSGKPPPEGGGGGGGSGGGGSGGGGSADKTHTCPPCPAPELLGGPSVFLFPPKPKDTLMISRTPEVTCVVVDVSHEDPEVKFNWYVDGVEVHNAKTKPREEQYNNASRVVSVLTVLHQDWLNGKEYKCKVSNKALPAPIEKTISKAKGQPREPQVYTLPPSRDELTKNQVSLTCLVKGFYPSDIAVEWESNGQPENNYKTTPPVLDSDGSFFLYSKLTVDKSRWQQGNVFSCSVMHEALHNHYTQKSLSLSPGGGGSGSAHPIPDSSPLLQFGGQVRQRYLYTDDACQTEAHLEIREDGTVGGAADQSPESLLQLKALKPGVIQILGVKTSRFLCQRPDGALYGSLHFDPEACSFRELLLEDGYNVYQSEAHGLPLHLPGCKSPHRDPAPRGPARFLPLPGLPPAPPEPPGILAPQPPDVGSSDPLSMVGSQGRSPSYAS

SEQ ID NO: 2262 - protein, 472 aa, Artificial Sequence
  Fusion Protein
HGEGTFTSDLSKQLEEEAVQLFIEWLLATGPSSGKPPPEGGGGGGGSGGGGSGGGGSADKTHTCPPCPAPELLGGPSVFLFPPKPKDTLMISRTPEVTCVVVDVSHEDPEVKFNWYVDGVEVHNAKTKPREEQYNNASRVVSVLTVLHQDWLNGKEYKCKVSNKALPAPIEKTISKAKGQPREPQVYTLPPSRDELTKNQVSLTCLVKGFYPSDIAVEWESNGQPENNYKTTPPVLDSDGSFFLYSKLTVDKSRWQQGNVFSCSVMHEALHNHYTQKSLSLSPGGGGSGSAHPIPDSSPLLQFGGQVRQRYLYTDDACQTEAHLEIREDGTVGGAADQSPESLLQLKALKPGVIQILGVKTSRFLCQRPDGALYGSLHFDPEACSFRELLLEDGYNVYQSEAHGLPLHLPGCKSPHRDPAPRGPARFLPLPGLPPAPPEPPGILAPQPPDVGSSDPLSMVYPSQGRSPSYAS

SEQ ID NO: 2263 - protein, 471 aa, Artificial Sequence
  Fusion Protein
HGEGTFTSDLSKQLEEEAVQLFIEWLLATGPSSGKPPPEGGGGGGGSGGGGSGGGGSADKTHTCPPCPAPELLGGPSVFLFPPKPKDTLMISRTPEVTCVVVDVSHEDPEVKFNWYVDGVEVHNAKTKPREEQYNNASRVVSVLTVLHQDWLNGKEYKCKVSNKALPAPIEKTISKAKGQPREPQVYTLPPSRDELTKNQVSLTCLVKGFYPSDIAVEWESNGQPENNYKTTPPVLDSDGSFFLYSKLTVDKSRWQQGNVFSCSVMHEALHNHYTQKSLSLSPGGGGSGSAHPIPDSSPLLQFGGQVRQRYLYTDDACQTEAHLEIREDGTVGGAADQSPESLLQLKALKPGVIQILGVKTSRFLCQRPDGALYGSLHFDPEACSFRELLLEDGYNVYQSEAHGLPLHLCGNKSPHRDPAPRGPARFLPLPGLPPAPPEPPGILAPQPPDVGSSDPLSMVGSQGRSPSYAS

SEQ ID NO: 2264 - protein, 472 aa, Artificial Sequence
  Fusion Protein
HGEGTFTSDLSKQLEEEAVQLFIEWLLATGPSSGKPPPEGGGGGGGSGGGGSGGGGSADKTHTCPPCPAPELLGGPSVFLFPPKPKDTLMISRTPEVTCVVVDVSHEDPEVKFNWYVDGVEVHNAKTKPREEQYNNASRVVSVLTVLHQDWLNGKEYKCKVSNKALPAPIEKTISKAKGQPREPQVYTLPPSRDELTKNQVSLTCLVKGFYPSDIAVEWESNGQPENNYKTTPPVLDSDGSFFLYSKLTVDKSRWQQGNVFSCSVMHEALHNHYTQKSLSLSPGGGGSGSAHPIPDSSPLLQFGGQVRQRYLYTDDACQTEAHLEIREDGTVGGAADQSPESLLQLKALKPGVIQILGVKTSRFLCQRPDGALYGSLHFDPEACSFRELLLEDGYNVYQSEAHGLPLHLCGNKSPHRDPAPRGPARFLPLPGLPPAPPEPPGILAPQPPDVGSSDPLSMVYPSQGRSPSYAS

SEQ ID NO: 2265 - protein, 473 aa, Artificial Sequence
  Fusion Protein
HGEGTFTSDLSKQLEEEAVQLFIEWLLATGPSSGKPPPEGGGGGGGSGGGGSGGGGSAESKYGPPCPPCPAPEFEGGPSVFLFPPKPKDTLMISRTPEVTCVVVDVSQEDPEVQFNWYVDGVEVHNAKTKPREEQFNSTYRVVSVLTVLHQDWLNGKEYKCKVSNKGLPSSIEKTISKAKGQPREPQVYTLPPSQEEMTKNQVSLTCLVKGFYPSDIAVEWESNGQPENNYKTTPPVLDSDGSFFLYSRLTVDKSRWQEGNVFSCSVMHEALHNHYTQKSLSLSLGGGGSGSAHPIPDSSPLLQFGGQVRQRYLYTDDACQTEAHLEIREDGTVGGAADQSPESLLQLKALKPGVIQILGVKTSRFLCQRPDGALYGSLHFDPEACSFRELLLEDGYNVYQSEAHGLPLHLPGCKSPHRDPAPRGPARFLPLPGLPPAPPEPPGILAPQPPDVGSSDPLSMVGSQGRSPSYAS

SEQ ID NO: 2266 - protein, 473 aa, Artificial Sequence
  Fusion Protein
HGEGTFTSDLSKQLEEEAVQLFIEWLLATGPSSGKPPPEGGGGGGGSGGGGSGGGGSAESKYGPPCPPCPAPEFEGGPSVFLFPPKPKDTLMISRTPEVTCVVVDVSQEDPEVQFNWYVDGVEVHNAKTKPREEQFNSTYRVVSVLTVLHQDWLNGKEYKCKVSNKGLPSSIEKTISKAKGQPREPQVYTLPPSQEEMTKNQVSLTCLVKGFYPSDIAVEWESNGQPENNYKTTPPVLDSDGSFFLYSRLTVDKSRWQEGNVFSCSVMHEALHNHYTQKSLSLSLGGGGSGSAHPIPDSSPLLQFGGQVRQRYLYTDDACQTEAHLEIREDGTVGGAADQSPESLLQLKALKPGVIQILGVKTSRFLCQRPDGALYGSLHFDPEACSFRELLLEDGYNVYQSEAHGLPLHLCGNKSPHRDPAPRGPARFLPLPGLPPAPPEPPGILAPQPPDVGSSDPLSMVGSQGRSPSYAS

SEQ ID NO: 2267 - protein, 474 aa, Artificial Sequence
  Fusion Protein
HGEGTFTSDLSKQLEEEAVQLFIEWLLATGPSSGKPPPEGGGGGGGSGGGGSGGGGSAESKYGPPCPPCPAPEFEGGPSVFLFPPKPKDTLMISRTPEVTCVVVDVSQEDPEVQFNWYVDGVEVHNAKTKPREEQFNSTYRVVSVLTVLHQDWLNGKEYKCKVSNKGLPSSIEKTISKAKGQPREPQVYTLPPSQEEMTKNQVSLTCLVKGFYPSDIAVEWESNGQPENNYKTTPPVLDSDGSFFLYSRLTVDKSRWQEGNVFSCSVMHEALHNHYTQKSLSLSLGGGGSGSAHPIPDSSPLLQFGGQVRQRYLYTDDACQTEAHLEIREDGTVGGAADQSPESLLQLKALKPGVIQILGVKTSRFLCQRPDGALYGSLHFDPEACSFRELLLEDGYNVYQSEAHGLPLHLCGNKSPHRDPAPRGPARFLPLPGLPPAPPEPPGILAPQPPDVGSSDPLSMVYPSQGRSPSYAS

SEQ ID NO: 2268 - protein, 471 aa, Artificial Sequence
  Fusion Protein
HGEGTFTSDKSQLLEKRLAHLFIEWLIKGGHSKGKYPPKGGGGGGGSGGGGSGGGGSADKTHTCPPCPAPEAAGGPSVFLFPPKPKDTLMISRTPEVTCVVVDVSHEDPEVKFNWYVDGVEVHNAKTKPREEQYNSTYRVVSVLTVLHQDWLNGKEYKCKVSNKALPAPIEKTISKAKGQPREPQVYTLPPSRDELTKNQVSLTCLVKGFYPSDIAVEWESNGQPENNYKTTPPVLDSDGSFFLYSKLTVDKSRWQQGNVFSCSVMHEALHNHYTQKSLSLSPGGGGSGSAHPIPDSSPLLQFGGQVRQRYLYTDDACQTEAHLEIREDGTVGGAADQSPESLLQLKALKPGVIQILGVKTSRFLCQRPDGALYGSLHFDPEACSFRELLLEDGYNVYQSEAHGLPLHLPGCKSPHRDPAPRGPARFLPLPGLPPAPPEPPGILAPQPPDVGSSDPLSMVGSQGRSPSYAS

SEQ ID NO: 2269 - protein, 472 aa, Artificial Sequence
  Fusion Protein
HGEGTFTSDKSQLLEKRLAHLFIEWLIKGGHSKGKYPPKGGGGGGGSGGGGSGGGGSADKTHTCPPCPAPEAAGGPSVFLFPPKPKDTLMISRTPEVTCVVVDVSHEDPEVKFNWYVDGVEVHNAKTKPREEQYNSTYRVVSVLTVLHQDWLNGKEYKCKVSNKALPAPIEKTISKAKGQPREPQVYTLPPSRDELTKNQVSLTCLVKGFYPSDIAVEWESNGQPENNYKTTPPVLDSDGSFFLYSKLTVDKSRWQQGNVFSCSVMHEALHNHYTQKSLSLSPGGGGSGSAHPIPDSSPLLQFGGQVRQRYLYTDDACQTEAHLEIREDGTVGGAADQSPESLLQLKALKPGVIQILGVKTSRFLCQRPDGALYGSLHFDPEACSFRELLLEDGYNVYQSEAHGLPLHLPGCKSPHRDPAPRGPARFLPLPGLPPAPPEPPGILAPQPPDVGSSDPLSMVYPSQGRSPSYAS

SEQ ID NO: 2270 - protein, 471 aa, Artificial Sequence
  Fusion Protein
HGEGTFTSDKSQLLEKRLAHLFIEWLIKGGHSKGKYPPKGGGGGGGSGGGGSGGGGSADKTHTCPPCPAPEAAGGPSVFLFPPKPKDTLMISRTPEVTCVVVDVSHEDPEVKFNWYVDGVEVHNAKTKPREEQYNSTYRVVSVLTVLHQDWLNGKEYKCKVSNKALPAPIEKTISKAKGQPREPQVYTLPPSRDELTKNQVSLTCLVKGFYPSDIAVEWESNGQPENNYKTTPPVLDSDGSFFLYSKLTVDKSRWQQGNVFSCSVMHEALHNHYTQKSLSLSPGGGGSGSAHPIPDSSPLLQFGGQVRQRYLYTDDACQTEAHLEIREDGTVGGAADQSPESLLQLKALKPGVIQILGVKTSRFLCQRPDGALYGSLHFDPEACSFRELLLEDGYNVYQSEAHGLPLHLCGNKSPHRDPAPRGPARFLPLPGLPPAPPEPPGILAPQPPDVGSSDPLSMVGSQGRSPSYAS

SEQ ID NO: 2271 - protein, 472 aa, Artificial Sequence
  Fusion Protein
HGEGTFTSDKSQLLEKRLAHLFIEWLIKGGHSKGKYPPKGGGGGGGSGGGGSGGGGSADKTHTCPPCPAPEAAGGPSVFLFPPKPKDTLMISRTPEVTCVVVDVSHEDPEVKFNWYVDGVEVHNAKTKPREEQYNSTYRVVSVLTVLHQDWLNGKEYKCKVSNKALPAPIEKTISKAKGQPREPQVYTLPPSRDELTKNQVSLTCLVKGFYPSDIAVEWESNGQPENNYKTTPPVLDSDGSFFLYSKLTVDKSRWQQGNVFSCSVMHEALHNHYTQKSLSLSPGGGGSGSAHPIPDSSPLLQFGGQVRQRYLYTDDACQTEAHLEIREDGTVGGAADQSPESLLQLKALKPGVIQILGVKTSRFLCQRPDGALYGSLHFDPEACSFRELLLEDGYNVYQSEAHGLPLHLCGNKSPHRDPAPRGPARFLPLPGLPPAPPEPPGILAPQPPDVGSSDPLSMVYPSQGRSPSYAS

SEQ ID NO: 2272 - protein, 471 aa, Artificial Sequence
  Fusion Protein
HGEGTFTSDKSQLLEKRLAHLFIEWLIKGGHSKGKYPPKGGGGGGGSGGGGSGGGGSADKTHTCPPCPAPELLGGPSVFLFPPKPKDTLMISRTPEVTCVVVDVSHEDPEVKFNWYVDGVEVHNAKTKPREEQYNNASRVVSVLTVLHQDWLNGKEYKCKVSNKALPAPIEKTISKAKGQPREPQVYTLPPSRDELTKNQVSLTCLVKGFYPSDIAVEWESNGQPENNYKTTPPVLDSDGSFFLYSKLTVDKSRWQQGNVFSCSVMHEALHNHYTQKSLSLSPGGGGSGSAHPIPDSSPLLQFGGQVRQRYLYTDDACQTEAHLEIREDGTVGGAADQSPESLLQLKALKPGVIQILGVKTSRFLCQRPDGALYGSLHFDPEACSFRELLLEDGYNVYQSEAHGLPLHLPGCKSPHRDPAPRGPARFLPLPGLPPAPPEPPGILAPQPPDVGSSDPLSMVGSQGRSPSYAS

SEQ ID NO: 2273 - protein, 472 aa, Artificial Sequence
  Fusion Protein
HGEGTFTSDKSQLLEKRLAHLFIEWLIKGGHSKGKYPPKGGGGGGGSGGGGSGGGGSADKTHTCPPCPAPELLGGPSVFLFPPKPKDTLMISRTPEVTCVVVDVSHEDPEVKFNWYVDGVEVHNAKTKPREEQYNNASRVVSVLTVLHQDWLNGKEYKCKVSNKALPAPIEKTISKAKGQPREPQVYTLPPSRDELTKNQVSLTCLVKGFYPSDIAVEWESNGQPENNYKTTPPVLDSDGSFFLYSKLTVDKSRWQQGNVFSCSVMHEALHNHYTQKSLSLSPGGGGSGSAHPIPDSSPLLQFGGQVRQRYLYTDDACQTEAHLEIREDGTVGGAADQSPESLLQLKALKPGVIQILGVKTSRFLCQRPDGALYGSLHFDPEACSFRELLLEDGYNVYQSEAHGLPLHLPGCKSPHRDPAPRGPARFLPLPGLPPAPPEPPGILAPQPPDVGSSDPLSMVYPSQGRSPSYAS

SEQ ID NO: 2274 - protein, 471 aa, Artificial Sequence
  Fusion Protein
HGEGTFTSDKSQLLEKRLAHLFIEWLIKGGHSKGKYPPKGGGGGGGSGGGGSGGGGSADKTHTCPPCPAPELLGGPSVFLFPPKPKDTLMISRTPEVTCVVVDVSHEDPEVKFNWYVDGVEVHNAKTKPREEQYNNASRVVSVLTVLHQDWLNGKEYKCKVSNKALPAPIEKTISKAKGQPREPQVYTLPPSRDELTKNQVSLTCLVKGFYPSDIAVEWESNGQPENNYKTTPPVLDSDGSFFLYSKLTVDKSRWQQGNVFSCSVMHEALHNHYTQKSLSLSPGGGGSGSAHPIPDSSPLLQFGGQVRQRYLYTDDACQTEAHLEIREDGTVGGAADQSPESLLQLKALKPGVIQILGVKTSRFLCQRPDGALYGSLHFDPEACSFRELLLEDGYNVYQSEAHGLPLHLCGNKSPHRDPAPRGPARFLPLPGLPPAPPEPPGILAPQPPDVGSSDPLSMVGSQGRSPSYAS

SEQ ID NO: 2275 - protein, 472 aa, Artificial Sequence
  Fusion Protein
HGEGTFTSDKSQLLEKRLAHLFIEWLIKGGHSKGKYPPKGGGGGGGSGGGGSGGGGSADKTHTCPPCPAPELLGGPSVFLFPPKPKDTLMISRTPEVTCVVVDVSHEDPEVKFNWYVDGVEVHNAKTKPREEQYNNASRVVSVLTVLHQDWLNGKEYKCKVSNKALPAPIEKTISKAKGQPREPQVYTLPPSRDELTKNQVSLTCLVKGFYPSDIAVEWESNGQPENNYKTTPPVLDSDGSFFLYSKLTVDKSRWQQGNVFSCSVMHEALHNHYTQKSLSLSPGGGGSGSAHPIPDSSPLLQFGGQVRQRYLYTDDACQTEAHLEIREDGTVGGAADQSPESLLQLKALKPGVIQILGVKTSRFLCQRPDGALYGSLHFDPEACSFRELLLEDGYNVYQSEAHGLPLHLCGNKSPHRDPAPRGPARFLPLPGLPPAPPEPPGILAPQPPDVGSSDPLSMVYPSQGRSPSYAS

SEQ ID NO: 2276 - protein, 474 aa, Artificial Sequence
  Fusion Protein
HGEGTFTSDKSQLLEKRLAHLFIEWLIKGGHSKGKYPPKGGGGGGGSGGGGSGGGGSAESKYGPPCPPCPAPEFEGGPSVFLFPPKPKDTLMISRTPEVTCVVVDVSQEDPEVQFNWYVDGVEVHNAKTKPREEQFNSTYRVVSVLTVLHQDWLNGKEYKCKVSNKGLPSSIEKTISKAKGQPREPQVYTLPPSQEEMTKNQVSLTCLVKGFYPSDIAVEWESNGQPENNYKTTPPVLDSDGSFFLYSRLTVDKSRWQEGNVFSCSVMHEALHNHYTQKSLSLSLGGGGSGSAHPIPDSSPLLQFGGQVRQRYLYTDDACQTEAHLEIREDGTVGGAADQSPESLLQLKALKPGVIQILGVKTSRFLCQRPDGALYGSLHFDPEACSFRELLLEDGYNVYQSEAHGLPLHLPGCKSPHRDPAPRGPARFLPLPGLPPAPPEPPGILAPQPPDVGSSDPLSMVYPSQGRSPSYAS

SEQ ID NO: 2277 - protein, 473 aa, Artificial Sequence
  Fusion Protein
HGEGTFTSDKSQLLEKRLAHLFIEWLIKGGHSKGKYPPKGGGGGGGSGGGGSGGGGSAESKYGPPCPPCPAPEFEGGPSVFLFPPKPKDTLMISRTPEVTCVVVDVSQEDPEVQFNWYVDGVEVHNAKTKPREEQFNSTYRVVSVLTVLHQDWLNGKEYKCKVSNKGLPSSIEKTISKAKGQPREPQVYTLPPSQEEMTKNQVSLTCLVKGFYPSDIAVEWESNGQPENNYKTTPPVLDSDGSFFLYSRLTVDKSRWQEGNVFSCSVMHEALHNHYTQKSLSLSLGGGGSGSAHPIPDSSPLLQFGGQVRQRYLYTDDACQTEAHLEIREDGTVGGAADQSPESLLQLKALKPGVIQILGVKTSRFLCQRPDGALYGSLHFDPEACSFRELLLEDGYNVYQSEAHGLPLHLCGNKSPHRDPAPRGPARFLPLPGLPPAPPEPPGILAPQPPDVGSSDPLSMVGSQGRSPSYAS

SEQ ID NO: 2278 - protein, 474 aa, Artificial Sequence
  Fusion Protein
HGEGTFTSDKSQLLEKRLAHLFIEWLIKGGHSKGKYPPKGGGGGGGSGGGGSGGGGSAESKYGPPCPPCPAPEFEGGPSVFLFPPKPKDTLMISRTPEVTCVVVDVSQEDPEVQFNWYVDGVEVHNAKTKPREEQFNSTYRVVSVLTVLHQDWLNGKEYKCKVSNKGLPSSIEKTISKAKGQPREPQVYTLPPSQEEMTKNQVSLTCLVKGFYPSDIAVEWESNGQPENNYKTTPPVLDSDGSFFLYSRLTVDKSRWQEGNVFSCSVMHEALHNHYTQKSLSLSLGGGGSGSAHPIPDSSPLLQFGGQVRQRYLYTDDACQTEAHLEIREDGTVGGAADQSPESLLQLKALKPGVIQILGVKTSRFLCQRPDGALYGSLHFDPEACSFRELLLEDGYNVYQSEAHGLPLHLCGNKSPHRDPAPRGPARFLPLPGLPPAPPEPPGILAPQPPDVGSSDPLSMVYPSQGRSPSYAS

SEQ ID NO: 2279 - protein, 471 aa, Artificial Sequence
  Fusion Protein
HGEGTFTSDKSQLLEERLAHLFIEWLIAGGHSKQKPPPKGGGGGGGSGGGGSGGGGSADKTHTCPPCPAPEAAGGPSVFLFPPKPKDTLMISRTPEVTCVVVDVSHEDPEVKFNWYVDGVEVHNAKTKPREEQYNSTYRVVSVLTVLHQDWLNGKEYKCKVSNKALPAPIEKTISKAKGQPREPQVYTLPPSRDELTKNQVSLTCLVKGFYPSDIAVEWESNGQPENNYKTTPPVLDSDGSFFLYSKLTVDKSRWQQGNVFSCSVMHEALHNHYTQKSLSLSPGGGGSGSAHPIPDSSPLLQFGGQVRQRYLYTDDACQTEAHLEIREDGTVGGAADQSPESLLQLKALKPGVIQILGVKTSRFLCQRPDGALYGSLHFDPEACSFRELLLEDGYNVYQSEAHGLPLHLPGCKSPHRDPAPRGPARFLPLPGLPPAPPEPPGILAPQPPDVGSSDPLSMVGSQGRSPSYAS

SEQ ID NO: 2280 - protein, 472 aa, Artificial Sequence
  Fusion Protein
HGEGTFTSDKSQLLEERLAHLFIEWLIAGGHSKQKPPPKGGGGGGGSGGGGSGGGGSADKTHTCPPCPAPEAAGGPSVFLFPPKPKDTLMISRTPEVTCVVVDVSHEDPEVKFNWYVDGVEVHNAKTKPREEQYNSTYRVVSVLTVLHQDWLNGKEYKCKVSNKALPAPIEKTISKAKGQPREPQVYTLPPSRDELTKNQVSLTCLVKGFYPSDIAVEWESNGQPENNYKTTPPVLDSDGSFFLYSKLTVDKSRWQQGNVFSCSVMHEALHNHYTQKSLSLSPGGGGSGSAHPIPDSSPLLQFGGQVRQRYLYTDDACQTEAHLEIREDGTVGGAADQSPESLLQLKALKPGVIQILGVKTSRFLCQRPDGALYGSLHFDPEACSFRELLLEDGYNVYQSEAHGLPLHLPGCKSPHRDPAPRGPARFLPLPGLPPAPPEPPGILAPQPPDVGSSDPLSMVYPSQGRSPSYAS

SEQ ID NO: 2281 - protein, 471 aa, Artificial Sequence
  Fusion Protein
HGEGTFTSDKSQLLEERLAHLFIEWLIAGGHSKQKPPPKGGGGGGGSGGGGSGGGGSADKTHTCPPCPAPEAAGGPSVFLFPPKPKDTLMISRTPEVTCVVVDVSHEDPEVKFNWYVDGVEVHNAKTKPREEQYNSTYRVVSVLTVLHQDWLNGKEYKCKVSNKALPAPIEKTISKAKGQPREPQVYTLPPSRDELTKNQVSLTCLVKGFYPSDIAVEWESNGQPENNYKTTPPVLDSDGSFFLYSKLTVDKSRWQQGNVFSCSVMHEALHNHYTQKSLSLSPGGGGSGSAHPIPDSSPLLQFGGQVRQRYLYTDDACQTEAHLEIREDGTVGGAADQSPESLLQLKALKPGVIQILGVKTSRFLCQRPDGALYGSLHFDPEACSFRELLLEDGYNVYQSEAHGLPLHLCGNKSPHRDPAPRGPARFLPLPGLPPAPPEPPGILAPQPPDVGSSDPLSMVGSQGRSPSYAS

SEQ ID NO: 2282 - protein, 472 aa, Artificial Sequence
  Fusion Protein
HGEGTFTSDKSQLLEERLAHLFIEWLIAGGHSKQKPPPKGGGGGGGSGGGGSGGGGSADKTHTCPPCPAPEAAGGPSVFLFPPKPKDTLMISRTPEVTCVVVDVSHEDPEVKFNWYVDGVEVHNAKTKPREEQYNSTYRVVSVLTVLHQDWLNGKEYKCKVSNKALPAPIEKTISKAKGQPREPQVYTLPPSRDELTKNQVSLTCLVKGFYPSDIAVEWESNGQPENNYKTTPPVLDSDGSFFLYSKLTVDKSRWQQGNVFSCSVMHEALHNHYTQKSLSLSPGGGGSGSAHPIPDSSPLLQFGGQVRQRYLYTDDACQTEAHLEIREDGTVGGAADQSPESLLQLKALKPGVIQILGVKTSRFLCQRPDGALYGSLHFDPEACSFRELLLEDGYNVYQSEAHGLPLHLCGNKSPHRDPAPRGPARFLPLPGLPPAPPEPPGILAPQPPDVGSSDPLSMVYPSQGRSPSYAS

SEQ ID NO: 2283 - protein, 471 aa, Artificial Sequence
  Fusion Protein
HGEGTFTSDKSQLLEERLAHLFIEWLIAGGHSKQKPPPKGGGGGGGSGGGGSGGGGSADKTHTCPPCPAPELLGGPSVFLFPPKPKDTLMISRTPEVTCVVVDVSHEDPEVKFNWYVDGVEVHNAKTKPREEQYNNASRVVSVLTVLHQDWLNGKEYKCKVSNKALPAPIEKTISKAKGQPREPQVYTLPPSRDELTKNQVSLTCLVKGFYPSDIAVEWESNGQPENNYKTTPPVLDSDGSFFLYSKLTVDKSRWQQGNVFSCSVMHEALHNHYTQKSLSLSPGGGGSGSAHPIPDSSPLLQFGGQVRQRYLYTDDACQTEAHLEIREDGTVGGAADQSPESLLQLKALKPGVIQILGVKTSRFLCQRPDGALYGSLHFDPEACSFRELLLEDGYNVYQSEAHGLPLHLPGCKSPHRDPAPRGPARFLPLPGLPPAPPEPPGILAPQPPDVGSSDPLSMVGSQGRSPSYAS

SEQ ID NO: 2284 - protein, 472 aa, Artificial Sequence
  Fusion Protein
HGEGTFTSDKSQLLEERLAHLFIEWLIAGGHSKQKPPPKGGGGGGGSGGGGSGGGGSADKTHTCPPCPAPELLGGPSVFLFPPKPKDTLMISRTPEVTCVVVDVSHEDPEVKFNWYVDGVEVHNAKTKPREEQYNNASRVVSVLTVLHQDWLNGKEYKCKVSNKALPAPIEKTISKAKGQPREPQVYTLPPSRDELTKNQVSLTCLVKGFYPSDIAVEWESNGQPENNYKTTPPVLDSDGSFFLYSKLTVDKSRWQQGNVFSCSVMHEALHNHYTQKSLSLSPGGGGSGSAHPIPDSSPLLQFGGQVRQRYLYTDDACQTEAHLEIREDGTVGGAADQSPESLLQLKALKPGVIQILGVKTSRFLCQRPDGALYGSLHFDPEACSFRELLLEDGYNVYQSEAHGLPLHLPGCKSPHRDPAPRGPARFLPLPGLPPAPPEPPGILAPQPPDVGSSDPLSMVYPSQGRSPSYAS

SEQ ID NO: 2285 - protein, 471 aa, Artificial Sequence
  Fusion Protein
HGEGTFTSDKSQLLEERLAHLFIEWLIAGGHSKQKPPPKGGGGGGGSGGGGSGGGGSADKTHTCPPCPAPELLGGPSVFLFPPKPKDTLMISRTPEVTCVVVDVSHEDPEVKFNWYVDGVEVHNAKTKPREEQYNNASRVVSVLTVLHQDWLNGKEYKCKVSNKALPAPIEKTISKAKGQPREPQVYTLPPSRDELTKNQVSLTCLVKGFYPSDIAVEWESNGQPENNYKTTPPVLDSDGSFFLYSKLTVDKSRWQQGNVFSCSVMHEALHNHYTQKSLSLSPGGGGSGSAHPIPDSSPLLQFGGQVRQRYLYTDDACQTEAHLEIREDGTVGGAADQSPESLLQLKALKPGVIQILGVKTSRFLCQRPDGALYGSLHFDPEACSFRELLLEDGYNVYQSEAHGLPLHLCGNKSPHRDPAPRGPARFLPLPGLPPAPPEPPGILAPQPPDVGSSDPLSMVGSQGRSPSYAS

SEQ ID NO: 2286 - protein, 472 aa, Artificial Sequence
  Fusion Protein
HGEGTFTSDKSQLLEERLAHLFIEWLIAGGHSKQKPPPKGGGGGGGSGGGGSGGGGSADKTHTCPPCPAPELLGGPSVFLFPPKPKDTLMISRTPEVTCVVVDVSHEDPEVKFNWYVDGVEVHNAKTKPREEQYNNASRVVSVLTVLHQDWLNGKEYKCKVSNKALPAPIEKTISKAKGQPREPQVYTLPPSRDELTKNQVSLTCLVKGFYPSDIAVEWESNGQPENNYKTTPPVLDSDGSFFLYSKLTVDKSRWQQGNVFSCSVMHEALHNHYTQKSLSLSPGGGGSGSAHPIPDSSPLLQFGGQVRQRYLYTDDACQTEAHLEIREDGTVGGAADQSPESLLQLKALKPGVIQILGVKTSRFLCQRPDGALYGSLHFDPEACSFRELLLEDGYNVYQSEAHGLPLHLCGNKSPHRDPAPRGPARFLPLPGLPPAPPEPPGILAPQPPDVGSSDPLSMVYPSQGRSPSYAS

SEQ ID NO: 2287 - protein, 474 aa, Artificial Sequence
  Fusion Protein
HGEGTFTSDKSQLLEERLAHLFIEWLIAGGHSKQKPPPKGGGGGGGSGGGGSGGGGSAESKYGPPCPPCPAPEFEGGPSVFLFPPKPKDTLMISRTPEVTCVVVDVSQEDPEVQFNWYVDGVEVHNAKTKPREEQFNSTYRVVSVLTVLHQDWLNGKEYKCKVSNKGLPSSIEKTISKAKGQPREPQVYTLPPSQEEMTKNQVSLTCLVKGFYPSDIAVEWESNGQPENNYKTTPPVLDSDGSFFLYSRLTVDKSRWQEGNVFSCSVMHEALHNHYTQKSLSLSLGGGGSGSAHPIPDSSPLLQFGGQVRQRYLYTDDACQTEAHLEIREDGTVGGAADQSPESLLQLKALKPGVIQILGVKTSRFLCQRPDGALYGSLHFDPEACSFRELLLEDGYNVYQSEAHGLPLHLPGCKSPHRDPAPRGPARFLPLPGLPPAPPEPPGILAPQPPDVGSSDPLSMVYPSQGRSPSYAS

SEQ ID NO: 2288 - protein, 473 aa, Artificial Sequence
  Fusion Protein
HGEGTFTSDKSQLLEERLAHLFIEWLIAGGHSKQKPPPKGGGGGGGSGGGGSGGGGSAESKYGPPCPPCPAPEFEGGPSVFLFPPKPKDTLMISRTPEVTCVVVDVSQEDPEVQFNWYVDGVEVHNAKTKPREEQFNSTYRVVSVLTVLHQDWLNGKEYKCKVSNKGLPSSIEKTISKAKGQPREPQVYTLPPSQEEMTKNQVSLTCLVKGFYPSDIAVEWESNGQPENNYKTTPPVLDSDGSFFLYSRLTVDKSRWQEGNVFSCSVMHEALHNHYTQKSLSLSLGGGGSGSAHPIPDSSPLLQFGGQVRQRYLYTDDACQTEAHLEIREDGTVGGAADQSPESLLQLKALKPGVIQILGVKTSRFLCQRPDGALYGSLHFDPEACSFRELLLEDGYNVYQSEAHGLPLHLCGNKSPHRDPAPRGPARFLPLPGLPPAPPEPPGILAPQPPDVGSSDPLSMVGSQGRSPSYAS

SEQ ID NO: 2289 - protein, 474 aa, Artificial Sequence
  Fusion Protein
HGEGTFTSDKSQLLEERLAHLFIEWLIAGGHSKQKPPPKGGGGGGGSGGGGSGGGGSAESKYGPPCPPCPAPEFEGGPSVFLFPPKPKDTLMISRTPEVTCVVVDVSQEDPEVQFNWYVDGVEVHNAKTKPREEQFNSTYRVVSVLTVLHQDWLNGKEYKCKVSNKGLPSSIEKTISKAKGQPREPQVYTLPPSQEEMTKNQVSLTCLVKGFYPSDIAVEWESNGQPENNYKTTPPVLDSDGSFFLYSRLTVDKSRWQEGNVFSCSVMHEALHNHYTQKSLSLSLGGGGSGSAHPIPDSSPLLQFGGQVRQRYLYTDDACQTEAHLEIREDGTVGGAADQSPESLLQLKALKPGVIQILGVKTSRFLCQRPDGALYGSLHFDPEACSFRELLLEDGYNVYQSEAHGLPLHLCGNKSPHRDPAPRGPARFLPLPGLPPAPPEPPGILAPQPPDVGSSDPLSMVYPSQGRSPSYAS

SEQ ID NO: 2290 - protein, 471 aa, Artificial Sequence
  Fusion Protein
HGEGTFTSDKSQLLEKELAHLFIEWLLAGGHSKGKPPPKGGGGGGGSGGGGSGGGGSADKTHTCPPCPAPEAAGGPSVFLFPPKPKDTLMISRTPEVTCVVVDVSHEDPEVKFNWYVDGVEVHNAKTKPREEQYNSTYRVVSVLTVLHQDWLNGKEYKCKVSNKALPAPIEKTISKAKGQPREPQVYTLPPSRDELTKNQVSLTCLVKGFYPSDIAVEWESNGQPENNYKTTPPVLDSDGSFFLYSKLTVDKSRWQQGNVFSCSVMHEALHNHYTQKSLSLSPGGGGSGSAHPIPDSSPLLQFGGQVRQRYLYTDDACQTEAHLEIREDGTVGGAADQSPESLLQLKALKPGVIQILGVKTSRFLCQRPDGALYGSLHFDPEACSFRELLLEDGYNVYQSEAHGLPLHLPGCKSPHRDPAPRGPARFLPLPGLPPAPPEPPGILAPQPPDVGSSDPLSMVGSQGRSPSYAS

SEQ ID NO: 2291 - protein, 472 aa, Artificial Sequence
  Fusion Protein
HGEGTFTSDKSQLLEKELAHLFIEWLLAGGHSKGKPPPKGGGGGGGSGGGGSGGGGSADKTHTCPPCPAPEAAGGPSVFLFPPKPKDTLMISRTPEVTCVVVDVSHEDPEVKFNWYVDGVEVHNAKTKPREEQYNSTYRVVSVLTVLHQDWLNGKEYKCKVSNKALPAPIEKTISKAKGQPREPQVYTLPPSRDELTKNQVSLTCLVKGFYPSDIAVEWESNGQPENNYKTTPPVLDSDGSFFLYSKLTVDKSRWQQGNVFSCSVMHEALHNHYTQKSLSLSPGGGGSGSAHPIPDSSPLLQFGGQVRQRYLYTDDACQTEAHLEIREDGTVGGAADQSPESLLQLKALKPGVIQILGVKTSRFLCQRPDGALYGSLHFDPEACSFRELLLEDGYNVYQSEAHGLPLHLPGCKSPHRDPAPRGPARFLPLPGLPPAPPEPPGILAPQPPDVGSSDPLSMVYPSQGRSPSYAS

SEQ ID NO: 2292 - protein, 471 aa, Artificial Sequence
  Fusion Protein
HGEGTFTSDKSQLLEKELAHLFIEWLLAGGHSKGKPPPKGGGGGGGSGGGGSGGGGSADKTHTCPPCPAPEAAGGPSVFLFPPKPKDTLMISRTPEVTCVVVDVSHEDPEVKFNWYVDGVEVHNAKTKPREEQYNSTYRVVSVLTVLHQDWLNGKEYKCKVSNKALPAPIEKTISKAKGQPREPQVYTLPPSRDELTKNQVSLTCLVKGFYPSDIAVEWESNGQPENNYKTTPPVLDSDGSFFLYSKLTVDKSRWQQGNVFSCSVMHEALHNHYTQKSLSLSPGGGGSGSAHPIPDSSPLLQFGGQVRQRYLYTDDACQTEAHLEIREDGTVGGAADQSPESLLQLKALKPGVIQILGVKTSRFLCQRPDGALYGSLHFDPEACSFRELLLEDGYNVYQSEAHGLPLHLCGNKSPHRDPAPRGPARFLPLPGLPPAPPEPPGILAPQPPDVGSSDPLSMVGSQGRSPSYAS

SEQ ID NO: 2293 - protein, 472 aa, Artificial Sequence
  Fusion Protein
HGEGTFTSDKSQLLEKELAHLFIEWLLAGGHSKGKPPPKGGGGGGGSGGGGSGGGGSADKTHTCPPCPAPEAAGGPSVFLFPPKPKDTLMISRTPEVTCVVVDVSHEDPEVKFNWYVDGVEVHNAKTKPREEQYNSTYRVVSVLTVLHQDWLNGKEYKCKVSNKALPAPIEKTISKAKGQPREPQVYTLPPSRDELTKNQVSLTCLVKGFYPSDIAVEWESNGQPENNYKTTPPVLDSDGSFFLYSKLTVDKSRWQQGNVFSCSVMHEALHNHYTQKSLSLSPGGGGSGSAHPIPDSSPLLQFGGQVRQRYLYTDDACQTEAHLEIREDGTVGGAADQSPESLLQLKALKPGVIQILGVKTSRFLCQRPDGALYGSLHFDPEACSFRELLLEDGYNVYQSEAHGLPLHLCGNKSPHRDPAPRGPARFLPLPGLPPAPPEPPGILAPQPPDVGSSDPLSMVYPSQGRSPSYAS

SEQ ID NO: 2294 - protein, 471 aa, Artificial Sequence
  Fusion Protein
HGEGTFTSDKSQLLEKELAHLFIEWLLAGGHSKGKPPPKGGGGGGGSGGGGSGGGGSADKTHTCPPCPAPELLGGPSVFLFPPKPKDTLMISRTPEVTCVVVDVSHEDPEVKFNWYVDGVEVHNAKTKPREEQYNNASRVVSVLTVLHQDWLNGKEYKCKVSNKALPAPIEKTISKAKGQPREPQVYTLPPSRDELTKNQVSLTCLVKGFYPSDIAVEWESNGQPENNYKTTPPVLDSDGSFFLYSKLTVDKSRWQQGNVFSCSVMHEALHNHYTQKSLSLSPGGGGSGSAHPIPDSSPLLQFGGQVRQRYLYTDDACQTEAHLEIREDGTVGGAADQSPESLLQLKALKPGVIQILGVKTSRFLCQRPDGALYGSLHFDPEACSFRELLLEDGYNVYQSEAHGLPLHLPGCKSPHRDPAPRGPARFLPLPGLPPAPPEPPGILAPQPPDVGSSDPLSMVGSQGRSPSYAS

SEQ ID NO: 2295 - protein, 472 aa, Artificial Sequence
  Fusion Protein
HGEGTFTSDKSQLLEKELAHLFIEWLLAGGHSKGKPPPKGGGGGGGSGGGGSGGGGSADKTHTCPPCPAPELLGGPSVFLFPPKPKDTLMISRTPEVTCVVVDVSHEDPEVKFNWYVDGVEVHNAKTKPREEQYNNASRVVSVLTVLHQDWLNGKEYKCKVSNKALPAPIEKTISKAKGQPREPQVYTLPPSRDELTKNQVSLTCLVKGFYPSDIAVEWESNGQPENNYKTTPPVLDSDGSFFLYSKLTVDKSRWQQGNVFSCSVMHEALHNHYTQKSLSLSPGGGGSGSAHPIPDSSPLLQFGGQVRQRYLYTDDACQTEAHLEIREDGTVGGAADQSPESLLQLKALKPGVIQILGVKTSRFLCQRPDGALYGSLHFDPEACSFRELLLEDGYNVYQSEAHGLPLHLPGCKSPHRDPAPRGPARFLPLPGLPPAPPEPPGILAPQPPDVGSSDPLSMVYPSQGRSPSYAS

SEQ ID NO: 2296 - protein, 471 aa, Artificial Sequence
  Fusion Protein
HGEGTFTSDKSQLLEKELAHLFIEWLLAGGHSKGKPPPKGGGGGGGSGGGGSGGGGSADKTHTCPPCPAPELLGGPSVFLFPPKPKDTLMISRTPEVTCVVVDVSHEDPEVKFNWYVDGVEVHNAKTKPREEQYNNASRVVSVLTVLHQDWLNGKEYKCKVSNKALPAPIEKTISKAKGQPREPQVYTLPPSRDELTKNQVSLTCLVKGFYPSDIAVEWESNGQPENNYKTTPPVLDSDGSFFLYSKLTVDKSRWQQGNVFSCSVMHEALHNHYTQKSLSLSPGGGGSGSAHPIPDSSPLLQFGGQVRQRYLYTDDACQTEAHLEIREDGTVGGAADQSPESLLQLKALKPGVIQILGVKTSRFLCQRPDGALYGSLHFDPEACSFRELLLEDGYNVYQSEAHGLPLHLCGNKSPHRDPAPRGPARFLPLPGLPPAPPEPPGILAPQPPDVGSSDPLSMVGSQGRSPSYAS

SEQ ID NO: 2297 - protein, 472 aa, Artificial Sequence
  Fusion Protein
HGEGTFTSDKSQLLEKELAHLFIEWLLAGGHSKGKPPPKGGGGGGGSGGGGSGGGGSADKTHTCPPCPAPELLGGPSVFLFPPKPKDTLMISRTPEVTCVVVDVSHEDPEVKFNWYVDGVEVHNAKTKPREEQYNNASRVVSVLTVLHQDWLNGKEYKCKVSNKALPAPIEKTISKAKGQPREPQVYTLPPSRDELTKNQVSLTCLVKGFYPSDIAVEWESNGQPENNYKTTPPVLDSDGSFFLYSKLTVDKSRWQQGNVFSCSVMHEALHNHYTQKSLSLSPGGGGSGSAHPIPDSSPLLQFGGQVRQRYLYTDDACQTEAHLEIREDGTVGGAADQSPESLLQLKALKPGVIQILGVKTSRFLCQRPDGALYGSLHFDPEACSFRELLLEDGYNVYQSEAHGLPLHLCGNKSPHRDPAPRGPARFLPLPGLPPAPPEPPGILAPQPPDVGSSDPLSMVYPSQGRSPSYAS

SEQ ID NO: 2298 - protein, 474 aa, Artificial Sequence
  Fusion Protein
HGEGTFTSDKSQLLEKELAHLFIEWLLAGGHSKGKPPPKGGGGGGGSGGGGSGGGGSAESKYGPPCPPCPAPEFEGGPSVFLFPPKPKDTLMISRTPEVTCVVVDVSQEDPEVQFNWYVDGVEVHNAKTKPREEQFNSTYRVVSVLTVLHQDWLNGKEYKCKVSNKGLPSSIEKTISKAKGQPREPQVYTLPPSQEEMTKNQVSLTCLVKGFYPSDIAVEWESNGQPENNYKTTPPVLDSDGSFFLYSRLTVDKSRWQEGNVFSCSVMHEALHNHYTQKSLSLSLGGGGSGSAHPIPDSSPLLQFGGQVRQRYLYTDDACQTEAHLEIREDGTVGGAADQSPESLLQLKALKPGVIQILGVKTSRFLCQRPDGALYGSLHFDPEACSFRELLLEDGYNVYQSEAHGLPLHLPGCKSPHRDPAPRGPARFLPLPGLPPAPPEPPGILAPQPPDVGSSDPLSMVYPSQGRSPSYAS

SEQ ID NO: 2299 - protein, 473 aa, Artificial Sequence
  Fusion Protein
HGEGTFTSDKSQLLEKELAHLFIEWLLAGGHSKGKPPPKGGGGGGGSGGGGSGGGGSAESKYGPPCPPCPAPEFEGGPSVFLFPPKPKDTLMISRTPEVTCVVVDVSQEDPEVQFNWYVDGVEVHNAKTKPREEQFNSTYRVVSVLTVLHQDWLNGKEYKCKVSNKGLPSSIEKTISKAKGQPREPQVYTLPPSQEEMTKNQVSLTCLVKGFYPSDIAVEWESNGQPENNYKTTPPVLDSDGSFFLYSRLTVDKSRWQEGNVFSCSVMHEALHNHYTQKSLSLSLGGGGSGSAHPIPDSSPLLQFGGQVRQRYLYTDDACQTEAHLEIREDGTVGGAADQSPESLLQLKALKPGVIQILGVKTSRFLCQRPDGALYGSLHFDPEACSFRELLLEDGYNVYQSEAHGLPLHLCGNKSPHRDPAPRGPARFLPLPGLPPAPPEPPGILAPQPPDVGSSDPLSMVGSQGRSPSYAS

SEQ ID NO: 2300 - protein, 474 aa, Artificial Sequence
  Fusion Protein
HGEGTFTSDKSQLLEKELAHLFIEWLLAGGHSKGKPPPKGGGGGGGSGGGGSGGGGSAESKYGPPCPPCPAPEFEGGPSVFLFPPKPKDTLMISRTPEVTCVVVDVSQEDPEVQFNWYVDGVEVHNAKTKPREEQFNSTYRVVSVLTVLHQDWLNGKEYKCKVSNKGLPSSIEKTISKAKGQPREPQVYTLPPSQEEMTKNQVSLTCLVKGFYPSDIAVEWESNGQPENNYKTTPPVLDSDGSFFLYSRLTVDKSRWQEGNVFSCSVMHEALHNHYTQKSLSLSLGGGGSGSAHPIPDSSPLLQFGGQVRQRYLYTDDACQTEAHLEIREDGTVGGAADQSPESLLQLKALKPGVIQILGVKTSRFLCQRPDGALYGSLHFDPEACSFRELLLEDGYNVYQSEAHGLPLHLCGNKSPHRDPAPRGPARFLPLPGLPPAPPEPPGILAPQPPDVGSSDPLSMVYPSQGRSPSYAS

SEQ ID NO: 2301 - protein, 471 aa, Artificial Sequence
  Fusion Protein
HGEGTFTSDKSQLLEKELAHLFIEWLIAGGHSKQKPPPKGGGGGGGSGGGGSGGGGSADKTHTCPPCPAPEAAGGPSVFLFPPKPKDTLMISRTPEVTCVVVDVSHEDPEVKFNWYVDGVEVHNAKTKPREEQYNSTYRVVSVLTVLHQDWLNGKEYKCKVSNKALPAPIEKTISKAKGQPREPQVYTLPPSRDELTKNQVSLTCLVKGFYPSDIAVEWESNGQPENNYKTTPPVLDSDGSFFLYSKLTVDKSRWQQGNVFSCSVMHEALHNHYTQKSLSLSPGGGGSGSAHPIPDSSPLLQFGGQVRQRYLYTDDACQTEAHLEIREDGTVGGAADQSPESLLQLKALKPGVIQILGVKTSRFLCQRPDGALYGSLHFDPEACSFRELLLEDGYNVYQSEAHGLPLHLPGCKSPHRDPAPRGPARFLPLPGLPPAPPEPPGILAPQPPDVGSSDPLSMVGSQGRSPSYAS

SEQ ID NO: 2302 - protein, 472 aa, Artificial Sequence
  Fusion Protein
HGEGTFTSDKSQLLEKELAHLFIEWLIAGGHSKQKPPPKGGGGGGGSGGGGSGGGGSADKTHTCPPCPAPEAAGGPSVFLFPPKPKDTLMISRTPEVTCVVVDVSHEDPEVKFNWYVDGVEVHNAKTKPREEQYNSTYRVVSVLTVLHQDWLNGKEYKCKVSNKALPAPIEKTISKAKGQPREPQVYTLPPSRDELTKNQVSLTCLVKGFYPSDIAVEWESNGQPENNYKTTPPVLDSDGSFFLYSKLTVDKSRWQQGNVFSCSVMHEALHNHYTQKSLSLSPGGGGSGSAHPIPDSSPLLQFGGQVRQRYLYTDDACQTEAHLEIREDGTVGGAADQSPESLLQLKALKPGVIQILGVKTSRFLCQRPDGALYGSLHFDPEACSFRELLLEDGYNVYQSEAHGLPLHLPGCKSPHRDPAPRGPARFLPLPGLPPAPPEPPGILAPQPPDVGSSDPLSMVYPSQGRSPSYAS

SEQ ID NO: 2303 - protein, 471 aa, Artificial Sequence
  Fusion Protein
HGEGTFTSDKSQLLEKELAHLFIEWLIAGGHSKQKPPPKGGGGGGGSGGGGSGGGGSADKTHTCPPCPAPEAAGGPSVFLFPPKPKDTLMISRTPEVTCVVVDVSHEDPEVKFNWYVDGVEVHNAKTKPREEQYNSTYRVVSVLTVLHQDWLNGKEYKCKVSNKALPAPIEKTISKAKGQPREPQVYTLPPSRDELTKNQVSLTCLVKGFYPSDIAVEWESNGQPENNYKTTPPVLDSDGSFFLYSKLTVDKSRWQQGNVFSCSVMHEALHNHYTQKSLSLSPGGGGSGSAHPIPDSSPLLQFGGQVRQRYLYTDDACQTEAHLEIREDGTVGGAADQSPESLLQLKALKPGVIQILGVKTSRFLCQRPDGALYGSLHFDPEACSFRELLLEDGYNVYQSEAHGLPLHLCGNKSPHRDPAPRGPARFLPLPGLPPAPPEPPGILAPQPPDVGSSDPLSMVGSQGRSPSYAS

SEQ ID NO: 2304 - protein, 472 aa, Artificial Sequence
  Fusion Protein
HGEGTFTSDKSQLLEKELAHLFIEWLIAGGHSKQKPPPKGGGGGGGSGGGGSGGGGSADKTHTCPPCPAPEAAGGPSVFLFPPKPKDTLMISRTPEVTCVVVDVSHEDPEVKFNWYVDGVEVHNAKTKPREEQYNSTYRVVSVLTVLHQDWLNGKEYKCKVSNKALPAPIEKTISKAKGQPREPQVYTLPPSRDELTKNQVSLTCLVKGFYPSDIAVEWESNGQPENNYKTTPPVLDSDGSFFLYSKLTVDKSRWQQGNVFSCSVMHEALHNHYTQKSLSLSPGGGGSGSAHPIPDSSPLLQFGGQVRQRYLYTDDACQTEAHLEIREDGTVGGAADQSPESLLQLKALKPGVIQILGVKTSRFLCQRPDGALYGSLHFDPEACSFRELLLEDGYNVYQSEAHGLPLHLCGNKSPHRDPAPRGPARFLPLPGLPPAPPEPPGILAPQPPDVGSSDPLSMVYPSQGRSPSYAS

SEQ ID NO: 2305 - protein, 471 aa, Artificial Sequence
  Fusion Protein
HGEGTFTSDKSQLLEKELAHLFIEWLIAGGHSKQKPPPKGGGGGGGSGGGGSGGGGSADKTHTCPPCPAPELLGGPSVFLFPPKPKDTLMISRTPEVTCVVVDVSHEDPEVKFNWYVDGVEVHNAKTKPREEQYNNASRVVSVLTVLHQDWLNGKEYKCKVSNKALPAPIEKTISKAKGQPREPQVYTLPPSRDELTKNQVSLTCLVKGFYPSDIAVEWESNGQPENNYKTTPPVLDSDGSFFLYSKLTVDKSRWQQGNVFSCSVMHEALHNHYTQKSLSLSPGGGGSGSAHPIPDSSPLLQFGGQVRQRYLYTDDACQTEAHLEIREDGTVGGAADQSPESLLQLKALKPGVIQILGVKTSRFLCQRPDGALYGSLHFDPEACSFRELLLEDGYNVYQSEAHGLPLHLPGCKSPHRDPAPRGPARFLPLPGLPPAPPEPPGILAPQPPDVGSSDPLSMVGSQGRSPSYAS

SEQ ID NO: 2306 - protein, 472 aa, Artificial Sequence
  Fusion Protein
HGEGTFTSDKSQLLEKELAHLFIEWLIAGGHSKQKPPPKGGGGGGGSGGGGSGGGGSADKTHTCPPCPAPELLGGPSVFLFPPKPKDTLMISRTPEVTCVVVDVSHEDPEVKFNWYVDGVEVHNAKTKPREEQYNNASRVVSVLTVLHQDWLNGKEYKCKVSNKALPAPIEKTISKAKGQPREPQVYTLPPSRDELTKNQVSLTCLVKGFYPSDIAVEWESNGQPENNYKTTPPVLDSDGSFFLYSKLTVDKSRWQQGNVFSCSVMHEALHNHYTQKSLSLSPGGGGSGSAHPIPDSSPLLQFGGQVRQRYLYTDDACQTEAHLEIREDGTVGGAADQSPESLLQLKALKPGVIQILGVKTSRFLCQRPDGALYGSLHFDPEACSFRELLLEDGYNVYQSEAHGLPLHLPGCKSPHRDPAPRGPARFLPLPGLPPAPPEPPGILAPQPPDVGSSDPLSMVYPSQGRSPSYAS

SEQ ID NO: 2307 - protein, 471 aa, Artificial Sequence
  Fusion Protein
HGEGTFTSDKSQLLEKELAHLFIEWLIAGGHSKQKPPPKGGGGGGGSGGGGSGGGGSADKTHTCPPCPAPELLGGPSVFLFPPKPKDTLMISRTPEVTCVVVDVSHEDPEVKFNWYVDGVEVHNAKTKPREEQYNNASRVVSVLTVLHQDWLNGKEYKCKVSNKALPAPIEKTISKAKGQPREPQVYTLPPSRDELTKNQVSLTCLVKGFYPSDIAVEWESNGQPENNYKTTPPVLDSDGSFFLYSKLTVDKSRWQQGNVFSCSVMHEALHNHYTQKSLSLSPGGGGSGSAHPIPDSSPLLQFGGQVRQRYLYTDDACQTEAHLEIREDGTVGGAADQSPESLLQLKALKPGVIQILGVKTSRFLCQRPDGALYGSLHFDPEACSFRELLLEDGYNVYQSEAHGLPLHLCGNKSPHRDPAPRGPARFLPLPGLPPAPPEPPGILAPQPPDVGSSDPLSMVGSQGRSPSYAS

SEQ ID NO: 2308 - protein, 472 aa, Artificial Sequence
  Fusion Protein
HGEGTFTSDKSQLLEKELAHLFIEWLIAGGHSKQKPPPKGGGGGGGSGGGGSGGGGSADKTHTCPPCPAPELLGGPSVFLFPPKPKDTLMISRTPEVTCVVVDVSHEDPEVKFNWYVDGVEVHNAKTKPREEQYNNASRVVSVLTVLHQDWLNGKEYKCKVSNKALPAPIEKTISKAKGQPREPQVYTLPPSRDELTKNQVSLTCLVKGFYPSDIAVEWESNGQPENNYKTTPPVLDSDGSFFLYSKLTVDKSRWQQGNVFSCSVMHEALHNHYTQKSLSLSPGGGGSGSAHPIPDSSPLLQFGGQVRQRYLYTDDACQTEAHLEIREDGTVGGAADQSPESLLQLKALKPGVIQILGVKTSRFLCQRPDGALYGSLHFDPEACSFRELLLEDGYNVYQSEAHGLPLHLCGNKSPHRDPAPRGPARFLPLPGLPPAPPEPPGILAPQPPDVGSSDPLSMVYPSQGRSPSYAS

SEQ ID NO: 2309 - protein, 474 aa, Artificial Sequence
  Fusion Protein
HGEGTFTSDKSQLLEKELAHLFIEWLIAGGHSKQKPPPKGGGGGGGSGGGGSGGGGSAESKYGPPCPPCPAPEFEGGPSVFLFPPKPKDTLMISRTPEVTCVVVDVSQEDPEVQFNWYVDGVEVHNAKTKPREEQFNSTYRVVSVLTVLHQDWLNGKEYKCKVSNKGLPSSIEKTISKAKGQPREPQVYTLPPSQEEMTKNQVSLTCLVKGFYPSDIAVEWESNGQPENNYKTTPPVLDSDGSFFLYSRLTVDKSRWQEGNVFSCSVMHEALHNHYTQKSLSLSLGGGGSGSAHPIPDSSPLLQFGGQVRQRYLYTDDACQTEAHLEIREDGTVGGAADQSPESLLQLKALKPGVIQILGVKTSRFLCQRPDGALYGSLHFDPEACSFRELLLEDGYNVYQSEAHGLPLHLPGCKSPHRDPAPRGPARFLPLPGLPPAPPEPPGILAPQPPDVGSSDPLSMVYPSQGRSPSYAS

SEQ ID NO: 2310 - protein, 473 aa, Artificial Sequence
  Fusion Protein
HGEGTFTSDKSQLLEKELAHLFIEWLIAGGHSKQKPPPKGGGGGGGSGGGGSGGGGSAESKYGPPCPPCPAPEFEGGPSVFLFPPKPKDTLMISRTPEVTCVVVDVSQEDPEVQFNWYVDGVEVHNAKTKPREEQFNSTYRVVSVLTVLHQDWLNGKEYKCKVSNKGLPSSIEKTISKAKGQPREPQVYTLPPSQEEMTKNQVSLTCLVKGFYPSDIAVEWESNGQPENNYKTTPPVLDSDGSFFLYSRLTVDKSRWQEGNVFSCSVMHEALHNHYTQKSLSLSLGGGGSGSAHPIPDSSPLLQFGGQVRQRYLYTDDACQTEAHLEIREDGTVGGAADQSPESLLQLKALKPGVIQILGVKTSRFLCQRPDGALYGSLHFDPEACSFRELLLEDGYNVYQSEAHGLPLHLCGNKSPHRDPAPRGPARFLPLPGLPPAPPEPPGILAPQPPDVGSSDPLSMVGSQGRSPSYAS

SEQ ID NO: 2311 - protein, 474 aa, Artificial Sequence
  Fusion Protein
HGEGTFTSDKSQLLEKELAHLFIEWLIAGGHSKQKPPPKGGGGGGGSGGGGSGGGGSAESKYGPPCPPCPAPEFEGGPSVFLFPPKPKDTLMISRTPEVTCVVVDVSQEDPEVQFNWYVDGVEVHNAKTKPREEQFNSTYRVVSVLTVLHQDWLNGKEYKCKVSNKGLPSSIEKTISKAKGQPREPQVYTLPPSQEEMTKNQVSLTCLVKGFYPSDIAVEWESNGQPENNYKTTPPVLDSDGSFFLYSRLTVDKSRWQEGNVFSCSVMHEALHNHYTQKSLSLSLGGGGSGSAHPIPDSSPLLQFGGQVRQRYLYTDDACQTEAHLEIREDGTVGGAADQSPESLLQLKALKPGVIQILGVKTSRFLCQRPDGALYGSLHFDPEACSFRELLLEDGYNVYQSEAHGLPLHLCGNKSPHRDPAPRGPARFLPLPGLPPAPPEPPGILAPQPPDVGSSDPLSMVYPSQGRSPSYAS

SEQ ID NO: 2312 - protein, 471 aa, Artificial Sequence
  Fusion Protein
HGEGTFTSDKSQLLEKRLAHLFIEWLLAGGHSSGKLSPKGGGGGGGSGGGGSGGGGSADKTHTCPPCPAPEAAGGPSVFLFPPKPKDTLMISRTPEVTCVVVDVSHEDPEVKFNWYVDGVEVHNAKTKPREEQYNSTYRVVSVLTVLHQDWLNGKEYKCKVSNKALPAPIEKTISKAKGQPREPQVYTLPPSRDELTKNQVSLTCLVKGFYPSDIAVEWESNGQPENNYKTTPPVLDSDGSFFLYSKLTVDKSRWQQGNVFSCSVMHEALHNHYTQKSLSLSPGGGGSGSAHPIPDSSPLLQFGGQVRQRYLYTDDACQTEAHLEIREDGTVGGAADQSPESLLQLKALKPGVIQILGVKTSRFLCQRPDGALYGSLHFDPEACSFRELLLEDGYNVYQSEAHGLPLHLPGCKSPHRDPAPRGPARFLPLPGLPPAPPEPPGILAPQPPDVGSSDPLSMVGSQGRSPSYAS

SEQ ID NO: 2313 - protein, 472 aa, Artificial Sequence
  Fusion Protein
HGEGTFTSDKSQLLEKRLAHLFIEWLLAGGHSSGKLSPKGGGGGGGSGGGGSGGGGSADKTHTCPPCPAPEAAGGPSVFLFPPKPKDTLMISRTPEVTCVVVDVSHEDPEVKFNWYVDGVEVHNAKTKPREEQYNSTYRVVSVLTVLHQDWLNGKEYKCKVSNKALPAPIEKTISKAKGQPREPQVYTLPPSRDELTKNQVSLTCLVKGFYPSDIAVEWESNGQPENNYKTTPPVLDSDGSFFLYSKLTVDKSRWQQGNVFSCSVMHEALHNHYTQKSLSLSPGGGGSGSAHPIPDSSPLLQFGGQVRQRYLYTDDACQTEAHLEIREDGTVGGAADQSPESLLQLKALKPGVIQILGVKTSRFLCQRPDGALYGSLHFDPEACSFRELLLEDGYNVYQSEAHGLPLHLPGCKSPHRDPAPRGPARFLPLPGLPPAPPEPPGILAPQPPDVGSSDPLSMVYPSQGRSPSYAS

SEQ ID NO: 2314 - protein, 471 aa, Artificial Sequence
  Fusion Protein
HGEGTFTSDKSQLLEKRLAHLFIEWLLAGGHSSGKLSPKGGGGGGGSGGGGSGGGGSADKTHTCPPCPAPEAAGGPSVFLFPPKPKDTLMISRTPEVTCVVVDVSHEDPEVKFNWYVDGVEVHNAKTKPREEQYNSTYRVVSVLTVLHQDWLNGKEYKCKVSNKALPAPIEKTISKAKGQPREPQVYTLPPSRDELTKNQVSLTCLVKGFYPSDIAVEWESNGQPENNYKTTPPVLDSDGSFFLYSKLTVDKSRWQQGNVFSCSVMHEALHNHYTQKSLSLSPGGGGSGSAHPIPDSSPLLQFGGQVRQRYLYTDDACQTEAHLEIREDGTVGGAADQSPESLLQLKALKPGVIQILGVKTSRFLCQRPDGALYGSLHFDPEACSFRELLLEDGYNVYQSEAHGLPLHLCGNKSPHRDPAPRGPARFLPLPGLPPAPPEPPGILAPQPPDVGSSDPLSMVGSQGRSPSYAS

SEQ ID NO: 2315 - protein, 472 aa, Artificial Sequence
  Fusion Protein
HGEGTFTSDKSQLLEKRLAHLFIEWLLAGGHSSGKLSPKGGGGGGGSGGGGSGGGGSADKTHTCPPCPAPEAAGGPSVFLFPPKPKDTLMISRTPEVTCVVVDVSHEDPEVKFNWYVDGVEVHNAKTKPREEQYNSTYRVVSVLTVLHQDWLNGKEYKCKVSNKALPAPIEKTISKAKGQPREPQVYTLPPSRDELTKNQVSLTCLVKGFYPSDIAVEWESNGQPENNYKTTPPVLDSDGSFFLYSKLTVDKSRWQQGNVFSCSVMHEALHNHYTQKSLSLSPGGGGSGSAHPIPDSSPLLQFGGQVRQRYLYTDDACQTEAHLEIREDGTVGGAADQSPESLLQLKALKPGVIQILGVKTSRFLCQRPDGALYGSLHFDPEACSFRELLLEDGYNVYQSEAHGLPLHLCGNKSPHRDPAPRGPARFLPLPGLPPAPPEPPGILAPQPPDVGSSDPLSMVYPSQGRSPSYAS

SEQ ID NO: 2316 - protein, 471 aa, Artificial Sequence
  Fusion Protein
HGEGTFTSDKSQLLEKRLAHLFIEWLLAGGHSSGKLSPKGGGGGGGSGGGGSGGGGSADKTHTCPPCPAPELLGGPSVFLFPPKPKDTLMISRTPEVTCVVVDVSHEDPEVKFNWYVDGVEVHNAKTKPREEQYNNASRVVSVLTVLHQDWLNGKEYKCKVSNKALPAPIEKTISKAKGQPREPQVYTLPPSRDELTKNQVSLTCLVKGFYPSDIAVEWESNGQPENNYKTTPPVLDSDGSFFLYSKLTVDKSRWQQGNVFSCSVMHEALHNHYTQKSLSLSPGGGGSGSAHPIPDSSPLLQFGGQVRQRYLYTDDACQTEAHLEIREDGTVGGAADQSPESLLQLKALKPGVIQILGVKTSRFLCQRPDGALYGSLHFDPEACSFRELLLEDGYNVYQSEAHGLPLHLPGCKSPHRDPAPRGPARFLPLPGLPPAPPEPPGILAPQPPDVGSSDPLSMVGSQGRSPSYAS

SEQ ID NO: 2317 - protein, 472 aa, Artificial Sequence
  Fusion Protein
HGEGTFTSDKSQLLEKRLAHLFIEWLLAGGHSSGKLSPKGGGGGGGSGGGGSGGGGSADKTHTCPPCPAPELLGGPSVFLFPPKPKDTLMISRTPEVTCVVVDVSHEDPEVKFNWYVDGVEVHNAKTKPREEQYNNASRVVSVLTVLHQDWLNGKEYKCKVSNKALPAPIEKTISKAKGQPREPQVYTLPPSRDELTKNQVSLTCLVKGFYPSDIAVEWESNGQPENNYKTTPPVLDSDGSFFLYSKLTVDKSRWQQGNVFSCSVMHEALHNHYTQKSLSLSPGGGGSGSAHPIPDSSPLLQFGGQVRQRYLYTDDACQTEAHLEIREDGTVGGAADQSPESLLQLKALKPGVIQILGVKTSRFLCQRPDGALYGSLHFDPEACSFRELLLEDGYNVYQSEAHGLPLHLPGCKSPHRDPAPRGPARFLPLPGLPPAPPEPPGILAPQPPDVGSSDPLSMVYPSQGRSPSYAS

SEQ ID NO: 2318 - protein, 471 aa, Artificial Sequence
  Fusion Protein
HGEGTFTSDKSQLLEKRLAHLFIEWLLAGGHSSGKLSPKGGGGGGGSGGGGSGGGGSADKTHTCPPCPAPELLGGPSVFLFPPKPKDTLMISRTPEVTCVVVDVSHEDPEVKFNWYVDGVEVHNAKTKPREEQYNNASRVVSVLTVLHQDWLNGKEYKCKVSNKALPAPIEKTISKAKGQPREPQVYTLPPSRDELTKNQVSLTCLVKGFYPSDIAVEWESNGQPENNYKTTPPVLDSDGSFFLYSKLTVDKSRWQQGNVFSCSVMHEALHNHYTQKSLSLSPGGGGSGSAHPIPDSSPLLQFGGQVRQRYLYTDDACQTEAHLEIREDGTVGGAADQSPESLLQLKALKPGVIQILGVKTSRFLCQRPDGALYGSLHFDPEACSFRELLLEDGYNVYQSEAHGLPLHLCGNKSPHRDPAPRGPARFLPLPGLPPAPPEPPGILAPQPPDVGSSDPLSMVGSQGRSPSYAS

SEQ ID NO: 2319 - protein, 472 aa, Artificial Sequence
  Fusion Protein
HGEGTFTSDKSQLLEKRLAHLFIEWLLAGGHSSGKLSPKGGGGGGGSGGGGSGGGGSADKTHTCPPCPAPELLGGPSVFLFPPKPKDTLMISRTPEVTCVVVDVSHEDPEVKFNWYVDGVEVHNAKTKPREEQYNNASRVVSVLTVLHQDWLNGKEYKCKVSNKALPAPIEKTISKAKGQPREPQVYTLPPSRDELTKNQVSLTCLVKGFYPSDIAVEWESNGQPENNYKTTPPVLDSDGSFFLYSKLTVDKSRWQQGNVFSCSVMHEALHNHYTQKSLSLSPGGGGSGSAHPIPDSSPLLQFGGQVRQRYLYTDDACQTEAHLEIREDGTVGGAADQSPESLLQLKALKPGVIQILGVKTSRFLCQRPDGALYGSLHFDPEACSFRELLLEDGYNVYQSEAHGLPLHLCGNKSPHRDPAPRGPARFLPLPGLPPAPPEPPGILAPQPPDVGSSDPLSMVYPSQGRSPSYAS

SEQ ID NO: 2320 - protein, 474 aa, Artificial Sequence
  Fusion Protein
HGEGTFTSDKSQLLEKRLAHLFIEWLLAGGHSSGKLSPKGGGGGGGSGGGGSGGGGSAESKYGPPCPPCPAPEFEGGPSVFLFPPKPKDTLMISRTPEVTCVVVDVSQEDPEVQFNWYVDGVEVHNAKTKPREEQFNSTYRVVSVLTVLHQDWLNGKEYKCKVSNKGLPSSIEKTISKAKGQPREPQVYTLPPSQEEMTKNQVSLTCLVKGFYPSDIAVEWESNGQPENNYKTTPPVLDSDGSFFLYSRLTVDKSRWQEGNVFSCSVMHEALHNHYTQKSLSLSLGGGGSGSAHPIPDSSPLLQFGGQVRQRYLYTDDACQTEAHLEIREDGTVGGAADQSPESLLQLKALKPGVIQILGVKTSRFLCQRPDGALYGSLHFDPEACSFRELLLEDGYNVYQSEAHGLPLHLPGCKSPHRDPAPRGPARFLPLPGLPPAPPEPPGILAPQPPDVGSSDPLSMVYPSQGRSPSYAS

SEQ ID NO: 2321 - protein, 473 aa, Artificial Sequence
  Fusion Protein
HGEGTFTSDKSQLLEKRLAHLFIEWLLAGGHSSGKLSPKGGGGGGGSGGGGSGGGGSAESKYGPPCPPCPAPEFEGGPSVFLFPPKPKDTLMISRTPEVTCVVVDVSQEDPEVQFNWYVDGVEVHNAKTKPREEQFNSTYRVVSVLTVLHQDWLNGKEYKCKVSNKGLPSSIEKTISKAKGQPREPQVYTLPPSQEEMTKNQVSLTCLVKGFYPSDIAVEWESNGQPENNYKTTPPVLDSDGSFFLYSRLTVDKSRWQEGNVFSCSVMHEALHNHYTQKSLSLSLGGGGSGSAHPIPDSSPLLQFGGQVRQRYLYTDDACQTEAHLEIREDGTVGGAADQSPESLLQLKALKPGVIQILGVKTSRFLCQRPDGALYGSLHFDPEACSFRELLLEDGYNVYQSEAHGLPLHLCGNKSPHRDPAPRGPARFLPLPGLPPAPPEPPGILAPQPPDVGSSDPLSMVGSQGRSPSYAS

SEQ ID NO: 2322 - protein, 474 aa, Artificial Sequence
  Fusion Protein
HGEGTFTSDKSQLLEKRLAHLFIEWLLAGGHSSGKLSPKGGGGGGGSGGGGSGGGGSAESKYGPPCPPCPAPEFEGGPSVFLFPPKPKDTLMISRTPEVTCVVVDVSQEDPEVQFNWYVDGVEVHNAKTKPREEQFNSTYRVVSVLTVLHQDWLNGKEYKCKVSNKGLPSSIEKTISKAKGQPREPQVYTLPPSQEEMTKNQVSLTCLVKGFYPSDIAVEWESNGQPENNYKTTPPVLDSDGSFFLYSRLTVDKSRWQEGNVFSCSVMHEALHNHYTQKSLSLSLGGGGSGSAHPIPDSSPLLQFGGQVRQRYLYTDDACQTEAHLEIREDGTVGGAADQSPESLLQLKALKPGVIQILGVKTSRFLCQRPDGALYGSLHFDPEACSFRELLLEDGYNVYQSEAHGLPLHLCGNKSPHRDPAPRGPARFLPLPGLPPAPPEPPGILAPQPPDVGSSDPLSMVYPSQGRSPSYAS

SEQ ID NO: 2323 - protein, 471 aa, Artificial Sequence
  Fusion Protein
HGEGTFTSDKSQLLEKRLAHLFIEWLIKGGHSKQKPPPKGGGGGGGSGGGGSGGGGSADKTHTCPPCPAPEAAGGPSVFLFPPKPKDTLMISRTPEVTCVVVDVSHEDPEVKFNWYVDGVEVHNAKTKPREEQYNSTYRVVSVLTVLHQDWLNGKEYKCKVSNKALPAPIEKTISKAKGQPREPQVYTLPPSRDELTKNQVSLTCLVKGFYPSDIAVEWESNGQPENNYKTTPPVLDSDGSFFLYSKLTVDKSRWQQGNVFSCSVMHEALHNHYTQKSLSLSPGGGGSGSAHPIPDSSPLLQFGGQVRQRYLYTDDACQTEAHLEIREDGTVGGAADQSPESLLQLKALKPGVIQILGVKTSRFLCQRPDGALYGSLHFDPEACSFRELLLEDGYNVYQSEAHGLPLHLPGCKSPHRDPAPRGPARFLPLPGLPPAPPEPPGILAPQPPDVGSSDPLSMVGSQGRSPSYAS

SEQ ID NO: 2324 - protein, 472 aa, Artificial Sequence
  Fusion Protein
HGEGTFTSDKSQLLEKRLAHLFIEWLIKGGHSKQKPPPKGGGGGGGSGGGGSGGGGSADKTHTCPPCPAPEAAGGPSVFLFPPKPKDTLMISRTPEVTCVVVDVSHEDPEVKFNWYVDGVEVHNAKTKPREEQYNSTYRVVSVLTVLHQDWLNGKEYKCKVSNKALPAPIEKTISKAKGQPREPQVYTLPPSRDELTKNQVSLTCLVKGFYPSDIAVEWESNGQPENNYKTTPPVLDSDGSFFLYSKLTVDKSRWQQGNVFSCSVMHEALHNHYTQKSLSLSPGGGGSGSAHPIPDSSPLLQFGGQVRQRYLYTDDACQTEAHLEIREDGTVGGAADQSPESLLQLKALKPGVIQILGVKTSRFLCQRPDGALYGSLHFDPEACSFRELLLEDGYNVYQSEAHGLPLHLPGCKSPHRDPAPRGPARFLPLPGLPPAPPEPPGILAPQPPDVGSSDPLSMVYPSQGRSPSYAS

SEQ ID NO: 2325 - protein, 471 aa, Artificial Sequence
  Fusion Protein
HGEGTFTSDKSQLLEKRLAHLFIEWLIKGGHSKQKPPPKGGGGGGGSGGGGSGGGGSADKTHTCPPCPAPEAAGGPSVFLFPPKPKDTLMISRTPEVTCVVVDVSHEDPEVKFNWYVDGVEVHNAKTKPREEQYNSTYRVVSVLTVLHQDWLNGKEYKCKVSNKALPAPIEKTISKAKGQPREPQVYTLPPSRDELTKNQVSLTCLVKGFYPSDIAVEWESNGQPENNYKTTPPVLDSDGSFFLYSKLTVDKSRWQQGNVFSCSVMHEALHNHYTQKSLSLSPGGGGSGSAHPIPDSSPLLQFGGQVRQRYLYTDDACQTEAHLEIREDGTVGGAADQSPESLLQLKALKPGVIQILGVKTSRFLCQRPDGALYGSLHFDPEACSFRELLLEDGYNVYQSEAHGLPLHLCGNKSPHRDPAPRGPARFLPLPGLPPAPPEPPGILAPQPPDVGSSDPLSMVGSQGRSPSYAS

SEQ ID NO: 2326 - protein, 472 aa, Artificial Sequence
  Fusion Protein
HGEGTFTSDKSQLLEKRLAHLFIEWLIKGGHSKQKPPPKGGGGGGGSGGGGSGGGGSADKTHTCPPCPAPEAAGGPSVFLFPPKPKDTLMISRTPEVTCVVVDVSHEDPEVKFNWYVDGVEVHNAKTKPREEQYNSTYRVVSVLTVLHQDWLNGKEYKCKVSNKALPAPIEKTISKAKGQPREPQVYTLPPSRDELTKNQVSLTCLVKGFYPSDIAVEWESNGQPENNYKTTPPVLDSDGSFFLYSKLTVDKSRWQQGNVFSCSVMHEALHNHYTQKSLSLSPGGGGSGSAHPIPDSSPLLQFGGQVRQRYLYTDDACQTEAHLEIREDGTVGGAADQSPESLLQLKALKPGVIQILGVKTSRFLCQRPDGALYGSLHFDPEACSFRELLLEDGYNVYQSEAHGLPLHLCGNKSPHRDPAPRGPARFLPLPGLPPAPPEPPGILAPQPPDVGSSDPLSMVYPSQGRSPSYAS

SEQ ID NO: 2327 - protein, 471 aa, Artificial Sequence
  Fusion Protein
HGEGTFTSDKSQLLEKRLAHLFIEWLIKGGHSKQKPPPKGGGGGGGSGGGGSGGGGSADKTHTCPPCPAPELLGGPSVFLFPPKPKDTLMISRTPEVTCVVVDVSHEDPEVKFNWYVDGVEVHNAKTKPREEQYNNASRVVSVLTVLHQDWLNGKEYKCKVSNKALPAPIEKTISKAKGQPREPQVYTLPPSRDELTKNQVSLTCLVKGFYPSDIAVEWESNGQPENNYKTTPPVLDSDGSFFLYSKLTVDKSRWQQGNVFSCSVMHEALHNHYTQKSLSLSPGGGGSGSAHPIPDSSPLLQFGGQVRQRYLYTDDACQTEAHLEIREDGTVGGAADQSPESLLQLKALKPGVIQILGVKTSRFLCQRPDGALYGSLHFDPEACSFRELLLEDGYNVYQSEAHGLPLHLPGCKSPHRDPAPRGPARFLPLPGLPPAPPEPPGILAPQPPDVGSSDPLSMVGSQGRSPSYAS

SEQ ID NO: 2328 - protein, 472 aa, Artificial Sequence
  Fusion Protein
HGEGTFTSDKSQLLEKRLAHLFIEWLIKGGHSKQKPPPKGGGGGGGSGGGGSGGGGSADKTHTCPPCPAPELLGGPSVFLFPPKPKDTLMISRTPEVTCVVVDVSHEDPEVKFNWYVDGVEVHNAKTKPREEQYNNASRVVSVLTVLHQDWLNGKEYKCKVSNKALPAPIEKTISKAKGQPREPQVYTLPPSRDELTKNQVSLTCLVKGFYPSDIAVEWESNGQPENNYKTTPPVLDSDGSFFLYSKLTVDKSRWQQGNVFSCSVMHEALHNHYTQKSLSLSPGGGGSGSAHPIPDSSPLLQFGGQVRQRYLYTDDACQTEAHLEIREDGTVGGAADQSPESLLQLKALKPGVIQILGVKTSRFLCQRPDGALYGSLHFDPEACSFRELLLEDGYNVYQSEAHGLPLHLPGCKSPHRDPAPRGPARFLPLPGLPPAPPEPPGILAPQPPDVGSSDPLSMVYPSQGRSPSYAS

SEQ ID NO: 2329 - protein, 471 aa, Artificial Sequence
  Fusion Protein
HGEGTFTSDKSQLLEKRLAHLFIEWLIKGGHSKQKPPPKGGGGGGGSGGGGSGGGGSADKTHTCPPCPAPELLGGPSVFLFPPKPKDTLMISRTPEVTCVVVDVSHEDPEVKFNWYVDGVEVHNAKTKPREEQYNNASRVVSVLTVLHQDWLNGKEYKCKVSNKALPAPIEKTISKAKGQPREPQVYTLPPSRDELTKNQVSLTCLVKGFYPSDIAVEWESNGQPENNYKTTPPVLDSDGSFFLYSKLTVDKSRWQQGNVFSCSVMHEALHNHYTQKSLSLSPGGGGSGSAHPIPDSSPLLQFGGQVRQRYLYTDDACQTEAHLEIREDGTVGGAADQSPESLLQLKALKPGVIQILGVKTSRFLCQRPDGALYGSLHFDPEACSFRELLLEDGYNVYQSEAHGLPLHLCGNKSPHRDPAPRGPARFLPLPGLPPAPPEPPGILAPQPPDVGSSDPLSMVGSQGRSPSYAS

SEQ ID NO: 2330 - protein, 472 aa, Artificial Sequence
  Fusion Protein
HGEGTFTSDKSQLLEKRLAHLFIEWLIKGGHSKQKPPPKGGGGGGGSGGGGSGGGGSADKTHTCPPCPAPELLGGPSVFLFPPKPKDTLMISRTPEVTCVVVDVSHEDPEVKFNWYVDGVEVHNAKTKPREEQYNNASRVVSVLTVLHQDWLNGKEYKCKVSNKALPAPIEKTISKAKGQPREPQVYTLPPSRDELTKNQVSLTCLVKGFYPSDIAVEWESNGQPENNYKTTPPVLDSDGSFFLYSKLTVDKSRWQQGNVFSCSVMHEALHNHYTQKSLSLSPGGGGSGSAHPIPDSSPLLQFGGQVRQRYLYTDDACQTEAHLEIREDGTVGGAADQSPESLLQLKALKPGVIQILGVKTSRFLCQRPDGALYGSLHFDPEACSFRELLLEDGYNVYQSEAHGLPLHLCGNKSPHRDPAPRGPARFLPLPGLPPAPPEPPGILAPQPPDVGSSDPLSMVYPSQGRSPSYAS

SEQ ID NO: 2331 - protein, 474 aa, Artificial Sequence
  Fusion Protein
HGEGTFTSDKSQLLEKRLAHLFIEWLIKGGHSKQKPPPKGGGGGGGSGGGGSGGGGSAESKYGPPCPPCPAPEFEGGPSVFLFPPKPKDTLMISRTPEVTCVVVDVSQEDPEVQFNWYVDGVEVHNAKTKPREEQFNSTYRVVSVLTVLHQDWLNGKEYKCKVSNKGLPSSIEKTISKAKGQPREPQVYTLPPSQEEMTKNQVSLTCLVKGFYPSDIAVEWESNGQPENNYKTTPPVLDSDGSFFLYSRLTVDKSRWQEGNVFSCSVMHEALHNHYTQKSLSLSLGGGGSGSAHPIPDSSPLLQFGGQVRQRYLYTDDACQTEAHLEIREDGTVGGAADQSPESLLQLKALKPGVIQILGVKTSRFLCQRPDGALYGSLHFDPEACSFRELLLEDGYNVYQSEAHGLPLHLPGCKSPHRDPAPRGPARFLPLPGLPPAPPEPPGILAPQPPDVGSSDPLSMVYPSQGRSPSYAS

SEQ ID NO: 2332 - protein, 473 aa, Artificial Sequence
  Fusion Protein
HGEGTFTSDKSQLLEKRLAHLFIEWLIKGGHSKQKPPPKGGGGGGGSGGGGSGGGGSAESKYGPPCPPCPAPEFEGGPSVFLFPPKPKDTLMISRTPEVTCVVVDVSQEDPEVQFNWYVDGVEVHNAKTKPREEQFNSTYRVVSVLTVLHQDWLNGKEYKCKVSNKGLPSSIEKTISKAKGQPREPQVYTLPPSQEEMTKNQVSLTCLVKGFYPSDIAVEWESNGQPENNYKTTPPVLDSDGSFFLYSRLTVDKSRWQEGNVFSCSVMHEALHNHYTQKSLSLSLGGGGSGSAHPIPDSSPLLQFGGQVRQRYLYTDDACQTEAHLEIREDGTVGGAADQSPESLLQLKALKPGVIQILGVKTSRFLCQRPDGALYGSLHFDPEACSFRELLLEDGYNVYQSEAHGLPLHLCGNKSPHRDPAPRGPARFLPLPGLPPAPPEPPGILAPQPPDVGSSDPLSMVGSQGRSPSYAS

SEQ ID NO: 2333 - protein, 474 aa, Artificial Sequence
  Fusion Protein
HGEGTFTSDKSQLLEKRLAHLFIEWLIKGGHSKQKPPPKGGGGGGGSGGGGSGGGGSAESKYGPPCPPCPAPEFEGGPSVFLFPPKPKDTLMISRTPEVTCVVVDVSQEDPEVQFNWYVDGVEVHNAKTKPREEQFNSTYRVVSVLTVLHQDWLNGKEYKCKVSNKGLPSSIEKTISKAKGQPREPQVYTLPPSQEEMTKNQVSLTCLVKGFYPSDIAVEWESNGQPENNYKTTPPVLDSDGSFFLYSRLTVDKSRWQEGNVFSCSVMHEALHNHYTQKSLSLSLGGGGSGSAHPIPDSSPLLQFGGQVRQRYLYTDDACQTEAHLEIREDGTVGGAADQSPESLLQLKALKPGVIQILGVKTSRFLCQRPDGALYGSLHFDPEACSFRELLLEDGYNVYQSEAHGLPLHLCGNKSPHRDPAPRGPARFLPLPGLPPAPPEPPGILAPQPPDVGSSDPLSMVYPSQGRSPSYAS

SEQ ID NO: 2334 - protein, 471 aa, Artificial Sequence
  Fusion Protein
HGEGTFTSDLSKQLEEEAVQLFIEWLLATGPSSGEPPPKGGGGGGGSGGGGSGGGGSADKTHTCPPCPAPEAAGGPSVFLFPPKPKDTLMISRTPEVTCVVVDVSHEDPEVKFNWYVDGVEVHNAKTKPREEQYNSTYRVVSVLTVLHQDWLNGKEYKCKVSNKALPAPIEKTISKAKGQPREPQVYTLPPSRDELTKNQVSLTCLVKGFYPSDIAVEWESNGQPENNYKTTPPVLDSDGSFFLYSKLTVDKSRWQQGNVFSCSVMHEALHNHYTQKSLSLSPGGGGSGSAHPIPDSSPLLQFGGQVRQRYLYTDDACQTEAHLEIREDGTVGGAADQSPESLLQLKALKPGVIQILGVKTSRFLCQRPDGALYGSLHFDPEACSFRELLLEDGYNVYQSEAHGLPLHLPGCKSPHRDPAPRGPARFLPLPGLPPAPPEPPGILAPQPPDVGSSDPLSMVGSQGRSPSYAS

SEQ ID NO: 2335 - protein, 472 aa, Artificial Sequence
  Fusion Protein
HGEGTFTSDLSKQLEEEAVQLFIEWLLATGPSSGEPPPKGGGGGGGSGGGGSGGGGSADKTHTCPPCPAPEAAGGPSVFLFPPKPKDTLMISRTPEVTCVVVDVSHEDPEVKFNWYVDGVEVHNAKTKPREEQYNSTYRVVSVLTVLHQDWLNGKEYKCKVSNKALPAPIEKTISKAKGQPREPQVYTLPPSRDELTKNQVSLTCLVKGFYPSDIAVEWESNGQPENNYKTTPPVLDSDGSFFLYSKLTVDKSRWQQGNVFSCSVMHEALHNHYTQKSLSLSPGGGGSGSAHPIPDSSPLLQFGGQVRQRYLYTDDACQTEAHLEIREDGTVGGAADQSPESLLQLKALKPGVIQILGVKTSRFLCQRPDGALYGSLHFDPEACSFRELLLEDGYNVYQSEAHGLPLHLPGCKSPHRDPAPRGPARFLPLPGLPPAPPEPPGILAPQPPDVGSSDPLSMVYPSQGRSPSYAS

SEQ ID NO: 2336 - protein, 471 aa, Artificial Sequence
  Fusion Protein
HGEGTFTSDLSKQLEEEAVQLFIEWLLATGPSSGEPPPKGGGGGGGSGGGGSGGGGSADKTHTCPPCPAPEAAGGPSVFLFPPKPKDTLMISRTPEVTCVVVDVSHEDPEVKFNWYVDGVEVHNAKTKPREEQYNSTYRVVSVLTVLHQDWLNGKEYKCKVSNKALPAPIEKTISKAKGQPREPQVYTLPPSRDELTKNQVSLTCLVKGFYPSDIAVEWESNGQPENNYKTTPPVLDSDGSFFLYSKLTVDKSRWQQGNVFSCSVMHEALHNHYTQKSLSLSPGGGGSGSAHPIPDSSPLLQFGGQVRQRYLYTDDACQTEAHLEIREDGTVGGAADQSPESLLQLKALKPGVIQILGVKTSRFLCQRPDGALYGSLHFDPEACSFRELLLEDGYNVYQSEAHGLPLHLCGNKSPHRDPAPRGPARFLPLPGLPPAPPEPPGILAPQPPDVGSSDPLSMVGSQGRSPSYAS

SEQ ID NO: 2337 - protein, 472 aa, Artificial Sequence
  Fusion Protein
HGEGTFTSDLSKQLEEEAVQLFIEWLLATGPSSGEPPPKGGGGGGGSGGGGSGGGGSADKTHTCPPCPAPEAAGGPSVFLFPPKPKDTLMISRTPEVTCVVVDVSHEDPEVKFNWYVDGVEVHNAKTKPREEQYNSTYRVVSVLTVLHQDWLNGKEYKCKVSNKALPAPIEKTISKAKGQPREPQVYTLPPSRDELTKNQVSLTCLVKGFYPSDIAVEWESNGQPENNYKTTPPVLDSDGSFFLYSKLTVDKSRWQQGNVFSCSVMHEALHNHYTQKSLSLSPGGGGSGSAHPIPDSSPLLQFGGQVRQRYLYTDDACQTEAHLEIREDGTVGGAADQSPESLLQLKALKPGVIQILGVKTSRFLCQRPDGALYGSLHFDPEACSFRELLLEDGYNVYQSEAHGLPLHLCGNKSPHRDPAPRGPARFLPLPGLPPAPPEPPGILAPQPPDVGSSDPLSMVYPSQGRSPSYAS

SEQ ID NO: 2338 - protein, 471 aa, Artificial Sequence
  Fusion Protein
HGEGTFTSDLSKQLEEEAVQLFIEWLLATGPSSGEPPPKGGGGGGGSGGGGSGGGGSADKTHTCPPCPAPELLGGPSVFLFPPKPKDTLMISRTPEVTCVVVDVSHEDPEVKFNWYVDGVEVHNAKTKPREEQYNNASRVVSVLTVLHQDWLNGKEYKCKVSNKALPAPIEKTISKAKGQPREPQVYTLPPSRDELTKNQVSLTCLVKGFYPSDIAVEWESNGQPENNYKTTPPVLDSDGSFFLYSKLTVDKSRWQQGNVFSCSVMHEALHNHYTQKSLSLSPGGGGSGSAHPIPDSSPLLQFGGQVRQRYLYTDDACQTEAHLEIREDGTVGGAADQSPESLLQLKALKPGVIQILGVKTSRFLCQRPDGALYGSLHFDPEACSFRELLLEDGYNVYQSEAHGLPLHLPGCKSPHRDPAPRGPARFLPLPGLPPAPPEPPGILAPQPPDVGSSDPLSMVGSQGRSPSYAS

SEQ ID NO: 2339 - protein, 472 aa, Artificial Sequence
  Fusion Protein
HGEGTFTSDLSKQLEEEAVQLFIEWLLATGPSSGEPPPKGGGGGGGSGGGGSGGGGSADKTHTCPPCPAPELLGGPSVFLFPPKPKDTLMISRTPEVTCVVVDVSHEDPEVKFNWYVDGVEVHNAKTKPREEQYNNASRVVSVLTVLHQDWLNGKEYKCKVSNKALPAPIEKTISKAKGQPREPQVYTLPPSRDELTKNQVSLTCLVKGFYPSDIAVEWESNGQPENNYKTTPPVLDSDGSFFLYSKLTVDKSRWQQGNVFSCSVMHEALHNHYTQKSLSLSPGGGGSGSAHPIPDSSPLLQFGGQVRQRYLYTDDACQTEAHLEIREDGTVGGAADQSPESLLQLKALKPGVIQILGVKTSRFLCQRPDGALYGSLHFDPEACSFRELLLEDGYNVYQSEAHGLPLHLPGCKSPHRDPAPRGPARFLPLPGLPPAPPEPPGILAPQPPDVGSSDPLSMVYPSQGRSPSYAS

SEQ ID NO: 2340 - protein, 471 aa, Artificial Sequence
  Fusion Protein
HGEGTFTSDLSKQLEEEAVQLFIEWLLATGPSSGEPPPKGGGGGGGSGGGGSGGGGSADKTHTCPPCPAPELLGGPSVFLFPPKPKDTLMISRTPEVTCVVVDVSHEDPEVKFNWYVDGVEVHNAKTKPREEQYNNASRVVSVLTVLHQDWLNGKEYKCKVSNKALPAPIEKTISKAKGQPREPQVYTLPPSRDELTKNQVSLTCLVKGFYPSDIAVEWESNGQPENNYKTTPPVLDSDGSFFLYSKLTVDKSRWQQGNVFSCSVMHEALHNHYTQKSLSLSPGGGGSGSAHPIPDSSPLLQFGGQVRQRYLYTDDACQTEAHLEIREDGTVGGAADQSPESLLQLKALKPGVIQILGVKTSRFLCQRPDGALYGSLHFDPEACSFRELLLEDGYNVYQSEAHGLPLHLCGNKSPHRDPAPRGPARFLPLPGLPPAPPEPPGILAPQPPDVGSSDPLSMVGSQGRSPSYAS

SEQ ID NO: 2341 - protein, 472 aa, Artificial Sequence
  Fusion Protein
HGEGTFTSDLSKQLEEEAVQLFIEWLLATGPSSGEPPPKGGGGGGGSGGGGSGGGGSADKTHTCPPCPAPELLGGPSVFLFPPKPKDTLMISRTPEVTCVVVDVSHEDPEVKFNWYVDGVEVHNAKTKPREEQYNNASRVVSVLTVLHQDWLNGKEYKCKVSNKALPAPIEKTISKAKGQPREPQVYTLPPSRDELTKNQVSLTCLVKGFYPSDIAVEWESNGQPENNYKTTPPVLDSDGSFFLYSKLTVDKSRWQQGNVFSCSVMHEALHNHYTQKSLSLSPGGGGSGSAHPIPDSSPLLQFGGQVRQRYLYTDDACQTEAHLEIREDGTVGGAADQSPESLLQLKALKPGVIQILGVKTSRFLCQRPDGALYGSLHFDPEACSFRELLLEDGYNVYQSEAHGLPLHLCGNKSPHRDPAPRGPARFLPLPGLPPAPPEPPGILAPQPPDVGSSDPLSMVYPSQGRSPSYAS

SEQ ID NO: 2342 - protein, 473 aa, Artificial Sequence
  Fusion Protein
HGEGTFTSDLSKQLEEEAVQLFIEWLLATGPSSGEPPPKGGGGGGGSGGGGSGGGGSAESKYGPPCPPCPAPEFEGGPSVFLFPPKPKDTLMISRTPEVTCVVVDVSQEDPEVQFNWYVDGVEVHNAKTKPREEQFNSTYRVVSVLTVLHQDWLNGKEYKCKVSNKGLPSSIEKTISKAKGQPREPQVYTLPPSQEEMTKNQVSLTCLVKGFYPSDIAVEWESNGQPENNYKTTPPVLDSDGSFFLYSRLTVDKSRWQEGNVFSCSVMHEALHNHYTQKSLSLSLGGGGSGSAHPIPDSSPLLQFGGQVRQRYLYTDDACQTEAHLEIREDGTVGGAADQSPESLLQLKALKPGVIQILGVKTSRFLCQRPDGALYGSLHFDPEACSFRELLLEDGYNVYQSEAHGLPLHLPGCKSPHRDPAPRGPARFLPLPGLPPAPPEPPGILAPQPPDVGSSDPLSMVGSQGRSPSYAS

SEQ ID NO: 2343 - protein, 473 aa, Artificial Sequence
  Fusion Protein
HGEGTFTSDLSKQLEEEAVQLFIEWLLATGPSSGEPPPKGGGGGGGSGGGGSGGGGSAESKYGPPCPPCPAPEFEGGPSVFLFPPKPKDTLMISRTPEVTCVVVDVSQEDPEVQFNWYVDGVEVHNAKTKPREEQFNSTYRVVSVLTVLHQDWLNGKEYKCKVSNKGLPSSIEKTISKAKGQPREPQVYTLPPSQEEMTKNQVSLTCLVKGFYPSDIAVEWESNGQPENNYKTTPPVLDSDGSFFLYSRLTVDKSRWQEGNVFSCSVMHEALHNHYTQKSLSLSLGGGGSGSAHPIPDSSPLLQFGGQVRQRYLYTDDACQTEAHLEIREDGTVGGAADQSPESLLQLKALKPGVIQILGVKTSRFLCQRPDGALYGSLHFDPEACSFRELLLEDGYNVYQSEAHGLPLHLCGNKSPHRDPAPRGPARFLPLPGLPPAPPEPPGILAPQPPDVGSSDPLSMVGSQGRSPSYAS

SEQ ID NO: 2344 - protein, 474 aa, Artificial Sequence
  Fusion Protein
HGEGTFTSDLSKQLEEEAVQLFIEWLLATGPSSGEPPPKGGGGGGGSGGGGSGGGGSAESKYGPPCPPCPAPEFEGGPSVFLFPPKPKDTLMISRTPEVTCVVVDVSQEDPEVQFNWYVDGVEVHNAKTKPREEQFNSTYRVVSVLTVLHQDWLNGKEYKCKVSNKGLPSSIEKTISKAKGQPREPQVYTLPPSQEEMTKNQVSLTCLVKGFYPSDIAVEWESNGQPENNYKTTPPVLDSDGSFFLYSRLTVDKSRWQEGNVFSCSVMHEALHNHYTQKSLSLSLGGGGSGSAHPIPDSSPLLQFGGQVRQRYLYTDDACQTEAHLEIREDGTVGGAADQSPESLLQLKALKPGVIQILGVKTSRFLCQRPDGALYGSLHFDPEACSFRELLLEDGYNVYQSEAHGLPLHLCGNKSPHRDPAPRGPARFLPLPGLPPAPPEPPGILAPQPPDVGSSDPLSMVYPSQGRSPSYAS

SEQ ID NO: 2345 - protein, 471 aa, Artificial Sequence
  Fusion Protein
HGEGTFTSDKSKLLEKRLAHLFIEWLIKGGHKSGKPPPKGGGGGGGSGGGGSGGGGSADKTHTCPPCPAPEAAGGPSVFLFPPKPKDTLMISRTPEVTCVVVDVSHEDPEVKFNWYVDGVEVHNAKTKPREEQYNSTYRVVSVLTVLHQDWLNGKEYKCKVSNKALPAPIEKTISKAKGQPREPQVYTLPPSRDELTKNQVSLTCLVKGFYPSDIAVEWESNGQPENNYKTTPPVLDSDGSFFLYSKLTVDKSRWQQGNVFSCSVMHEALHNHYTQKSLSLSPGGGGSGSAHPIPDSSPLLQFGGQVRQRYLYTDDACQTEAHLEIREDGTVGGAADQSPESLLQLKALKPGVIQILGVKTSRFLCQRPDGALYGSLHFDPEACSFRELLLEDGYNVYQSEAHGLPLHLPGCKSPHRDPAPRGPARFLPLPGLPPAPPEPPGILAPQPPDVGSSDPLSMVGSQGRSPSYAS

SEQ ID NO: 2346 - protein, 472 aa, Artificial Sequence
  Fusion Protein
HGEGTFTSDKSKLLEKRLAHLFIEWLIKGGHKSGKPPPKGGGGGGGSGGGGSGGGGSADKTHTCPPCPAPEAAGGPSVFLFPPKPKDTLMISRTPEVTCVVVDVSHEDPEVKFNWYVDGVEVHNAKTKPREEQYNSTYRVVSVLTVLHQDWLNGKEYKCKVSNKALPAPIEKTISKAKGQPREPQVYTLPPSRDELTKNQVSLTCLVKGFYPSDIAVEWESNGQPENNYKTTPPVLDSDGSFFLYSKLTVDKSRWQQGNVFSCSVMHEALHNHYTQKSLSLSPGGGGSGSAHPIPDSSPLLQFGGQVRQRYLYTDDACQTEAHLEIREDGTVGGAADQSPESLLQLKALKPGVIQILGVKTSRFLCQRPDGALYGSLHFDPEACSFRELLLEDGYNVYQSEAHGLPLHLPGCKSPHRDPAPRGPARFLPLPGLPPAPPEPPGILAPQPPDVGSSDPLSMVYPSQGRSPSYAS

SEQ ID NO: 2347 - protein, 471 aa, Artificial Sequence
  Fusion Protein
HGEGTFTSDKSKLLEKRLAHLFIEWLIKGGHKSGKPPPKGGGGGGGSGGGGSGGGGSADKTHTCPPCPAPEAAGGPSVFLFPPKPKDTLMISRTPEVTCVVVDVSHEDPEVKFNWYVDGVEVHNAKTKPREEQYNSTYRVVSVLTVLHQDWLNGKEYKCKVSNKALPAPIEKTISKAKGQPREPQVYTLPPSRDELTKNQVSLTCLVKGFYPSDIAVEWESNGQPENNYKTTPPVLDSDGSFFLYSKLTVDKSRWQQGNVFSCSVMHEALHNHYTQKSLSLSPGGGGSGSAHPIPDSSPLLQFGGQVRQRYLYTDDACQTEAHLEIREDGTVGGAADQSPESLLQLKALKPGVIQILGVKTSRFLCQRPDGALYGSLHFDPEACSFRELLLEDGYNVYQSEAHGLPLHLCGNKSPHRDPAPRGPARFLPLPGLPPAPPEPPGILAPQPPDVGSSDPLSMVGSQGRSPSYAS

SEQ ID NO: 2348 - protein, 472 aa, Artificial Sequence
  Fusion Protein
HGEGTFTSDKSKLLEKRLAHLFIEWLIKGGHKSGKPPPKGGGGGGGSGGGGSGGGGSADKTHTCPPCPAPEAAGGPSVFLFPPKPKDTLMISRTPEVTCVVVDVSHEDPEVKFNWYVDGVEVHNAKTKPREEQYNSTYRVVSVLTVLHQDWLNGKEYKCKVSNKALPAPIEKTISKAKGQPREPQVYTLPPSRDELTKNQVSLTCLVKGFYPSDIAVEWESNGQPENNYKTTPPVLDSDGSFFLYSKLTVDKSRWQQGNVFSCSVMHEALHNHYTQKSLSLSPGGGGSGSAHPIPDSSPLLQFGGQVRQRYLYTDDACQTEAHLEIREDGTVGGAADQSPESLLQLKALKPGVIQILGVKTSRFLCQRPDGALYGSLHFDPEACSFRELLLEDGYNVYQSEAHGLPLHLCGNKSPHRDPAPRGPARFLPLPGLPPAPPEPPGILAPQPPDVGSSDPLSMVYPSQGRSPSYAS

SEQ ID NO: 2349 - protein, 471 aa, Artificial Sequence
  Fusion Protein
HGEGTFTSDKSKLLEKRLAHLFIEWLIKGGHKSGKPPPKGGGGGGGSGGGGSGGGGSADKTHTCPPCPAPELLGGPSVFLFPPKPKDTLMISRTPEVTCVVVDVSHEDPEVKFNWYVDGVEVHNAKTKPREEQYNNASRVVSVLTVLHQDWLNGKEYKCKVSNKALPAPIEKTISKAKGQPREPQVYTLPPSRDELTKNQVSLTCLVKGFYPSDIAVEWESNGQPENNYKTTPPVLDSDGSFFLYSKLTVDKSRWQQGNVFSCSVMHEALHNHYTQKSLSLSPGGGGSGSAHPIPDSSPLLQFGGQVRQRYLYTDDACQTEAHLEIREDGTVGGAADQSPESLLQLKALKPGVIQILGVKTSRFLCQRPDGALYGSLHFDPEACSFRELLLEDGYNVYQSEAHGLPLHLPGCKSPHRDPAPRGPARFLPLPGLPPAPPEPPGILAPQPPDVGSSDPLSMVGSQGRSPSYAS

SEQ ID NO: 2350 - protein, 472 aa, Artificial Sequence
  Fusion Protein
HGEGTFTSDKSKLLEKRLAHLFIEWLIKGGHKSGKPPPKGGGGGGGSGGGGSGGGGSADKTHTCPPCPAPELLGGPSVFLFPPKPKDTLMISRTPEVTCVVVDVSHEDPEVKFNWYVDGVEVHNAKTKPREEQYNNASRVVSVLTVLHQDWLNGKEYKCKVSNKALPAPIEKTISKAKGQPREPQVYTLPPSRDELTKNQVSLTCLVKGFYPSDIAVEWESNGQPENNYKTTPPVLDSDGSFFLYSKLTVDKSRWQQGNVFSCSVMHEALHNHYTQKSLSLSPGGGGSGSAHPIPDSSPLLQFGGQVRQRYLYTDDACQTEAHLEIREDGTVGGAADQSPESLLQLKALKPGVIQILGVKTSRFLCQRPDGALYGSLHFDPEACSFRELLLEDGYNVYQSEAHGLPLHLPGCKSPHRDPAPRGPARFLPLPGLPPAPPEPPGILAPQPPDVGSSDPLSMVYPSQGRSPSYAS

SEQ ID NO: 2351 - protein, 471 aa, Artificial Sequence
  Fusion Protein
HGEGTFTSDKSKLLEKRLAHLFIEWLIKGGHKSGKPPPKGGGGGGGSGGGGSGGGGSADKTHTCPPCPAPELLGGPSVFLFPPKPKDTLMISRTPEVTCVVVDVSHEDPEVKFNWYVDGVEVHNAKTKPREEQYNNASRVVSVLTVLHQDWLNGKEYKCKVSNKALPAPIEKTISKAKGQPREPQVYTLPPSRDELTKNQVSLTCLVKGFYPSDIAVEWESNGQPENNYKTTPPVLDSDGSFFLYSKLTVDKSRWQQGNVFSCSVMHEALHNHYTQKSLSLSPGGGGSGSAHPIPDSSPLLQFGGQVRQRYLYTDDACQTEAHLEIREDGTVGGAADQSPESLLQLKALKPGVIQILGVKTSRFLCQRPDGALYGSLHFDPEACSFRELLLEDGYNVYQSEAHGLPLHLCGNKSPHRDPAPRGPARFLPLPGLPPAPPEPPGILAPQPPDVGSSDPLSMVGSQGRSPSYAS

SEQ ID NO: 2352 - protein, 472 aa, Artificial Sequence
  Fusion Protein
HGEGTFTSDKSKLLEKRLAHLFIEWLIKGGHKSGKPPPKGGGGGGGSGGGGSGGGGSADKTHTCPPCPAPELLGGPSVFLFPPKPKDTLMISRTPEVTCVVVDVSHEDPEVKFNWYVDGVEVHNAKTKPREEQYNNASRVVSVLTVLHQDWLNGKEYKCKVSNKALPAPIEKTISKAKGQPREPQVYTLPPSRDELTKNQVSLTCLVKGFYPSDIAVEWESNGQPENNYKTTPPVLDSDGSFFLYSKLTVDKSRWQQGNVFSCSVMHEALHNHYTQKSLSLSPGGGGSGSAHPIPDSSPLLQFGGQVRQRYLYTDDACQTEAHLEIREDGTVGGAADQSPESLLQLKALKPGVIQILGVKTSRFLCQRPDGALYGSLHFDPEACSFRELLLEDGYNVYQSEAHGLPLHLCGNKSPHRDPAPRGPARFLPLPGLPPAPPEPPGILAPQPPDVGSSDPLSMVYPSQGRSPSYAS

SEQ ID NO: 2353 - protein, 474 aa, Artificial Sequence
  Fusion Protein
HGEGTFTSDKSKLLEKRLAHLFIEWLIKGGHKSGKPPPKGGGGGGGSGGGGSGGGGSAESKYGPPCPPCPAPEFEGGPSVFLFPPKPKDTLMISRTPEVTCVVVDVSQEDPEVQFNWYVDGVEVHNAKTKPREEQFNSTYRVVSVLTVLHQDWLNGKEYKCKVSNKGLPSSIEKTISKAKGQPREPQVYTLPPSQEEMTKNQVSLTCLVKGFYPSDIAVEWESNGQPENNYKTTPPVLDSDGSFFLYSRLTVDKSRWQEGNVFSCSVMHEALHNHYTQKSLSLSLGGGGSGSAHPIPDSSPLLQFGGQVRQRYLYTDDACQTEAHLEIREDGTVGGAADQSPESLLQLKALKPGVIQILGVKTSRFLCQRPDGALYGSLHFDPEACSFRELLLEDGYNVYQSEAHGLPLHLPGCKSPHRDPAPRGPARFLPLPGLPPAPPEPPGILAPQPPDVGSSDPLSMVYPSQGRSPSYAS

SEQ ID NO: 2354 - protein, 473 aa, Artificial Sequence
  Fusion Protein
HGEGTFTSDKSKLLEKRLAHLFIEWLIKGGHKSGKPPPKGGGGGGGSGGGGSGGGGSAESKYGPPCPPCPAPEFEGGPSVFLFPPKPKDTLMISRTPEVTCVVVDVSQEDPEVQFNWYVDGVEVHNAKTKPREEQFNSTYRVVSVLTVLHQDWLNGKEYKCKVSNKGLPSSIEKTISKAKGQPREPQVYTLPPSQEEMTKNQVSLTCLVKGFYPSDIAVEWESNGQPENNYKTTPPVLDSDGSFFLYSRLTVDKSRWQEGNVFSCSVMHEALHNHYTQKSLSLSLGGGGSGSAHPIPDSSPLLQFGGQVRQRYLYTDDACQTEAHLEIREDGTVGGAADQSPESLLQLKALKPGVIQILGVKTSRFLCQRPDGALYGSLHFDPEACSFRELLLEDGYNVYQSEAHGLPLHLCGNKSPHRDPAPRGPARFLPLPGLPPAPPEPPGILAPQPPDVGSSDPLSMVGSQGRSPSYAS

SEQ ID NO: 2355 - protein, 474 aa, Artificial Sequence
  Fusion Protein
HGEGTFTSDKSKLLEKRLAHLFIEWLIKGGHKSGKPPPKGGGGGGGSGGGGSGGGGSAESKYGPPCPPCPAPEFEGGPSVFLFPPKPKDTLMISRTPEVTCVVVDVSQEDPEVQFNWYVDGVEVHNAKTKPREEQFNSTYRVVSVLTVLHQDWLNGKEYKCKVSNKGLPSSIEKTISKAKGQPREPQVYTLPPSQEEMTKNQVSLTCLVKGFYPSDIAVEWESNGQPENNYKTTPPVLDSDGSFFLYSRLTVDKSRWQEGNVFSCSVMHEALHNHYTQKSLSLSLGGGGSGSAHPIPDSSPLLQFGGQVRQRYLYTDDACQTEAHLEIREDGTVGGAADQSPESLLQLKALKPGVIQILGVKTSRFLCQRPDGALYGSLHFDPEACSFRELLLEDGYNVYQSEAHGLPLHLCGNKSPHRDPAPRGPARFLPLPGLPPAPPEPPGILAPQPPDVGSSDPLSMVYPSQGRSPSYAS

SEQ ID NO: 2356 - protein, 471 aa, Artificial Sequence
  Fusion Protein
HGEGTFTSDKSQLLEERLVHLFIEWLIAGGHSSGKLPPKGGGGGGGSGGGGSGGGGSADKTHTCPPCPAPEAAGGPSVFLFPPKPKDTLMISRTPEVTCVVVDVSHEDPEVKFNWYVDGVEVHNAKTKPREEQYNSTYRVVSVLTVLHQDWLNGKEYKCKVSNKALPAPIEKTISKAKGQPREPQVYTLPPSRDELTKNQVSLTCLVKGFYPSDIAVEWESNGQPENNYKTTPPVLDSDGSFFLYSKLTVDKSRWQQGNVFSCSVMHEALHNHYTQKSLSLSPGGGGSGSAHPIPDSSPLLQFGGQVRQRYLYTDDACQTEAHLEIREDGTVGGAADQSPESLLQLKALKPGVIQILGVKTSRFLCQRPDGALYGSLHFDPEACSFRELLLEDGYNVYQSEAHGLPLHLPGCKSPHRDPAPRGPARFLPLPGLPPAPPEPPGILAPQPPDVGSSDPLSMVGSQGRSPSYAS

SEQ ID NO: 2357 - protein, 472 aa, Artificial Sequence
  Fusion Protein
HGEGTFTSDKSQLLEERLVHLFIEWLIAGGHSSGKLPPKGGGGGGGSGGGGSGGGGSADKTHTCPPCPAPEAAGGPSVFLFPPKPKDTLMISRTPEVTCVVVDVSHEDPEVKFNWYVDGVEVHNAKTKPREEQYNSTYRVVSVLTVLHQDWLNGKEYKCKVSNKALPAPIEKTISKAKGQPREPQVYTLPPSRDELTKNQVSLTCLVKGFYPSDIAVEWESNGQPENNYKTTPPVLDSDGSFFLYSKLTVDKSRWQQGNVFSCSVMHEALHNHYTQKSLSLSPGGGGSGSAHPIPDSSPLLQFGGQVRQRYLYTDDACQTEAHLEIREDGTVGGAADQSPESLLQLKALKPGVIQILGVKTSRFLCQRPDGALYGSLHFDPEACSFRELLLEDGYNVYQSEAHGLPLHLPGCKSPHRDPAPRGPARFLPLPGLPPAPPEPPGILAPQPPDVGSSDPLSMVYPSQGRSPSYAS

SEQ ID NO: 2358 - protein, 471 aa, Artificial Sequence
  Fusion Protein
HGEGTFTSDKSQLLEERLVHLFIEWLIAGGHSSGKLPPKGGGGGGGSGGGGSGGGGSADKTHTCPPCPAPEAAGGPSVFLFPPKPKDTLMISRTPEVTCVVVDVSHEDPEVKFNWYVDGVEVHNAKTKPREEQYNSTYRVVSVLTVLHQDWLNGKEYKCKVSNKALPAPIEKTISKAKGQPREPQVYTLPPSRDELTKNQVSLTCLVKGFYPSDIAVEWESNGQPENNYKTTPPVLDSDGSFFLYSKLTVDKSRWQQGNVFSCSVMHEALHNHYTQKSLSLSPGGGGSGSAHPIPDSSPLLQFGGQVRQRYLYTDDACQTEAHLEIREDGTVGGAADQSPESLLQLKALKPGVIQILGVKTSRFLCQRPDGALYGSLHFDPEACSFRELLLEDGYNVYQSEAHGLPLHLCGNKSPHRDPAPRGPARFLPLPGLPPAPPEPPGILAPQPPDVGSSDPLSMVGSQGRSPSYAS

SEQ ID NO: 2359 - protein, 472 aa, Artificial Sequence
  Fusion Protein
HGEGTFTSDKSQLLEERLVHLFIEWLIAGGHSSGKLPPKGGGGGGGSGGGGSGGGGSADKTHTCPPCPAPEAAGGPSVFLFPPKPKDTLMISRTPEVTCVVVDVSHEDPEVKFNWYVDGVEVHNAKTKPREEQYNSTYRVVSVLTVLHQDWLNGKEYKCKVSNKALPAPIEKTISKAKGQPREPQVYTLPPSRDELTKNQVSLTCLVKGFYPSDIAVEWESNGQPENNYKTTPPVLDSDGSFFLYSKLTVDKSRWQQGNVFSCSVMHEALHNHYTQKSLSLSPGGGGSGSAHPIPDSSPLLQFGGQVRQRYLYTDDACQTEAHLEIREDGTVGGAADQSPESLLQLKALKPGVIQILGVKTSRFLCQRPDGALYGSLHFDPEACSFRELLLEDGYNVYQSEAHGLPLHLCGNKSPHRDPAPRGPARFLPLPGLPPAPPEPPGILAPQPPDVGSSDPLSMVYPSQGRSPSYAS

SEQ ID NO: 2360 - protein, 471 aa, Artificial Sequence
  Fusion Protein
HGEGTFTSDKSQLLEERLVHLFIEWLIAGGHSSGKLPPKGGGGGGGSGGGGSGGGGSADKTHTCPPCPAPELLGGPSVFLFPPKPKDTLMISRTPEVTCVVVDVSHEDPEVKFNWYVDGVEVHNAKTKPREEQYNNASRVVSVLTVLHQDWLNGKEYKCKVSNKALPAPIEKTISKAKGQPREPQVYTLPPSRDELTKNQVSLTCLVKGFYPSDIAVEWESNGQPENNYKTTPPVLDSDGSFFLYSKLTVDKSRWQQGNVFSCSVMHEALHNHYTQKSLSLSPGGGGSGSAHPIPDSSPLLQFGGQVRQRYLYTDDACQTEAHLEIREDGTVGGAADQSPESLLQLKALKPGVIQILGVKTSRFLCQRPDGALYGSLHFDPEACSFRELLLEDGYNVYQSEAHGLPLHLPGCKSPHRDPAPRGPARFLPLPGLPPAPPEPPGILAPQPPDVGSSDPLSMVGSQGRSPSYAS

SEQ ID NO: 2361 - protein, 472 aa, Artificial Sequence
  Fusion Protein
HGEGTFTSDKSQLLEERLVHLFIEWLIAGGHSSGKLPPKGGGGGGGSGGGGSGGGGSADKTHTCPPCPAPELLGGPSVFLFPPKPKDTLMISRTPEVTCVVVDVSHEDPEVKFNWYVDGVEVHNAKTKPREEQYNNASRVVSVLTVLHQDWLNGKEYKCKVSNKALPAPIEKTISKAKGQPREPQVYTLPPSRDELTKNQVSLTCLVKGFYPSDIAVEWESNGQPENNYKTTPPVLDSDGSFFLYSKLTVDKSRWQQGNVFSCSVMHEALHNHYTQKSLSLSPGGGGSGSAHPIPDSSPLLQFGGQVRQRYLYTDDACQTEAHLEIREDGTVGGAADQSPESLLQLKALKPGVIQILGVKTSRFLCQRPDGALYGSLHFDPEACSFRELLLEDGYNVYQSEAHGLPLHLPGCKSPHRDPAPRGPARFLPLPGLPPAPPEPPGILAPQPPDVGSSDPLSMVYPSQGRSPSYAS

SEQ ID NO: 2362 - protein, 471 aa, Artificial Sequence
  Fusion Protein
HGEGTFTSDKSQLLEERLVHLFIEWLIAGGHSSGKLPPKGGGGGGGSGGGGSGGGGSADKTHTCPPCPAPELLGGPSVFLFPPKPKDTLMISRTPEVTCVVVDVSHEDPEVKFNWYVDGVEVHNAKTKPREEQYNNASRVVSVLTVLHQDWLNGKEYKCKVSNKALPAPIEKTISKAKGQPREPQVYTLPPSRDELTKNQVSLTCLVKGFYPSDIAVEWESNGQPENNYKTTPPVLDSDGSFFLYSKLTVDKSRWQQGNVFSCSVMHEALHNHYTQKSLSLSPGGGGSGSAHPIPDSSPLLQFGGQVRQRYLYTDDACQTEAHLEIREDGTVGGAADQSPESLLQLKALKPGVIQILGVKTSRFLCQRPDGALYGSLHFDPEACSFRELLLEDGYNVYQSEAHGLPLHLCGNKSPHRDPAPRGPARFLPLPGLPPAPPEPPGILAPQPPDVGSSDPLSMVGSQGRSPSYAS

SEQ ID NO: 2363 - protein, 472 aa, Artificial Sequence
  Fusion Protein
HGEGTFTSDKSQLLEERLVHLFIEWLIAGGHSSGKLPPKGGGGGGGSGGGGSGGGGSADKTHTCPPCPAPELLGGPSVFLFPPKPKDTLMISRTPEVTCVVVDVSHEDPEVKFNWYVDGVEVHNAKTKPREEQYNNASRVVSVLTVLHQDWLNGKEYKCKVSNKALPAPIEKTISKAKGQPREPQVYTLPPSRDELTKNQVSLTCLVKGFYPSDIAVEWESNGQPENNYKTTPPVLDSDGSFFLYSKLTVDKSRWQQGNVFSCSVMHEALHNHYTQKSLSLSPGGGGSGSAHPIPDSSPLLQFGGQVRQRYLYTDDACQTEAHLEIREDGTVGGAADQSPESLLQLKALKPGVIQILGVKTSRFLCQRPDGALYGSLHFDPEACSFRELLLEDGYNVYQSEAHGLPLHLCGNKSPHRDPAPRGPARFLPLPGLPPAPPEPPGILAPQPPDVGSSDPLSMVYPSQGRSPSYAS

SEQ ID NO: 2364 - protein, 474 aa, Artificial Sequence
  Fusion Protein
HGEGTFTSDKSQLLEERLVHLFIEWLIAGGHSSGKLPPKGGGGGGGSGGGGSGGGGSAESKYGPPCPPCPAPEFEGGPSVFLFPPKPKDTLMISRTPEVTCVVVDVSQEDPEVQFNWYVDGVEVHNAKTKPREEQFNSTYRVVSVLTVLHQDWLNGKEYKCKVSNKGLPSSIEKTISKAKGQPREPQVYTLPPSQEEMTKNQVSLTCLVKGFYPSDIAVEWESNGQPENNYKTTPPVLDSDGSFFLYSRLTVDKSRWQEGNVFSCSVMHEALHNHYTQKSLSLSLGGGGSGSAHPIPDSSPLLQFGGQVRQRYLYTDDACQTEAHLEIREDGTVGGAADQSPESLLQLKALKPGVIQILGVKTSRFLCQRPDGALYGSLHFDPEACSFRELLLEDGYNVYQSEAHGLPLHLPGCKSPHRDPAPRGPARFLPLPGLPPAPPEPPGILAPQPPDVGSSDPLSMVYPSQGRSPSYAS

SEQ ID NO: 2365 - protein, 473 aa, Artificial Sequence
  Fusion Protein
HGEGTFTSDKSQLLEERLVHLFIEWLIAGGHSSGKLPPKGGGGGGGSGGGGSGGGGSAESKYGPPCPPCPAPEFEGGPSVFLFPPKPKDTLMISRTPEVTCVVVDVSQEDPEVQFNWYVDGVEVHNAKTKPREEQFNSTYRVVSVLTVLHQDWLNGKEYKCKVSNKGLPSSIEKTISKAKGQPREPQVYTLPPSQEEMTKNQVSLTCLVKGFYPSDIAVEWESNGQPENNYKTTPPVLDSDGSFFLYSRLTVDKSRWQEGNVFSCSVMHEALHNHYTQKSLSLSLGGGGSGSAHPIPDSSPLLQFGGQVRQRYLYTDDACQTEAHLEIREDGTVGGAADQSPESLLQLKALKPGVIQILGVKTSRFLCQRPDGALYGSLHFDPEACSFRELLLEDGYNVYQSEAHGLPLHLCGNKSPHRDPAPRGPARFLPLPGLPPAPPEPPGILAPQPPDVGSSDPLSMVGSQGRSPSYAS

SEQ ID NO: 2366 - protein, 474 aa, Artificial Sequence
  Fusion Protein
HGEGTFTSDKSQLLEERLVHLFIEWLIAGGHSSGKLPPKGGGGGGGSGGGGSGGGGSAESKYGPPCPPCPAPEFEGGPSVFLFPPKPKDTLMISRTPEVTCVVVDVSQEDPEVQFNWYVDGVEVHNAKTKPREEQFNSTYRVVSVLTVLHQDWLNGKEYKCKVSNKGLPSSIEKTISKAKGQPREPQVYTLPPSQEEMTKNQVSLTCLVKGFYPSDIAVEWESNGQPENNYKTTPPVLDSDGSFFLYSRLTVDKSRWQEGNVFSCSVMHEALHNHYTQKSLSLSLGGGGSGSAHPIPDSSPLLQFGGQVRQRYLYTDDACQTEAHLEIREDGTVGGAADQSPESLLQLKALKPGVIQILGVKTSRFLCQRPDGALYGSLHFDPEACSFRELLLEDGYNVYQSEAHGLPLHLCGNKSPHRDPAPRGPARFLPLPGLPPAPPEPPGILAPQPPDVGSSDPLSMVYPSQGRSPSYAS

SEQ ID NO: 2367 - protein, 471 aa, Artificial Sequence
  Fusion Protein
HGEGTFTSDKSKLLEKRLAHLFIEWLLAGGHSKGKPPPKGGGGGGGSGGGGSGGGGSADKTHTCPPCPAPEAAGGPSVFLFPPKPKDTLMISRTPEVTCVVVDVSHEDPEVKFNWYVDGVEVHNAKTKPREEQYNSTYRVVSVLTVLHQDWLNGKEYKCKVSNKALPAPIEKTISKAKGQPREPQVYTLPPSRDELTKNQVSLTCLVKGFYPSDIAVEWESNGQPENNYKTTPPVLDSDGSFFLYSKLTVDKSRWQQGNVFSCSVMHEALHNHYTQKSLSLSPGGGGSGSAHPIPDSSPLLQFGGQVRQRYLYTDDACQTEAHLEIREDGTVGGAADQSPESLLQLKALKPGVIQILGVKTSRFLCQRPDGALYGSLHFDPEACSFRELLLEDGYNVYQSEAHGLPLHLPGCKSPHRDPAPRGPARFLPLPGLPPAPPEPPGILAPQPPDVGSSDPLSMVGSQGRSPSYAS

SEQ ID NO: 2368 - protein, 472 aa, Artificial Sequence
  Fusion Protein
HGEGTFTSDKSKLLEKRLAHLFIEWLLAGGHSKGKPPPKGGGGGGGSGGGGSGGGGSADKTHTCPPCPAPEAAGGPSVFLFPPKPKDTLMISRTPEVTCVVVDVSHEDPEVKFNWYVDGVEVHNAKTKPREEQYNSTYRVVSVLTVLHQDWLNGKEYKCKVSNKALPAPIEKTISKAKGQPREPQVYTLPPSRDELTKNQVSLTCLVKGFYPSDIAVEWESNGQPENNYKTTPPVLDSDGSFFLYSKLTVDKSRWQQGNVFSCSVMHEALHNHYTQKSLSLSPGGGGSGSAHPIPDSSPLLQFGGQVRQRYLYTDDACQTEAHLEIREDGTVGGAADQSPESLLQLKALKPGVIQILGVKTSRFLCQRPDGALYGSLHFDPEACSFRELLLEDGYNVYQSEAHGLPLHLPGCKSPHRDPAPRGPARFLPLPGLPPAPPEPPGILAPQPPDVGSSDPLSMVYPSQGRSPSYAS

SEQ ID NO: 2369 - protein, 471 aa, Artificial Sequence
  Fusion Protein
HGEGTFTSDKSKLLEKRLAHLFIEWLLAGGHSKGKPPPKGGGGGGGSGGGGSGGGGSADKTHTCPPCPAPEAAGGPSVFLFPPKPKDTLMISRTPEVTCVVVDVSHEDPEVKFNWYVDGVEVHNAKTKPREEQYNSTYRVVSVLTVLHQDWLNGKEYKCKVSNKALPAPIEKTISKAKGQPREPQVYTLPPSRDELTKNQVSLTCLVKGFYPSDIAVEWESNGQPENNYKTTPPVLDSDGSFFLYSKLTVDKSRWQQGNVFSCSVMHEALHNHYTQKSLSLSPGGGGSGSAHPIPDSSPLLQFGGQVRQRYLYTDDACQTEAHLEIREDGTVGGAADQSPESLLQLKALKPGVIQILGVKTSRFLCQRPDGALYGSLHFDPEACSFRELLLEDGYNVYQSEAHGLPLHLCGNKSPHRDPAPRGPARFLPLPGLPPAPPEPPGILAPQPPDVGSSDPLSMVGSQGRSPSYAS

SEQ ID NO: 2370 - protein, 472 aa, Artificial Sequence
  Fusion Protein
HGEGTFTSDKSKLLEKRLAHLFIEWLLAGGHSKGKPPPKGGGGGGGSGGGGSGGGGSADKTHTCPPCPAPEAAGGPSVFLFPPKPKDTLMISRTPEVTCVVVDVSHEDPEVKFNWYVDGVEVHNAKTKPREEQYNSTYRVVSVLTVLHQDWLNGKEYKCKVSNKALPAPIEKTISKAKGQPREPQVYTLPPSRDELTKNQVSLTCLVKGFYPSDIAVEWESNGQPENNYKTTPPVLDSDGSFFLYSKLTVDKSRWQQGNVFSCSVMHEALHNHYTQKSLSLSPGGGGSGSAHPIPDSSPLLQFGGQVRQRYLYTDDACQTEAHLEIREDGTVGGAADQSPESLLQLKALKPGVIQILGVKTSRFLCQRPDGALYGSLHFDPEACSFRELLLEDGYNVYQSEAHGLPLHLCGNKSPHRDPAPRGPARFLPLPGLPPAPPEPPGILAPQPPDVGSSDPLSMVYPSQGRSPSYAS

SEQ ID NO: 2371 - protein, 471 aa, Artificial Sequence
  Fusion Protein
HGEGTFTSDKSKLLEKRLAHLFIEWLLAGGHSKGKPPPKGGGGGGGSGGGGSGGGGSADKTHTCPPCPAPELLGGPSVFLFPPKPKDTLMISRTPEVTCVVVDVSHEDPEVKFNWYVDGVEVHNAKTKPREEQYNNASRVVSVLTVLHQDWLNGKEYKCKVSNKALPAPIEKTISKAKGQPREPQVYTLPPSRDELTKNQVSLTCLVKGFYPSDIAVEWESNGQPENNYKTTPPVLDSDGSFFLYSKLTVDKSRWQQGNVFSCSVMHEALHNHYTQKSLSLSPGGGGSGSAHPIPDSSPLLQFGGQVRQRYLYTDDACQTEAHLEIREDGTVGGAADQSPESLLQLKALKPGVIQILGVKTSRFLCQRPDGALYGSLHFDPEACSFRELLLEDGYNVYQSEAHGLPLHLPGCKSPHRDPAPRGPARFLPLPGLPPAPPEPPGILAPQPPDVGSSDPLSMVGSQGRSPSYAS

SEQ ID NO: 2372 - protein, 472 aa, Artificial Sequence
  Fusion Protein
HGEGTFTSDKSKLLEKRLAHLFIEWLLAGGHSKGKPPPKGGGGGGGSGGGGSGGGGSADKTHTCPPCPAPELLGGPSVFLFPPKPKDTLMISRTPEVTCVVVDVSHEDPEVKFNWYVDGVEVHNAKTKPREEQYNNASRVVSVLTVLHQDWLNGKEYKCKVSNKALPAPIEKTISKAKGQPREPQVYTLPPSRDELTKNQVSLTCLVKGFYPSDIAVEWESNGQPENNYKTTPPVLDSDGSFFLYSKLTVDKSRWQQGNVFSCSVMHEALHNHYTQKSLSLSPGGGGSGSAHPIPDSSPLLQFGGQVRQRYLYTDDACQTEAHLEIREDGTVGGAADQSPESLLQLKALKPGVIQILGVKTSRFLCQRPDGALYGSLHFDPEACSFRELLLEDGYNVYQSEAHGLPLHLPGCKSPHRDPAPRGPARFLPLPGLPPAPPEPPGILAPQPPDVGSSDPLSMVYPSQGRSPSYAS

SEQ ID NO: 2373 - protein, 471 aa, Artificial Sequence
  Fusion Protein
HGEGTFTSDKSKLLEKRLAHLFIEWLLAGGHSKGKPPPKGGGGGGGSGGGGSGGGGSADKTHTCPPCPAPELLGGPSVFLFPPKPKDTLMISRTPEVTCVVVDVSHEDPEVKFNWYVDGVEVHNAKTKPREEQYNNASRVVSVLTVLHQDWLNGKEYKCKVSNKALPAPIEKTISKAKGQPREPQVYTLPPSRDELTKNQVSLTCLVKGFYPSDIAVEWESNGQPENNYKTTPPVLDSDGSFFLYSKLTVDKSRWQQGNVFSCSVMHEALHNHYTQKSLSLSPGGGGSGSAHPIPDSSPLLQFGGQVRQRYLYTDDACQTEAHLEIREDGTVGGAADQSPESLLQLKALKPGVIQILGVKTSRFLCQRPDGALYGSLHFDPEACSFRELLLEDGYNVYQSEAHGLPLHLCGNKSPHRDPAPRGPARFLPLPGLPPAPPEPPGILAPQPPDVGSSDPLSMVGSQGRSPSYAS

SEQ ID NO: 2374 - protein, 472 aa, Artificial Sequence
  Fusion Protein
HGEGTFTSDKSKLLEKRLAHLFIEWLLAGGHSKGKPPPKGGGGGGGSGGGGSGGGGSADKTHTCPPCPAPELLGGPSVFLFPPKPKDTLMISRTPEVTCVVVDVSHEDPEVKFNWYVDGVEVHNAKTKPREEQYNNASRVVSVLTVLHQDWLNGKEYKCKVSNKALPAPIEKTISKAKGQPREPQVYTLPPSRDELTKNQVSLTCLVKGFYPSDIAVEWESNGQPENNYKTTPPVLDSDGSFFLYSKLTVDKSRWQQGNVFSCSVMHEALHNHYTQKSLSLSPGGGGSGSAHPIPDSSPLLQFGGQVRQRYLYTDDACQTEAHLEIREDGTVGGAADQSPESLLQLKALKPGVIQILGVKTSRFLCQRPDGALYGSLHFDPEACSFRELLLEDGYNVYQSEAHGLPLHLCGNKSPHRDPAPRGPARFLPLPGLPPAPPEPPGILAPQPPDVGSSDPLSMVYPSQGRSPSYAS

SEQ ID NO: 2375 - protein, 474 aa, Artificial Sequence
  Fusion Protein
HGEGTFTSDKSKLLEKRLAHLFIEWLLAGGHSKGKPPPKGGGGGGGSGGGGSGGGGSAESKYGPPCPPCPAPEFEGGPSVFLFPPKPKDTLMISRTPEVTCVVVDVSQEDPEVQFNWYVDGVEVHNAKTKPREEQFNSTYRVVSVLTVLHQDWLNGKEYKCKVSNKGLPSSIEKTISKAKGQPREPQVYTLPPSQEEMTKNQVSLTCLVKGFYPSDIAVEWESNGQPENNYKTTPPVLDSDGSFFLYSRLTVDKSRWQEGNVFSCSVMHEALHNHYTQKSLSLSLGGGGSGSAHPIPDSSPLLQFGGQVRQRYLYTDDACQTEAHLEIREDGTVGGAADQSPESLLQLKALKPGVIQILGVKTSRFLCQRPDGALYGSLHFDPEACSFRELLLEDGYNVYQSEAHGLPLHLPGCKSPHRDPAPRGPARFLPLPGLPPAPPEPPGILAPQPPDVGSSDPLSMVYPSQGRSPSYAS

SEQ ID NO: 2376 - protein, 473 aa, Artificial Sequence
  Fusion Protein
HGEGTFTSDKSKLLEKRLAHLFIEWLLAGGHSKGKPPPKGGGGGGGSGGGGSGGGGSAESKYGPPCPPCPAPEFEGGPSVFLFPPKPKDTLMISRTPEVTCVVVDVSQEDPEVQFNWYVDGVEVHNAKTKPREEQFNSTYRVVSVLTVLHQDWLNGKEYKCKVSNKGLPSSIEKTISKAKGQPREPQVYTLPPSQEEMTKNQVSLTCLVKGFYPSDIAVEWESNGQPENNYKTTPPVLDSDGSFFLYSRLTVDKSRWQEGNVFSCSVMHEALHNHYTQKSLSLSLGGGGSGSAHPIPDSSPLLQFGGQVRQRYLYTDDACQTEAHLEIREDGTVGGAADQSPESLLQLKALKPGVIQILGVKTSRFLCQRPDGALYGSLHFDPEACSFRELLLEDGYNVYQSEAHGLPLHLCGNKSPHRDPAPRGPARFLPLPGLPPAPPEPPGILAPQPPDVGSSDPLSMVGSQGRSPSYAS

SEQ ID NO: 2377 - protein, 474 aa, Artificial Sequence
  Fusion Protein
HGEGTFTSDKSKLLEKRLAHLFIEWLLAGGHSKGKPPPKGGGGGGGSGGGGSGGGGSAESKYGPPCPPCPAPEFEGGPSVFLFPPKPKDTLMISRTPEVTCVVVDVSQEDPEVQFNWYVDGVEVHNAKTKPREEQFNSTYRVVSVLTVLHQDWLNGKEYKCKVSNKGLPSSIEKTISKAKGQPREPQVYTLPPSQEEMTKNQVSLTCLVKGFYPSDIAVEWESNGQPENNYKTTPPVLDSDGSFFLYSRLTVDKSRWQEGNVFSCSVMHEALHNHYTQKSLSLSLGGGGSGSAHPIPDSSPLLQFGGQVRQRYLYTDDACQTEAHLEIREDGTVGGAADQSPESLLQLKALKPGVIQILGVKTSRFLCQRPDGALYGSLHFDPEACSFRELLLEDGYNVYQSEAHGLPLHLCGNKSPHRDPAPRGPARFLPLPGLPPAPPEPPGILAPQPPDVGSSDPLSMVYPSQGRSPSYAS

SEQ ID NO: 2378 - protein, 471 aa, Artificial Sequence
  Fusion Protein
HGEGTFTSDKSQLLEKRAAHLFIEWLLAGGHSSIKPPPKGGGGGGGSGGGGSGGGGSADKTHTCPPCPAPEAAGGPSVFLFPPKPKDTLMISRTPEVTCVVVDVSHEDPEVKFNWYVDGVEVHNAKTKPREEQYNSTYRVVSVLTVLHQDWLNGKEYKCKVSNKALPAPIEKTISKAKGQPREPQVYTLPPSRDELTKNQVSLTCLVKGFYPSDIAVEWESNGQPENNYKTTPPVLDSDGSFFLYSKLTVDKSRWQQGNVFSCSVMHEALHNHYTQKSLSLSPGGGGSGSAHPIPDSSPLLQFGGQVRQRYLYTDDACQTEAHLEIREDGTVGGAADQSPESLLQLKALKPGVIQILGVKTSRFLCQRPDGALYGSLHFDPEACSFRELLLEDGYNVYQSEAHGLPLHLPGCKSPHRDPAPRGPARFLPLPGLPPAPPEPPGILAPQPPDVGSSDPLSMVGSQGRSPSYAS

SEQ ID NO: 2379 - protein, 472 aa, Artificial Sequence
  Fusion Protein
HGEGTFTSDKSQLLEKRAAHLFIEWLLAGGHSSIKPPPKGGGGGGGSGGGGSGGGGSADKTHTCPPCPAPEAAGGPSVFLFPPKPKDTLMISRTPEVTCVVVDVSHEDPEVKFNWYVDGVEVHNAKTKPREEQYNSTYRVVSVLTVLHQDWLNGKEYKCKVSNKALPAPIEKTISKAKGQPREPQVYTLPPSRDELTKNQVSLTCLVKGFYPSDIAVEWESNGQPENNYKTTPPVLDSDGSFFLYSKLTVDKSRWQQGNVFSCSVMHEALHNHYTQKSLSLSPGGGGSGSAHPIPDSSPLLQFGGQVRQRYLYTDDACQTEAHLEIREDGTVGGAADQSPESLLQLKALKPGVIQILGVKTSRFLCQRPDGALYGSLHFDPEACSFRELLLEDGYNVYQSEAHGLPLHLPGCKSPHRDPAPRGPARFLPLPGLPPAPPEPPGILAPQPPDVGSSDPLSMVYPSQGRSPSYAS

SEQ ID NO: 2380 - protein, 471 aa, Artificial Sequence
  Fusion Protein
HGEGTFTSDKSQLLEKRAAHLFIEWLLAGGHSSIKPPPKGGGGGGGSGGGGSGGGGSADKTHTCPPCPAPEAAGGPSVFLFPPKPKDTLMISRTPEVTCVVVDVSHEDPEVKFNWYVDGVEVHNAKTKPREEQYNSTYRVVSVLTVLHQDWLNGKEYKCKVSNKALPAPIEKTISKAKGQPREPQVYTLPPSRDELTKNQVSLTCLVKGFYPSDIAVEWESNGQPENNYKTTPPVLDSDGSFFLYSKLTVDKSRWQQGNVFSCSVMHEALHNHYTQKSLSLSPGGGGSGSAHPIPDSSPLLQFGGQVRQRYLYTDDACQTEAHLEIREDGTVGGAADQSPESLLQLKALKPGVIQILGVKTSRFLCQRPDGALYGSLHFDPEACSFRELLLEDGYNVYQSEAHGLPLHLCGNKSPHRDPAPRGPARFLPLPGLPPAPPEPPGILAPQPPDVGSSDPLSMVGSQGRSPSYAS

SEQ ID NO: 2381 - protein, 472 aa, Artificial Sequence
  Fusion Protein
HGEGTFTSDKSQLLEKRAAHLFIEWLLAGGHSSIKPPPKGGGGGGGSGGGGSGGGGSADKTHTCPPCPAPEAAGGPSVFLFPPKPKDTLMISRTPEVTCVVVDVSHEDPEVKFNWYVDGVEVHNAKTKPREEQYNSTYRVVSVLTVLHQDWLNGKEYKCKVSNKALPAPIEKTISKAKGQPREPQVYTLPPSRDELTKNQVSLTCLVKGFYPSDIAVEWESNGQPENNYKTTPPVLDSDGSFFLYSKLTVDKSRWQQGNVFSCSVMHEALHNHYTQKSLSLSPGGGGSGSAHPIPDSSPLLQFGGQVRQRYLYTDDACQTEAHLEIREDGTVGGAADQSPESLLQLKALKPGVIQILGVKTSRFLCQRPDGALYGSLHFDPEACSFRELLLEDGYNVYQSEAHGLPLHLCGNKSPHRDPAPRGPARFLPLPGLPPAPPEPPGILAPQPPDVGSSDPLSMVYPSQGRSPSYAS

SEQ ID NO: 2382 - protein, 471 aa, Artificial Sequence
  Fusion Protein
HGEGTFTSDKSQLLEKRAAHLFIEWLLAGGHSSIKPPPKGGGGGGGSGGGGSGGGGSADKTHTCPPCPAPELLGGPSVFLFPPKPKDTLMISRTPEVTCVVVDVSHEDPEVKFNWYVDGVEVHNAKTKPREEQYNNASRVVSVLTVLHQDWLNGKEYKCKVSNKALPAPIEKTISKAKGQPREPQVYTLPPSRDELTKNQVSLTCLVKGFYPSDIAVEWESNGQPENNYKTTPPVLDSDGSFFLYSKLTVDKSRWQQGNVFSCSVMHEALHNHYTQKSLSLSPGGGGSGSAHPIPDSSPLLQFGGQVRQRYLYTDDACQTEAHLEIREDGTVGGAADQSPESLLQLKALKPGVIQILGVKTSRFLCQRPDGALYGSLHFDPEACSFRELLLEDGYNVYQSEAHGLPLHLPGCKSPHRDPAPRGPARFLPLPGLPPAPPEPPGILAPQPPDVGSSDPLSMVGSQGRSPSYAS

SEQ ID NO: 2383 - protein, 472 aa, Artificial Sequence
  Fusion Protein
HGEGTFTSDKSQLLEKRAAHLFIEWLLAGGHSSIKPPPKGGGGGGGSGGGGSGGGGSADKTHTCPPCPAPELLGGPSVFLFPPKPKDTLMISRTPEVTCVVVDVSHEDPEVKFNWYVDGVEVHNAKTKPREEQYNNASRVVSVLTVLHQDWLNGKEYKCKVSNKALPAPIEKTISKAKGQPREPQVYTLPPSRDELTKNQVSLTCLVKGFYPSDIAVEWESNGQPENNYKTTPPVLDSDGSFFLYSKLTVDKSRWQQGNVFSCSVMHEALHNHYTQKSLSLSPGGGGSGSAHPIPDSSPLLQFGGQVRQRYLYTDDACQTEAHLEIREDGTVGGAADQSPESLLQLKALKPGVIQILGVKTSRFLCQRPDGALYGSLHFDPEACSFRELLLEDGYNVYQSEAHGLPLHLPGCKSPHRDPAPRGPARFLPLPGLPPAPPEPPGILAPQPPDVGSSDPLSMVYPSQGRSPSYAS

SEQ ID NO: 2384 - protein, 471 aa, Artificial Sequence
  Fusion Protein
HGEGTFTSDKSQLLEKRAAHLFIEWLLAGGHSSIKPPPKGGGGGGGSGGGGSGGGGSADKTHTCPPCPAPELLGGPSVFLFPPKPKDTLMISRTPEVTCVVVDVSHEDPEVKFNWYVDGVEVHNAKTKPREEQYNNASRVVSVLTVLHQDWLNGKEYKCKVSNKALPAPIEKTISKAKGQPREPQVYTLPPSRDELTKNQVSLTCLVKGFYPSDIAVEWESNGQPENNYKTTPPVLDSDGSFFLYSKLTVDKSRWQQGNVFSCSVMHEALHNHYTQKSLSLSPGGGGSGSAHPIPDSSPLLQFGGQVRQRYLYTDDACQTEAHLEIREDGTVGGAADQSPESLLQLKALKPGVIQILGVKTSRFLCQRPDGALYGSLHFDPEACSFRELLLEDGYNVYQSEAHGLPLHLCGNKSPHRDPAPRGPARFLPLPGLPPAPPEPPGILAPQPPDVGSSDPLSMVGSQGRSPSYAS

SEQ ID NO: 2385 - protein, 472 aa, Artificial Sequence
  Fusion Protein
HGEGTFTSDKSQLLEKRAAHLFIEWLLAGGHSSIKPPPKGGGGGGGSGGGGSGGGGSADKTHTCPPCPAPELLGGPSVFLFPPKPKDTLMISRTPEVTCVVVDVSHEDPEVKFNWYVDGVEVHNAKTKPREEQYNNASRVVSVLTVLHQDWLNGKEYKCKVSNKALPAPIEKTISKAKGQPREPQVYTLPPSRDELTKNQVSLTCLVKGFYPSDIAVEWESNGQPENNYKTTPPVLDSDGSFFLYSKLTVDKSRWQQGNVFSCSVMHEALHNHYTQKSLSLSPGGGGSGSAHPIPDSSPLLQFGGQVRQRYLYTDDACQTEAHLEIREDGTVGGAADQSPESLLQLKALKPGVIQILGVKTSRFLCQRPDGALYGSLHFDPEACSFRELLLEDGYNVYQSEAHGLPLHLCGNKSPHRDPAPRGPARFLPLPGLPPAPPEPPGILAPQPPDVGSSDPLSMVYPSQGRSPSYAS

SEQ ID NO: 2386 - protein, 474 aa, Artificial Sequence
  Fusion Protein
HGEGTFTSDKSQLLEKRAAHLFIEWLLAGGHSSIKPPPKGGGGGGGSGGGGSGGGGSAESKYGPPCPPCPAPEFEGGPSVFLFPPKPKDTLMISRTPEVTCVVVDVSQEDPEVQFNWYVDGVEVHNAKTKPREEQFNSTYRVVSVLTVLHQDWLNGKEYKCKVSNKGLPSSIEKTISKAKGQPREPQVYTLPPSQEEMTKNQVSLTCLVKGFYPSDIAVEWESNGQPENNYKTTPPVLDSDGSFFLYSRLTVDKSRWQEGNVFSCSVMHEALHNHYTQKSLSLSLGGGGSGSAHPIPDSSPLLQFGGQVRQRYLYTDDACQTEAHLEIREDGTVGGAADQSPESLLQLKALKPGVIQILGVKTSRFLCQRPDGALYGSLHFDPEACSFRELLLEDGYNVYQSEAHGLPLHLPGCKSPHRDPAPRGPARFLPLPGLPPAPPEPPGILAPQPPDVGSSDPLSMVYPSQGRSPSYAS

SEQ ID NO: 2387 - protein, 473 aa, Artificial Sequence
  Fusion Protein
HGEGTFTSDKSQLLEKRAAHLFIEWLLAGGHSSIKPPPKGGGGGGGSGGGGSGGGGSAESKYGPPCPPCPAPEFEGGPSVFLFPPKPKDTLMISRTPEVTCVVVDVSQEDPEVQFNWYVDGVEVHNAKTKPREEQFNSTYRVVSVLTVLHQDWLNGKEYKCKVSNKGLPSSIEKTISKAKGQPREPQVYTLPPSQEEMTKNQVSLTCLVKGFYPSDIAVEWESNGQPENNYKTTPPVLDSDGSFFLYSRLTVDKSRWQEGNVFSCSVMHEALHNHYTQKSLSLSLGGGGSGSAHPIPDSSPLLQFGGQVRQRYLYTDDACQTEAHLEIREDGTVGGAADQSPESLLQLKALKPGVIQILGVKTSRFLCQRPDGALYGSLHFDPEACSFRELLLEDGYNVYQSEAHGLPLHLCGNKSPHRDPAPRGPARFLPLPGLPPAPPEPPGILAPQPPDVGSSDPLSMVGSQGRSPSYAS

SEQ ID NO: 2388 - protein, 474 aa, Artificial Sequence
  Fusion Protein
HGEGTFTSDKSQLLEKRAAHLFIEWLLAGGHSSIKPPPKGGGGGGGSGGGGSGGGGSAESKYGPPCPPCPAPEFEGGPSVFLFPPKPKDTLMISRTPEVTCVVVDVSQEDPEVQFNWYVDGVEVHNAKTKPREEQFNSTYRVVSVLTVLHQDWLNGKEYKCKVSNKGLPSSIEKTISKAKGQPREPQVYTLPPSQEEMTKNQVSLTCLVKGFYPSDIAVEWESNGQPENNYKTTPPVLDSDGSFFLYSRLTVDKSRWQEGNVFSCSVMHEALHNHYTQKSLSLSLGGGGSGSAHPIPDSSPLLQFGGQVRQRYLYTDDACQTEAHLEIREDGTVGGAADQSPESLLQLKALKPGVIQILGVKTSRFLCQRPDGALYGSLHFDPEACSFRELLLEDGYNVYQSEAHGLPLHLCGNKSPHRDPAPRGPARFLPLPGLPPAPPEPPGILAPQPPDVGSSDPLSMVYPSQGRSPSYAS

SEQ ID NO: 2389 - protein, 471 aa, Artificial Sequence
  Fusion Protein
HGEGTFTSDKSQLLEKELAHLFIEWLIAGGHSSIRPPPKGGGGGGGSGGGGSGGGGSADKTHTCPPCPAPEAAGGPSVFLFPPKPKDTLMISRTPEVTCVVVDVSHEDPEVKFNWYVDGVEVHNAKTKPREEQYNSTYRVVSVLTVLHQDWLNGKEYKCKVSNKALPAPIEKTISKAKGQPREPQVYTLPPSRDELTKNQVSLTCLVKGFYPSDIAVEWESNGQPENNYKTTPPVLDSDGSFFLYSKLTVDKSRWQQGNVFSCSVMHEALHNHYTQKSLSLSPGGGGSGSAHPIPDSSPLLQFGGQVRQRYLYTDDACQTEAHLEIREDGTVGGAADQSPESLLQLKALKPGVIQILGVKTSRFLCQRPDGALYGSLHFDPEACSFRELLLEDGYNVYQSEAHGLPLHLPGCKSPHRDPAPRGPARFLPLPGLPPAPPEPPGILAPQPPDVGSSDPLSMVGSQGRSPSYAS

SEQ ID NO: 2390 - protein, 472 aa, Artificial Sequence
  Fusion Protein
HGEGTFTSDKSQLLEKELAHLFIEWLIAGGHSSIRPPPKGGGGGGGSGGGGSGGGGSADKTHTCPPCPAPEAAGGPSVFLFPPKPKDTLMISRTPEVTCVVVDVSHEDPEVKFNWYVDGVEVHNAKTKPREEQYNSTYRVVSVLTVLHQDWLNGKEYKCKVSNKALPAPIEKTISKAKGQPREPQVYTLPPSRDELTKNQVSLTCLVKGFYPSDIAVEWESNGQPENNYKTTPPVLDSDGSFFLYSKLTVDKSRWQQGNVFSCSVMHEALHNHYTQKSLSLSPGGGGSGSAHPIPDSSPLLQFGGQVRQRYLYTDDACQTEAHLEIREDGTVGGAADQSPESLLQLKALKPGVIQILGVKTSRFLCQRPDGALYGSLHFDPEACSFRELLLEDGYNVYQSEAHGLPLHLPGCKSPHRDPAPRGPARFLPLPGLPPAPPEPPGILAPQPPDVGSSDPLSMVYPSQGRSPSYAS

SEQ ID NO: 2391 - protein, 471 aa, Artificial Sequence
  Fusion Protein
HGEGTFTSDKSQLLEKELAHLFIEWLIAGGHSSIRPPPKGGGGGGGSGGGGSGGGGSADKTHTCPPCPAPEAAGGPSVFLFPPKPKDTLMISRTPEVTCVVVDVSHEDPEVKFNWYVDGVEVHNAKTKPREEQYNSTYRVVSVLTVLHQDWLNGKEYKCKVSNKALPAPIEKTISKAKGQPREPQVYTLPPSRDELTKNQVSLTCLVKGFYPSDIAVEWESNGQPENNYKTTPPVLDSDGSFFLYSKLTVDKSRWQQGNVFSCSVMHEALHNHYTQKSLSLSPGGGGSGSAHPIPDSSPLLQFGGQVRQRYLYTDDACQTEAHLEIREDGTVGGAADQSPESLLQLKALKPGVIQILGVKTSRFLCQRPDGALYGSLHFDPEACSFRELLLEDGYNVYQSEAHGLPLHLCGNKSPHRDPAPRGPARFLPLPGLPPAPPEPPGILAPQPPDVGSSDPLSMVGSQGRSPSYAS

SEQ ID NO: 2392 - protein, 472 aa, Artificial Sequence
  Fusion Protein
HGEGTFTSDKSQLLEKELAHLFIEWLIAGGHSSIRPPPKGGGGGGGSGGGGSGGGGSADKTHTCPPCPAPEAAGGPSVFLFPPKPKDTLMISRTPEVTCVVVDVSHEDPEVKFNWYVDGVEVHNAKTKPREEQYNSTYRVVSVLTVLHQDWLNGKEYKCKVSNKALPAPIEKTISKAKGQPREPQVYTLPPSRDELTKNQVSLTCLVKGFYPSDIAVEWESNGQPENNYKTTPPVLDSDGSFFLYSKLTVDKSRWQQGNVFSCSVMHEALHNHYTQKSLSLSPGGGGSGSAHPIPDSSPLLQFGGQVRQRYLYTDDACQTEAHLEIREDGTVGGAADQSPESLLQLKALKPGVIQILGVKTSRFLCQRPDGALYGSLHFDPEACSFRELLLEDGYNVYQSEAHGLPLHLCGNKSPHRDPAPRGPARFLPLPGLPPAPPEPPGILAPQPPDVGSSDPLSMVYPSQGRSPSYAS

SEQ ID NO: 2393 - protein, 471 aa, Artificial Sequence
  Fusion Protein
HGEGTFTSDKSQLLEKELAHLFIEWLIAGGHSSIRPPPKGGGGGGGSGGGGSGGGGSADKTHTCPPCPAPELLGGPSVFLFPPKPKDTLMISRTPEVTCVVVDVSHEDPEVKFNWYVDGVEVHNAKTKPREEQYNNASRVVSVLTVLHQDWLNGKEYKCKVSNKALPAPIEKTISKAKGQPREPQVYTLPPSRDELTKNQVSLTCLVKGFYPSDIAVEWESNGQPENNYKTTPPVLDSDGSFFLYSKLTVDKSRWQQGNVFSCSVMHEALHNHYTQKSLSLSPGGGGSGSAHPIPDSSPLLQFGGQVRQRYLYTDDACQTEAHLEIREDGTVGGAADQSPESLLQLKALKPGVIQILGVKTSRFLCQRPDGALYGSLHFDPEACSFRELLLEDGYNVYQSEAHGLPLHLPGCKSPHRDPAPRGPARFLPLPGLPPAPPEPPGILAPQPPDVGSSDPLSMVGSQGRSPSYAS

SEQ ID NO: 2394 - protein, 472 aa, Artificial Sequence
  Fusion Protein
HGEGTFTSDKSQLLEKELAHLFIEWLIAGGHSSIRPPPKGGGGGGGSGGGGSGGGGSADKTHTCPPCPAPELLGGPSVFLFPPKPKDTLMISRTPEVTCVVVDVSHEDPEVKFNWYVDGVEVHNAKTKPREEQYNNASRVVSVLTVLHQDWLNGKEYKCKVSNKALPAPIEKTISKAKGQPREPQVYTLPPSRDELTKNQVSLTCLVKGFYPSDIAVEWESNGQPENNYKTTPPVLDSDGSFFLYSKLTVDKSRWQQGNVFSCSVMHEALHNHYTQKSLSLSPGGGGSGSAHPIPDSSPLLQFGGQVRQRYLYTDDACQTEAHLEIREDGTVGGAADQSPESLLQLKALKPGVIQILGVKTSRFLCQRPDGALYGSLHFDPEACSFRELLLEDGYNVYQSEAHGLPLHLPGCKSPHRDPAPRGPARFLPLPGLPPAPPEPPGILAPQPPDVGSSDPLSMVYPSQGRSPSYAS

SEQ ID NO: 2395 - protein, 471 aa, Artificial Sequence
  Fusion Protein
HGEGTFTSDKSQLLEKELAHLFIEWLIAGGHSSIRPPPKGGGGGGGSGGGGSGGGGSADKTHTCPPCPAPELLGGPSVFLFPPKPKDTLMISRTPEVTCVVVDVSHEDPEVKFNWYVDGVEVHNAKTKPREEQYNNASRVVSVLTVLHQDWLNGKEYKCKVSNKALPAPIEKTISKAKGQPREPQVYTLPPSRDELTKNQVSLTCLVKGFYPSDIAVEWESNGQPENNYKTTPPVLDSDGSFFLYSKLTVDKSRWQQGNVFSCSVMHEALHNHYTQKSLSLSPGGGGSGSAHPIPDSSPLLQFGGQVRQRYLYTDDACQTEAHLEIREDGTVGGAADQSPESLLQLKALKPGVIQILGVKTSRFLCQRPDGALYGSLHFDPEACSFRELLLEDGYNVYQSEAHGLPLHLCGNKSPHRDPAPRGPARFLPLPGLPPAPPEPPGILAPQPPDVGSSDPLSMVGSQGRSPSYAS

SEQ ID NO: 2396 - protein, 472 aa, Artificial Sequence
  Fusion Protein
HGEGTFTSDKSQLLEKELAHLFIEWLIAGGHSSIRPPPKGGGGGGGSGGGGSGGGGSADKTHTCPPCPAPELLGGPSVFLFPPKPKDTLMISRTPEVTCVVVDVSHEDPEVKFNWYVDGVEVHNAKTKPREEQYNNASRVVSVLTVLHQDWLNGKEYKCKVSNKALPAPIEKTISKAKGQPREPQVYTLPPSRDELTKNQVSLTCLVKGFYPSDIAVEWESNGQPENNYKTTPPVLDSDGSFFLYSKLTVDKSRWQQGNVFSCSVMHEALHNHYTQKSLSLSPGGGGSGSAHPIPDSSPLLQFGGQVRQRYLYTDDACQTEAHLEIREDGTVGGAADQSPESLLQLKALKPGVIQILGVKTSRFLCQRPDGALYGSLHFDPEACSFRELLLEDGYNVYQSEAHGLPLHLCGNKSPHRDPAPRGPARFLPLPGLPPAPPEPPGILAPQPPDVGSSDPLSMVYPSQGRSPSYAS

SEQ ID NO: 2397 - protein, 474 aa, Artificial Sequence
  Fusion Protein
HGEGTFTSDKSQLLEKELAHLFIEWLIAGGHSSIRPPPKGGGGGGGSGGGGSGGGGSAESKYGPPCPPCPAPEFEGGPSVFLFPPKPKDTLMISRTPEVTCVVVDVSQEDPEVQFNWYVDGVEVHNAKTKPREEQFNSTYRVVSVLTVLHQDWLNGKEYKCKVSNKGLPSSIEKTISKAKGQPREPQVYTLPPSQEEMTKNQVSLTCLVKGFYPSDIAVEWESNGQPENNYKTTPPVLDSDGSFFLYSRLTVDKSRWQEGNVFSCSVMHEALHNHYTQKSLSLSLGGGGSGSAHPIPDSSPLLQFGGQVRQRYLYTDDACQTEAHLEIREDGTVGGAADQSPESLLQLKALKPGVIQILGVKTSRFLCQRPDGALYGSLHFDPEACSFRELLLEDGYNVYQSEAHGLPLHLPGCKSPHRDPAPRGPARFLPLPGLPPAPPEPPGILAPQPPDVGSSDPLSMVYPSQGRSPSYAS

SEQ ID NO: 2398 - protein, 473 aa, Artificial Sequence
  Fusion Protein
HGEGTFTSDKSQLLEKELAHLFIEWLIAGGHSSIRPPPKGGGGGGGSGGGGSGGGGSAESKYGPPCPPCPAPEFEGGPSVFLFPPKPKDTLMISRTPEVTCVVVDVSQEDPEVQFNWYVDGVEVHNAKTKPREEQFNSTYRVVSVLTVLHQDWLNGKEYKCKVSNKGLPSSIEKTISKAKGQPREPQVYTLPPSQEEMTKNQVSLTCLVKGFYPSDIAVEWESNGQPENNYKTTPPVLDSDGSFFLYSRLTVDKSRWQEGNVFSCSVMHEALHNHYTQKSLSLSLGGGGSGSAHPIPDSSPLLQFGGQVRQRYLYTDDACQTEAHLEIREDGTVGGAADQSPESLLQLKALKPGVIQILGVKTSRFLCQRPDGALYGSLHFDPEACSFRELLLEDGYNVYQSEAHGLPLHLCGNKSPHRDPAPRGPARFLPLPGLPPAPPEPPGILAPQPPDVGSSDPLSMVGSQGRSPSYAS

SEQ ID NO: 2399 - protein, 474 aa, Artificial Sequence
  Fusion Protein
HGEGTFTSDKSQLLEKELAHLFIEWLIAGGHSSIRPPPKGGGGGGGSGGGGSGGGGSAESKYGPPCPPCPAPEFEGGPSVFLFPPKPKDTLMISRTPEVTCVVVDVSQEDPEVQFNWYVDGVEVHNAKTKPREEQFNSTYRVVSVLTVLHQDWLNGKEYKCKVSNKGLPSSIEKTISKAKGQPREPQVYTLPPSQEEMTKNQVSLTCLVKGFYPSDIAVEWESNGQPENNYKTTPPVLDSDGSFFLYSRLTVDKSRWQEGNVFSCSVMHEALHNHYTQKSLSLSLGGGGSGSAHPIPDSSPLLQFGGQVRQRYLYTDDACQTEAHLEIREDGTVGGAADQSPESLLQLKALKPGVIQILGVKTSRFLCQRPDGALYGSLHFDPEACSFRELLLEDGYNVYQSEAHGLPLHLCGNKSPHRDPAPRGPARFLPLPGLPPAPPEPPGILAPQPPDVGSSDPLSMVYPSQGRSPSYAS

SEQ ID NO: 2400 - protein, 471 aa, Artificial Sequence
  Fusion Protein
HGEGTFTSDKSQLLEKRAAHLFIEWLIAGGHSSGKLSPKGGGGGGGSGGGGSGGGGSADKTHTCPPCPAPEAAGGPSVFLFPPKPKDTLMISRTPEVTCVVVDVSHEDPEVKFNWYVDGVEVHNAKTKPREEQYNSTYRVVSVLTVLHQDWLNGKEYKCKVSNKALPAPIEKTISKAKGQPREPQVYTLPPSRDELTKNQVSLTCLVKGFYPSDIAVEWESNGQPENNYKTTPPVLDSDGSFFLYSKLTVDKSRWQQGNVFSCSVMHEALHNHYTQKSLSLSPGGGGSGSAHPIPDSSPLLQFGGQVRQRYLYTDDACQTEAHLEIREDGTVGGAADQSPESLLQLKALKPGVIQILGVKTSRFLCQRPDGALYGSLHFDPEACSFRELLLEDGYNVYQSEAHGLPLHLPGCKSPHRDPAPRGPARFLPLPGLPPAPPEPPGILAPQPPDVGSSDPLSMVGSQGRSPSYAS

SEQ ID NO: 2401 - protein, 472 aa, Artificial Sequence
  Fusion Protein
HGEGTFTSDKSQLLEKRAAHLFIEWLIAGGHSSGKLSPKGGGGGGGSGGGGSGGGGSADKTHTCPPCPAPEAAGGPSVFLFPPKPKDTLMISRTPEVTCVVVDVSHEDPEVKFNWYVDGVEVHNAKTKPREEQYNSTYRVVSVLTVLHQDWLNGKEYKCKVSNKALPAPIEKTISKAKGQPREPQVYTLPPSRDELTKNQVSLTCLVKGFYPSDIAVEWESNGQPENNYKTTPPVLDSDGSFFLYSKLTVDKSRWQQGNVFSCSVMHEALHNHYTQKSLSLSPGGGGSGSAHPIPDSSPLLQFGGQVRQRYLYTDDACQTEAHLEIREDGTVGGAADQSPESLLQLKALKPGVIQILGVKTSRFLCQRPDGALYGSLHFDPEACSFRELLLEDGYNVYQSEAHGLPLHLPGCKSPHRDPAPRGPARFLPLPGLPPAPPEPPGILAPQPPDVGSSDPLSMVYPSQGRSPSYAS

SEQ ID NO: 2402 - protein, 471 aa, Artificial Sequence
  Fusion Protein
HGEGTFTSDKSQLLEKRAAHLFIEWLIAGGHSSGKLSPKGGGGGGGSGGGGSGGGGSADKTHTCPPCPAPEAAGGPSVFLFPPKPKDTLMISRTPEVTCVVVDVSHEDPEVKFNWYVDGVEVHNAKTKPREEQYNSTYRVVSVLTVLHQDWLNGKEYKCKVSNKALPAPIEKTISKAKGQPREPQVYTLPPSRDELTKNQVSLTCLVKGFYPSDIAVEWESNGQPENNYKTTPPVLDSDGSFFLYSKLTVDKSRWQQGNVFSCSVMHEALHNHYTQKSLSLSPGGGGSGSAHPIPDSSPLLQFGGQVRQRYLYTDDACQTEAHLEIREDGTVGGAADQSPESLLQLKALKPGVIQILGVKTSRFLCQRPDGALYGSLHFDPEACSFRELLLEDGYNVYQSEAHGLPLHLCGNKSPHRDPAPRGPARFLPLPGLPPAPPEPPGILAPQPPDVGSSDPLSMVGSQGRSPSYAS

SEQ ID NO: 2403 - protein, 472 aa, Artificial Sequence
  Fusion Protein
HGEGTFTSDKSQLLEKRAAHLFIEWLIAGGHSSGKLSPKGGGGGGGSGGGGSGGGGSADKTHTCPPCPAPEAAGGPSVFLFPPKPKDTLMISRTPEVTCVVVDVSHEDPEVKFNWYVDGVEVHNAKTKPREEQYNSTYRVVSVLTVLHQDWLNGKEYKCKVSNKALPAPIEKTISKAKGQPREPQVYTLPPSRDELTKNQVSLTCLVKGFYPSDIAVEWESNGQPENNYKTTPPVLDSDGSFFLYSKLTVDKSRWQQGNVFSCSVMHEALHNHYTQKSLSLSPGGGGSGSAHPIPDSSPLLQFGGQVRQRYLYTDDACQTEAHLEIREDGTVGGAADQSPESLLQLKALKPGVIQILGVKTSRFLCQRPDGALYGSLHFDPEACSFRELLLEDGYNVYQSEAHGLPLHLCGNKSPHRDPAPRGPARFLPLPGLPPAPPEPPGILAPQPPDVGSSDPLSMVYPSQGRSPSYAS

SEQ ID NO: 2404 - protein, 471 aa, Artificial Sequence
  Fusion Protein
HGEGTFTSDKSQLLEKRAAHLFIEWLIAGGHSSGKLSPKGGGGGGGSGGGGSGGGGSADKTHTCPPCPAPELLGGPSVFLFPPKPKDTLMISRTPEVTCVVVDVSHEDPEVKFNWYVDGVEVHNAKTKPREEQYNNASRVVSVLTVLHQDWLNGKEYKCKVSNKALPAPIEKTISKAKGQPREPQVYTLPPSRDELTKNQVSLTCLVKGFYPSDIAVEWESNGQPENNYKTTPPVLDSDGSFFLYSKLTVDKSRWQQGNVFSCSVMHEALHNHYTQKSLSLSPGGGGSGSAHPIPDSSPLLQFGGQVRQRYLYTDDACQTEAHLEIREDGTVGGAADQSPESLLQLKALKPGVIQILGVKTSRFLCQRPDGALYGSLHFDPEACSFRELLLEDGYNVYQSEAHGLPLHLPGCKSPHRDPAPRGPARFLPLPGLPPAPPEPPGILAPQPPDVGSSDPLSMVGSQGRSPSYAS

SEQ ID NO: 2405 - protein, 472 aa, Artificial Sequence
  Fusion Protein
HGEGTFTSDKSQLLEKRAAHLFIEWLIAGGHSSGKLSPKGGGGGGGSGGGGSGGGGSADKTHTCPPCPAPELLGGPSVFLFPPKPKDTLMISRTPEVTCVVVDVSHEDPEVKFNWYVDGVEVHNAKTKPREEQYNNASRVVSVLTVLHQDWLNGKEYKCKVSNKALPAPIEKTISKAKGQPREPQVYTLPPSRDELTKNQVSLTCLVKGFYPSDIAVEWESNGQPENNYKTTPPVLDSDGSFFLYSKLTVDKSRWQQGNVFSCSVMHEALHNHYTQKSLSLSPGGGGSGSAHPIPDSSPLLQFGGQVRQRYLYTDDACQTEAHLEIREDGTVGGAADQSPESLLQLKALKPGVIQILGVKTSRFLCQRPDGALYGSLHFDPEACSFRELLLEDGYNVYQSEAHGLPLHLPGCKSPHRDPAPRGPARFLPLPGLPPAPPEPPGILAPQPPDVGSSDPLSMVYPSQGRSPSYAS

SEQ ID NO: 2406 - protein, 471 aa, Artificial Sequence
  Fusion Protein
HGEGTFTSDKSQLLEKRAAHLFIEWLIAGGHSSGKLSPKGGGGGGGSGGGGSGGGGSADKTHTCPPCPAPELLGGPSVFLFPPKPKDTLMISRTPEVTCVVVDVSHEDPEVKFNWYVDGVEVHNAKTKPREEQYNNASRVVSVLTVLHQDWLNGKEYKCKVSNKALPAPIEKTISKAKGQPREPQVYTLPPSRDELTKNQVSLTCLVKGFYPSDIAVEWESNGQPENNYKTTPPVLDSDGSFFLYSKLTVDKSRWQQGNVFSCSVMHEALHNHYTQKSLSLSPGGGGSGSAHPIPDSSPLLQFGGQVRQRYLYTDDACQTEAHLEIREDGTVGGAADQSPESLLQLKALKPGVIQILGVKTSRFLCQRPDGALYGSLHFDPEACSFRELLLEDGYNVYQSEAHGLPLHLCGNKSPHRDPAPRGPARFLPLPGLPPAPPEPPGILAPQPPDVGSSDPLSMVGSQGRSPSYAS

SEQ ID NO: 2407 - protein, 472 aa, Artificial Sequence
  Fusion Protein
HGEGTFTSDKSQLLEKRAAHLFIEWLIAGGHSSGKLSPKGGGGGGGSGGGGSGGGGSADKTHTCPPCPAPELLGGPSVFLFPPKPKDTLMISRTPEVTCVVVDVSHEDPEVKFNWYVDGVEVHNAKTKPREEQYNNASRVVSVLTVLHQDWLNGKEYKCKVSNKALPAPIEKTISKAKGQPREPQVYTLPPSRDELTKNQVSLTCLVKGFYPSDIAVEWESNGQPENNYKTTPPVLDSDGSFFLYSKLTVDKSRWQQGNVFSCSVMHEALHNHYTQKSLSLSPGGGGSGSAHPIPDSSPLLQFGGQVRQRYLYTDDACQTEAHLEIREDGTVGGAADQSPESLLQLKALKPGVIQILGVKTSRFLCQRPDGALYGSLHFDPEACSFRELLLEDGYNVYQSEAHGLPLHLCGNKSPHRDPAPRGPARFLPLPGLPPAPPEPPGILAPQPPDVGSSDPLSMVYPSQGRSPSYAS

SEQ ID NO: 2408 - protein, 474 aa, Artificial Sequence
  Fusion Protein
HGEGTFTSDKSQLLEKRAAHLFIEWLIAGGHSSGKLSPKGGGGGGGSGGGGSGGGGSAESKYGPPCPPCPAPEFEGGPSVFLFPPKPKDTLMISRTPEVTCVVVDVSQEDPEVQFNWYVDGVEVHNAKTKPREEQFNSTYRVVSVLTVLHQDWLNGKEYKCKVSNKGLPSSIEKTISKAKGQPREPQVYTLPPSQEEMTKNQVSLTCLVKGFYPSDIAVEWESNGQPENNYKTTPPVLDSDGSFFLYSRLTVDKSRWQEGNVFSCSVMHEALHNHYTQKSLSLSLGGGGSGSAHPIPDSSPLLQFGGQVRQRYLYTDDACQTEAHLEIREDGTVGGAADQSPESLLQLKALKPGVIQILGVKTSRFLCQRPDGALYGSLHFDPEACSFRELLLEDGYNVYQSEAHGLPLHLPGCKSPHRDPAPRGPARFLPLPGLPPAPPEPPGILAPQPPDVGSSDPLSMVYPSQGRSPSYAS

SEQ ID NO: 2409 - protein, 473 aa, Artificial Sequence
  Fusion Protein
HGEGTFTSDKSQLLEKRAAHLFIEWLIAGGHSSGKLSPKGGGGGGGSGGGGSGGGGSAESKYGPPCPPCPAPEFEGGPSVFLFPPKPKDTLMISRTPEVTCVVVDVSQEDPEVQFNWYVDGVEVHNAKTKPREEQFNSTYRVVSVLTVLHQDWLNGKEYKCKVSNKGLPSSIEKTISKAKGQPREPQVYTLPPSQEEMTKNQVSLTCLVKGFYPSDIAVEWESNGQPENNYKTTPPVLDSDGSFFLYSRLTVDKSRWQEGNVFSCSVMHEALHNHYTQKSLSLSLGGGGSGSAHPIPDSSPLLQFGGQVRQRYLYTDDACQTEAHLEIREDGTVGGAADQSPESLLQLKALKPGVIQILGVKTSRFLCQRPDGALYGSLHFDPEACSFRELLLEDGYNVYQSEAHGLPLHLCGNKSPHRDPAPRGPARFLPLPGLPPAPPEPPGILAPQPPDVGSSDPLSMVGSQGRSPSYAS

SEQ ID NO: 2410 - protein, 474 aa, Artificial Sequence
  Fusion Protein
HGEGTFTSDKSQLLEKRAAHLFIEWLIAGGHSSGKLSPKGGGGGGGSGGGGSGGGGSAESKYGPPCPPCPAPEFEGGPSVFLFPPKPKDTLMISRTPEVTCVVVDVSQEDPEVQFNWYVDGVEVHNAKTKPREEQFNSTYRVVSVLTVLHQDWLNGKEYKCKVSNKGLPSSIEKTISKAKGQPREPQVYTLPPSQEEMTKNQVSLTCLVKGFYPSDIAVEWESNGQPENNYKTTPPVLDSDGSFFLYSRLTVDKSRWQEGNVFSCSVMHEALHNHYTQKSLSLSLGGGGSGSAHPIPDSSPLLQFGGQVRQRYLYTDDACQTEAHLEIREDGTVGGAADQSPESLLQLKALKPGVIQILGVKTSRFLCQRPDGALYGSLHFDPEACSFRELLLEDGYNVYQSEAHGLPLHLCGNKSPHRDPAPRGPARFLPLPGLPPAPPEPPGILAPQPPDVGSSDPLSMVYPSQGRSPSYAS

SEQ ID NO: 2411 - protein, 471 aa, Artificial Sequence
  Fusion Protein
HGEGTFTSDKSQLLEKRLAHLFIEWLIKGGHSKGKPPPKGGGGGGGSGGGGSGGGGSADKTHTCPPCPAPEAAGGPSVFLFPPKPKDTLMISRTPEVTCVVVDVSHEDPEVKFNWYVDGVEVHNAKTKPREEQYNSTYRVVSVLTVLHQDWLNGKEYKCKVSNKALPAPIEKTISKAKGQPREPQVYTLPPSRDELTKNQVSLTCLVKGFYPSDIAVEWESNGQPENNYKTTPPVLDSDGSFFLYSKLTVDKSRWQQGNVFSCSVMHEALHNHYTQKSLSLSPGGGGSGSAHPIPDSSPLLQFGGQVRQRYLYTDDACQTEAHLEIREDGTVGGAADQSPESLLQLKALKPGVIQILGVKTSRFLCQRPDGALYGSLHFDPEACSFRELLLEDGYNVYQSEAHGLPLHLPGCKSPHRDPAPRGPARFLPLPGLPPAPPEPPGILAPQPPDVGSSDPLSMVGSQGRSPSYAS

SEQ ID NO: 2412 - protein, 472 aa, Artificial Sequence
  Fusion Protein
HGEGTFTSDKSQLLEKRLAHLFIEWLIKGGHSKGKPPPKGGGGGGGSGGGGSGGGGSADKTHTCPPCPAPEAAGGPSVFLFPPKPKDTLMISRTPEVTCVVVDVSHEDPEVKFNWYVDGVEVHNAKTKPREEQYNSTYRVVSVLTVLHQDWLNGKEYKCKVSNKALPAPIEKTISKAKGQPREPQVYTLPPSRDELTKNQVSLTCLVKGFYPSDIAVEWESNGQPENNYKTTPPVLDSDGSFFLYSKLTVDKSRWQQGNVFSCSVMHEALHNHYTQKSLSLSPGGGGSGSAHPIPDSSPLLQFGGQVRQRYLYTDDACQTEAHLEIREDGTVGGAADQSPESLLQLKALKPGVIQILGVKTSRFLCQRPDGALYGSLHFDPEACSFRELLLEDGYNVYQSEAHGLPLHLPGCKSPHRDPAPRGPARFLPLPGLPPAPPEPPGILAPQPPDVGSSDPLSMVYPSQGRSPSYAS

SEQ ID NO: 2413 - protein, 471 aa, Artificial Sequence
  Fusion Protein
HGEGTFTSDKSQLLEKRLAHLFIEWLIKGGHSKGKPPPKGGGGGGGSGGGGSGGGGSADKTHTCPPCPAPEAAGGPSVFLFPPKPKDTLMISRTPEVTCVVVDVSHEDPEVKFNWYVDGVEVHNAKTKPREEQYNSTYRVVSVLTVLHQDWLNGKEYKCKVSNKALPAPIEKTISKAKGQPREPQVYTLPPSRDELTKNQVSLTCLVKGFYPSDIAVEWESNGQPENNYKTTPPVLDSDGSFFLYSKLTVDKSRWQQGNVFSCSVMHEALHNHYTQKSLSLSPGGGGSGSAHPIPDSSPLLQFGGQVRQRYLYTDDACQTEAHLEIREDGTVGGAADQSPESLLQLKALKPGVIQILGVKTSRFLCQRPDGALYGSLHFDPEACSFRELLLEDGYNVYQSEAHGLPLHLCGNKSPHRDPAPRGPARFLPLPGLPPAPPEPPGILAPQPPDVGSSDPLSMVGSQGRSPSYAS

SEQ ID NO: 2414 - protein, 472 aa, Artificial Sequence
  Fusion Protein
HGEGTFTSDKSQLLEKRLAHLFIEWLIKGGHSKGKPPPKGGGGGGGSGGGGSGGGGSADKTHTCPPCPAPEAAGGPSVFLFPPKPKDTLMISRTPEVTCVVVDVSHEDPEVKFNWYVDGVEVHNAKTKPREEQYNSTYRVVSVLTVLHQDWLNGKEYKCKVSNKALPAPIEKTISKAKGQPREPQVYTLPPSRDELTKNQVSLTCLVKGFYPSDIAVEWESNGQPENNYKTTPPVLDSDGSFFLYSKLTVDKSRWQQGNVFSCSVMHEALHNHYTQKSLSLSPGGGGSGSAHPIPDSSPLLQFGGQVRQRYLYTDDACQTEAHLEIREDGTVGGAADQSPESLLQLKALKPGVIQILGVKTSRFLCQRPDGALYGSLHFDPEACSFRELLLEDGYNVYQSEAHGLPLHLCGNKSPHRDPAPRGPARFLPLPGLPPAPPEPPGILAPQPPDVGSSDPLSMVYPSQGRSPSYAS

SEQ ID NO: 2415 - protein, 471 aa, Artificial Sequence
  Fusion Protein
HGEGTFTSDKSQLLEKRLAHLFIEWLIKGGHSKGKPPPKGGGGGGGSGGGGSGGGGSADKTHTCPPCPAPELLGGPSVFLFPPKPKDTLMISRTPEVTCVVVDVSHEDPEVKFNWYVDGVEVHNAKTKPREEQYNNASRVVSVLTVLHQDWLNGKEYKCKVSNKALPAPIEKTISKAKGQPREPQVYTLPPSRDELTKNQVSLTCLVKGFYPSDIAVEWESNGQPENNYKTTPPVLDSDGSFFLYSKLTVDKSRWQQGNVFSCSVMHEALHNHYTQKSLSLSPGGGGSGSAHPIPDSSPLLQFGGQVRQRYLYTDDACQTEAHLEIREDGTVGGAADQSPESLLQLKALKPGVIQILGVKTSRFLCQRPDGALYGSLHFDPEACSFRELLLEDGYNVYQSEAHGLPLHLPGCKSPHRDPAPRGPARFLPLPGLPPAPPEPPGILAPQPPDVGSSDPLSMVGSQGRSPSYAS

SEQ ID NO: 2416 - protein, 472 aa, Artificial Sequence
  Fusion Protein
HGEGTFTSDKSQLLEKRLAHLFIEWLIKGGHSKGKPPPKGGGGGGGSGGGGSGGGGSADKTHTCPPCPAPELLGGPSVFLFPPKPKDTLMISRTPEVTCVVVDVSHEDPEVKFNWYVDGVEVHNAKTKPREEQYNNASRVVSVLTVLHQDWLNGKEYKCKVSNKALPAPIEKTISKAKGQPREPQVYTLPPSRDELTKNQVSLTCLVKGFYPSDIAVEWESNGQPENNYKTTPPVLDSDGSFFLYSKLTVDKSRWQQGNVFSCSVMHEALHNHYTQKSLSLSPGGGGSGSAHPIPDSSPLLQFGGQVRQRYLYTDDACQTEAHLEIREDGTVGGAADQSPESLLQLKALKPGVIQILGVKTSRFLCQRPDGALYGSLHFDPEACSFRELLLEDGYNVYQSEAHGLPLHLPGCKSPHRDPAPRGPARFLPLPGLPPAPPEPPGILAPQPPDVGSSDPLSMVYPSQGRSPSYAS

SEQ ID NO: 2417 - protein, 471 aa, Artificial Sequence
  Fusion Protein
HGEGTFTSDKSQLLEKRLAHLFIEWLIKGGHSKGKPPPKGGGGGGGSGGGGSGGGGSADKTHTCPPCPAPELLGGPSVFLFPPKPKDTLMISRTPEVTCVVVDVSHEDPEVKFNWYVDGVEVHNAKTKPREEQYNNASRVVSVLTVLHQDWLNGKEYKCKVSNKALPAPIEKTISKAKGQPREPQVYTLPPSRDELTKNQVSLTCLVKGFYPSDIAVEWESNGQPENNYKTTPPVLDSDGSFFLYSKLTVDKSRWQQGNVFSCSVMHEALHNHYTQKSLSLSPGGGGSGSAHPIPDSSPLLQFGGQVRQRYLYTDDACQTEAHLEIREDGTVGGAADQSPESLLQLKALKPGVIQILGVKTSRFLCQRPDGALYGSLHFDPEACSFRELLLEDGYNVYQSEAHGLPLHLCGNKSPHRDPAPRGPARFLPLPGLPPAPPEPPGILAPQPPDVGSSDPLSMVGSQGRSPSYAS

SEQ ID NO: 2418 - protein, 472 aa, Artificial Sequence
  Fusion Protein
HGEGTFTSDKSQLLEKRLAHLFIEWLIKGGHSKGKPPPKGGGGGGGSGGGGSGGGGSADKTHTCPPCPAPELLGGPSVFLFPPKPKDTLMISRTPEVTCVVVDVSHEDPEVKFNWYVDGVEVHNAKTKPREEQYNNASRVVSVLTVLHQDWLNGKEYKCKVSNKALPAPIEKTISKAKGQPREPQVYTLPPSRDELTKNQVSLTCLVKGFYPSDIAVEWESNGQPENNYKTTPPVLDSDGSFFLYSKLTVDKSRWQQGNVFSCSVMHEALHNHYTQKSLSLSPGGGGSGSAHPIPDSSPLLQFGGQVRQRYLYTDDACQTEAHLEIREDGTVGGAADQSPESLLQLKALKPGVIQILGVKTSRFLCQRPDGALYGSLHFDPEACSFRELLLEDGYNVYQSEAHGLPLHLCGNKSPHRDPAPRGPARFLPLPGLPPAPPEPPGILAPQPPDVGSSDPLSMVYPSQGRSPSYAS

SEQ ID NO: 2419 - protein, 474 aa, Artificial Sequence
  Fusion Protein
HGEGTFTSDKSQLLEKRLAHLFIEWLIKGGHSKGKPPPKGGGGGGGSGGGGSGGGGSAESKYGPPCPPCPAPEFEGGPSVFLFPPKPKDTLMISRTPEVTCVVVDVSQEDPEVQFNWYVDGVEVHNAKTKPREEQFNSTYRVVSVLTVLHQDWLNGKEYKCKVSNKGLPSSIEKTISKAKGQPREPQVYTLPPSQEEMTKNQVSLTCLVKGFYPSDIAVEWESNGQPENNYKTTPPVLDSDGSFFLYSRLTVDKSRWQEGNVFSCSVMHEALHNHYTQKSLSLSLGGGGSGSAHPIPDSSPLLQFGGQVRQRYLYTDDACQTEAHLEIREDGTVGGAADQSPESLLQLKALKPGVIQILGVKTSRFLCQRPDGALYGSLHFDPEACSFRELLLEDGYNVYQSEAHGLPLHLPGCKSPHRDPAPRGPARFLPLPGLPPAPPEPPGILAPQPPDVGSSDPLSMVYPSQGRSPSYAS

SEQ ID NO: 2420 - protein, 473 aa, Artificial Sequence
  Fusion Protein
HGEGTFTSDKSQLLEKRLAHLFIEWLIKGGHSKGKPPPKGGGGGGGSGGGGSGGGGSAESKYGPPCPPCPAPEFEGGPSVFLFPPKPKDTLMISRTPEVTCVVVDVSQEDPEVQFNWYVDGVEVHNAKTKPREEQFNSTYRVVSVLTVLHQDWLNGKEYKCKVSNKGLPSSIEKTISKAKGQPREPQVYTLPPSQEEMTKNQVSLTCLVKGFYPSDIAVEWESNGQPENNYKTTPPVLDSDGSFFLYSRLTVDKSRWQEGNVFSCSVMHEALHNHYTQKSLSLSLGGGGSGSAHPIPDSSPLLQFGGQVRQRYLYTDDACQTEAHLEIREDGTVGGAADQSPESLLQLKALKPGVIQILGVKTSRFLCQRPDGALYGSLHFDPEACSFRELLLEDGYNVYQSEAHGLPLHLCGNKSPHRDPAPRGPARFLPLPGLPPAPPEPPGILAPQPPDVGSSDPLSMVGSQGRSPSYAS

SEQ ID NO: 2421 - protein, 474 aa, Artificial Sequence
  Fusion Protein
HGEGTFTSDKSQLLEKRLAHLFIEWLIKGGHSKGKPPPKGGGGGGGSGGGGSGGGGSAESKYGPPCPPCPAPEFEGGPSVFLFPPKPKDTLMISRTPEVTCVVVDVSQEDPEVQFNWYVDGVEVHNAKTKPREEQFNSTYRVVSVLTVLHQDWLNGKEYKCKVSNKGLPSSIEKTISKAKGQPREPQVYTLPPSQEEMTKNQVSLTCLVKGFYPSDIAVEWESNGQPENNYKTTPPVLDSDGSFFLYSRLTVDKSRWQEGNVFSCSVMHEALHNHYTQKSLSLSLGGGGSGSAHPIPDSSPLLQFGGQVRQRYLYTDDACQTEAHLEIREDGTVGGAADQSPESLLQLKALKPGVIQILGVKTSRFLCQRPDGALYGSLHFDPEACSFRELLLEDGYNVYQSEAHGLPLHLCGNKSPHRDPAPRGPARFLPLPGLPPAPPEPPGILAPQPPDVGSSDPLSMVYPSQGRSPSYAS

SEQ ID NO: 2422 - protein, 471 aa, Artificial Sequence
  Fusion Protein
HGEGTFTSDKSKLLEKRAAHLFIEWLIAGGHSKGKPPPKGGGGGGGSGGGGSGGGGSADKTHTCPPCPAPEAAGGPSVFLFPPKPKDTLMISRTPEVTCVVVDVSHEDPEVKFNWYVDGVEVHNAKTKPREEQYNSTYRVVSVLTVLHQDWLNGKEYKCKVSNKALPAPIEKTISKAKGQPREPQVYTLPPSRDELTKNQVSLTCLVKGFYPSDIAVEWESNGQPENNYKTTPPVLDSDGSFFLYSKLTVDKSRWQQGNVFSCSVMHEALHNHYTQKSLSLSPGGGGSGSAHPIPDSSPLLQFGGQVRQRYLYTDDACQTEAHLEIREDGTVGGAADQSPESLLQLKALKPGVIQILGVKTSRFLCQRPDGALYGSLHFDPEACSFRELLLEDGYNVYQSEAHGLPLHLPGCKSPHRDPAPRGPARFLPLPGLPPAPPEPPGILAPQPPDVGSSDPLSMVGSQGRSPSYAS

SEQ ID NO: 2423 - protein, 472 aa, Artificial Sequence
  Fusion Protein
HGEGTFTSDKSKLLEKRAAHLFIEWLIAGGHSKGKPPPKGGGGGGGSGGGGSGGGGSADKTHTCPPCPAPEAAGGPSVFLFPPKPKDTLMISRTPEVTCVVVDVSHEDPEVKFNWYVDGVEVHNAKTKPREEQYNSTYRVVSVLTVLHQDWLNGKEYKCKVSNKALPAPIEKTISKAKGQPREPQVYTLPPSRDELTKNQVSLTCLVKGFYPSDIAVEWESNGQPENNYKTTPPVLDSDGSFFLYSKLTVDKSRWQQGNVFSCSVMHEALHNHYTQKSLSLSPGGGGSGSAHPIPDSSPLLQFGGQVRQRYLYTDDACQTEAHLEIREDGTVGGAADQSPESLLQLKALKPGVIQILGVKTSRFLCQRPDGALYGSLHFDPEACSFRELLLEDGYNVYQSEAHGLPLHLPGCKSPHRDPAPRGPARFLPLPGLPPAPPEPPGILAPQPPDVGSSDPLSMVYPSQGRSPSYAS

SEQ ID NO: 2424 - protein, 471 aa, Artificial Sequence
  Fusion Protein
HGEGTFTSDKSKLLEKRAAHLFIEWLIAGGHSKGKPPPKGGGGGGGSGGGGSGGGGSADKTHTCPPCPAPEAAGGPSVFLFPPKPKDTLMISRTPEVTCVVVDVSHEDPEVKFNWYVDGVEVHNAKTKPREEQYNSTYRVVSVLTVLHQDWLNGKEYKCKVSNKALPAPIEKTISKAKGQPREPQVYTLPPSRDELTKNQVSLTCLVKGFYPSDIAVEWESNGQPENNYKTTPPVLDSDGSFFLYSKLTVDKSRWQQGNVFSCSVMHEALHNHYTQKSLSLSPGGGGSGSAHPIPDSSPLLQFGGQVRQRYLYTDDACQTEAHLEIREDGTVGGAADQSPESLLQLKALKPGVIQILGVKTSRFLCQRPDGALYGSLHFDPEACSFRELLLEDGYNVYQSEAHGLPLHLCGNKSPHRDPAPRGPARFLPLPGLPPAPPEPPGILAPQPPDVGSSDPLSMVGSQGRSPSYAS

SEQ ID NO: 2425 - protein, 472 aa, Artificial Sequence
  Fusion Protein
HGEGTFTSDKSKLLEKRAAHLFIEWLIAGGHSKGKPPPKGGGGGGGSGGGGSGGGGSADKTHTCPPCPAPEAAGGPSVFLFPPKPKDTLMISRTPEVTCVVVDVSHEDPEVKFNWYVDGVEVHNAKTKPREEQYNSTYRVVSVLTVLHQDWLNGKEYKCKVSNKALPAPIEKTISKAKGQPREPQVYTLPPSRDELTKNQVSLTCLVKGFYPSDIAVEWESNGQPENNYKTTPPVLDSDGSFFLYSKLTVDKSRWQQGNVFSCSVMHEALHNHYTQKSLSLSPGGGGSGSAHPIPDSSPLLQFGGQVRQRYLYTDDACQTEAHLEIREDGTVGGAADQSPESLLQLKALKPGVIQILGVKTSRFLCQRPDGALYGSLHFDPEACSFRELLLEDGYNVYQSEAHGLPLHLCGNKSPHRDPAPRGPARFLPLPGLPPAPPEPPGILAPQPPDVGSSDPLSMVYPSQGRSPSYAS

SEQ ID NO: 2426 - protein, 471 aa, Artificial Sequence
  Fusion Protein
HGEGTFTSDKSKLLEKRAAHLFIEWLIAGGHSKGKPPPKGGGGGGGSGGGGSGGGGSADKTHTCPPCPAPELLGGPSVFLFPPKPKDTLMISRTPEVTCVVVDVSHEDPEVKFNWYVDGVEVHNAKTKPREEQYNNASRVVSVLTVLHQDWLNGKEYKCKVSNKALPAPIEKTISKAKGQPREPQVYTLPPSRDELTKNQVSLTCLVKGFYPSDIAVEWESNGQPENNYKTTPPVLDSDGSFFLYSKLTVDKSRWQQGNVFSCSVMHEALHNHYTQKSLSLSPGGGGSGSAHPIPDSSPLLQFGGQVRQRYLYTDDACQTEAHLEIREDGTVGGAADQSPESLLQLKALKPGVIQILGVKTSRFLCQRPDGALYGSLHFDPEACSFRELLLEDGYNVYQSEAHGLPLHLPGCKSPHRDPAPRGPARFLPLPGLPPAPPEPPGILAPQPPDVGSSDPLSMVGSQGRSPSYAS

SEQ ID NO: 2427 - protein, 472 aa, Artificial Sequence
  Fusion Protein
HGEGTFTSDKSKLLEKRAAHLFIEWLIAGGHSKGKPPPKGGGGGGGSGGGGSGGGGSADKTHTCPPCPAPELLGGPSVFLFPPKPKDTLMISRTPEVTCVVVDVSHEDPEVKFNWYVDGVEVHNAKTKPREEQYNNASRVVSVLTVLHQDWLNGKEYKCKVSNKALPAPIEKTISKAKGQPREPQVYTLPPSRDELTKNQVSLTCLVKGFYPSDIAVEWESNGQPENNYKTTPPVLDSDGSFFLYSKLTVDKSRWQQGNVFSCSVMHEALHNHYTQKSLSLSPGGGGSGSAHPIPDSSPLLQFGGQVRQRYLYTDDACQTEAHLEIREDGTVGGAADQSPESLLQLKALKPGVIQILGVKTSRFLCQRPDGALYGSLHFDPEACSFRELLLEDGYNVYQSEAHGLPLHLPGCKSPHRDPAPRGPARFLPLPGLPPAPPEPPGILAPQPPDVGSSDPLSMVYPSQGRSPSYAS

SEQ ID NO: 2428 - protein, 471 aa, Artificial Sequence
  Fusion Protein
HGEGTFTSDKSKLLEKRAAHLFIEWLIAGGHSKGKPPPKGGGGGGGSGGGGSGGGGSADKTHTCPPCPAPELLGGPSVFLFPPKPKDTLMISRTPEVTCVVVDVSHEDPEVKFNWYVDGVEVHNAKTKPREEQYNNASRVVSVLTVLHQDWLNGKEYKCKVSNKALPAPIEKTISKAKGQPREPQVYTLPPSRDELTKNQVSLTCLVKGFYPSDIAVEWESNGQPENNYKTTPPVLDSDGSFFLYSKLTVDKSRWQQGNVFSCSVMHEALHNHYTQKSLSLSPGGGGSGSAHPIPDSSPLLQFGGQVRQRYLYTDDACQTEAHLEIREDGTVGGAADQSPESLLQLKALKPGVIQILGVKTSRFLCQRPDGALYGSLHFDPEACSFRELLLEDGYNVYQSEAHGLPLHLCGNKSPHRDPAPRGPARFLPLPGLPPAPPEPPGILAPQPPDVGSSDPLSMVGSQGRSPSYAS

SEQ ID NO: 2429 - protein, 472 aa, Artificial Sequence
  Fusion Protein
HGEGTFTSDKSKLLEKRAAHLFIEWLIAGGHSKGKPPPKGGGGGGGSGGGGSGGGGSADKTHTCPPCPAPELLGGPSVFLFPPKPKDTLMISRTPEVTCVVVDVSHEDPEVKFNWYVDGVEVHNAKTKPREEQYNNASRVVSVLTVLHQDWLNGKEYKCKVSNKALPAPIEKTISKAKGQPREPQVYTLPPSRDELTKNQVSLTCLVKGFYPSDIAVEWESNGQPENNYKTTPPVLDSDGSFFLYSKLTVDKSRWQQGNVFSCSVMHEALHNHYTQKSLSLSPGGGGSGSAHPIPDSSPLLQFGGQVRQRYLYTDDACQTEAHLEIREDGTVGGAADQSPESLLQLKALKPGVIQILGVKTSRFLCQRPDGALYGSLHFDPEACSFRELLLEDGYNVYQSEAHGLPLHLCGNKSPHRDPAPRGPARFLPLPGLPPAPPEPPGILAPQPPDVGSSDPLSMVYPSQGRSPSYAS

SEQ ID NO: 2430 - protein, 474 aa, Artificial Sequence
  Fusion Protein
HGEGTFTSDKSKLLEKRAAHLFIEWLIAGGHSKGKPPPKGGGGGGGSGGGGSGGGGSAESKYGPPCPPCPAPEFEGGPSVFLFPPKPKDTLMISRTPEVTCVVVDVSQEDPEVQFNWYVDGVEVHNAKTKPREEQFNSTYRVVSVLTVLHQDWLNGKEYKCKVSNKGLPSSIEKTISKAKGQPREPQVYTLPPSQEEMTKNQVSLTCLVKGFYPSDIAVEWESNGQPENNYKTTPPVLDSDGSFFLYSRLTVDKSRWQEGNVFSCSVMHEALHNHYTQKSLSLSLGGGGSGSAHPIPDSSPLLQFGGQVRQRYLYTDDACQTEAHLEIREDGTVGGAADQSPESLLQLKALKPGVIQILGVKTSRFLCQRPDGALYGSLHFDPEACSFRELLLEDGYNVYQSEAHGLPLHLPGCKSPHRDPAPRGPARFLPLPGLPPAPPEPPGILAPQPPDVGSSDPLSMVYPSQGRSPSYAS

SEQ ID NO: 2431 - protein, 473 aa, Artificial Sequence
  Fusion Protein
HGEGTFTSDKSKLLEKRAAHLFIEWLIAGGHSKGKPPPKGGGGGGGSGGGGSGGGGSAESKYGPPCPPCPAPEFEGGPSVFLFPPKPKDTLMISRTPEVTCVVVDVSQEDPEVQFNWYVDGVEVHNAKTKPREEQFNSTYRVVSVLTVLHQDWLNGKEYKCKVSNKGLPSSIEKTISKAKGQPREPQVYTLPPSQEEMTKNQVSLTCLVKGFYPSDIAVEWESNGQPENNYKTTPPVLDSDGSFFLYSRLTVDKSRWQEGNVFSCSVMHEALHNHYTQKSLSLSLGGGGSGSAHPIPDSSPLLQFGGQVRQRYLYTDDACQTEAHLEIREDGTVGGAADQSPESLLQLKALKPGVIQILGVKTSRFLCQRPDGALYGSLHFDPEACSFRELLLEDGYNVYQSEAHGLPLHLCGNKSPHRDPAPRGPARFLPLPGLPPAPPEPPGILAPQPPDVGSSDPLSMVGSQGRSPSYAS

SEQ ID NO: 2432 - protein, 474 aa, Artificial Sequence
  Fusion Protein
HGEGTFTSDKSKLLEKRAAHLFIEWLIAGGHSKGKPPPKGGGGGGGSGGGGSGGGGSAESKYGPPCPPCPAPEFEGGPSVFLFPPKPKDTLMISRTPEVTCVVVDVSQEDPEVQFNWYVDGVEVHNAKTKPREEQFNSTYRVVSVLTVLHQDWLNGKEYKCKVSNKGLPSSIEKTISKAKGQPREPQVYTLPPSQEEMTKNQVSLTCLVKGFYPSDIAVEWESNGQPENNYKTTPPVLDSDGSFFLYSRLTVDKSRWQEGNVFSCSVMHEALHNHYTQKSLSLSLGGGGSGSAHPIPDSSPLLQFGGQVRQRYLYTDDACQTEAHLEIREDGTVGGAADQSPESLLQLKALKPGVIQILGVKTSRFLCQRPDGALYGSLHFDPEACSFRELLLEDGYNVYQSEAHGLPLHLCGNKSPHRDPAPRGPARFLPLPGLPPAPPEPPGILAPQPPDVGSSDPLSMVYPSQGRSPSYAS

SEQ ID NO: 2433 - protein, 471 aa, Artificial Sequence
  Fusion Protein
HGEGTFTSDKSQLLEKRLAHLFIEWLIAGGHKSGKYSPKGGGGGGGSGGGGSGGGGSADKTHTCPPCPAPEAAGGPSVFLFPPKPKDTLMISRTPEVTCVVVDVSHEDPEVKFNWYVDGVEVHNAKTKPREEQYNSTYRVVSVLTVLHQDWLNGKEYKCKVSNKALPAPIEKTISKAKGQPREPQVYTLPPSRDELTKNQVSLTCLVKGFYPSDIAVEWESNGQPENNYKTTPPVLDSDGSFFLYSKLTVDKSRWQQGNVFSCSVMHEALHNHYTQKSLSLSPGGGGSGSAHPIPDSSPLLQFGGQVRQRYLYTDDACQTEAHLEIREDGTVGGAADQSPESLLQLKALKPGVIQILGVKTSRFLCQRPDGALYGSLHFDPEACSFRELLLEDGYNVYQSEAHGLPLHLPGCKSPHRDPAPRGPARFLPLPGLPPAPPEPPGILAPQPPDVGSSDPLSMVGSQGRSPSYAS

SEQ ID NO: 2434 - protein, 472 aa, Artificial Sequence
  Fusion Protein
HGEGTFTSDKSQLLEKRLAHLFIEWLIAGGHKSGKYSPKGGGGGGGSGGGGSGGGGSADKTHTCPPCPAPEAAGGPSVFLFPPKPKDTLMISRTPEVTCVVVDVSHEDPEVKFNWYVDGVEVHNAKTKPREEQYNSTYRVVSVLTVLHQDWLNGKEYKCKVSNKALPAPIEKTISKAKGQPREPQVYTLPPSRDELTKNQVSLTCLVKGFYPSDIAVEWESNGQPENNYKTTPPVLDSDGSFFLYSKLTVDKSRWQQGNVFSCSVMHEALHNHYTQKSLSLSPGGGGSGSAHPIPDSSPLLQFGGQVRQRYLYTDDACQTEAHLEIREDGTVGGAADQSPESLLQLKALKPGVIQILGVKTSRFLCQRPDGALYGSLHFDPEACSFRELLLEDGYNVYQSEAHGLPLHLPGCKSPHRDPAPRGPARFLPLPGLPPAPPEPPGILAPQPPDVGSSDPLSMVYPSQGRSPSYAS

SEQ ID NO: 2435 - protein, 471 aa, Artificial Sequence
  Fusion Protein
HGEGTFTSDKSQLLEKRLAHLFIEWLIAGGHKSGKYSPKGGGGGGGSGGGGSGGGGSADKTHTCPPCPAPEAAGGPSVFLFPPKPKDTLMISRTPEVTCVVVDVSHEDPEVKFNWYVDGVEVHNAKTKPREEQYNSTYRVVSVLTVLHQDWLNGKEYKCKVSNKALPAPIEKTISKAKGQPREPQVYTLPPSRDELTKNQVSLTCLVKGFYPSDIAVEWESNGQPENNYKTTPPVLDSDGSFFLYSKLTVDKSRWQQGNVFSCSVMHEALHNHYTQKSLSLSPGGGGSGSAHPIPDSSPLLQFGGQVRQRYLYTDDACQTEAHLEIREDGTVGGAADQSPESLLQLKALKPGVIQILGVKTSRFLCQRPDGALYGSLHFDPEACSFRELLLEDGYNVYQSEAHGLPLHLCGNKSPHRDPAPRGPARFLPLPGLPPAPPEPPGILAPQPPDVGSSDPLSMVGSQGRSPSYAS

SEQ ID NO: 2436 - protein, 472 aa, Artificial Sequence
  Fusion Protein
HGEGTFTSDKSQLLEKRLAHLFIEWLIAGGHKSGKYSPKGGGGGGGSGGGGSGGGGSADKTHTCPPCPAPEAAGGPSVFLFPPKPKDTLMISRTPEVTCVVVDVSHEDPEVKFNWYVDGVEVHNAKTKPREEQYNSTYRVVSVLTVLHQDWLNGKEYKCKVSNKALPAPIEKTISKAKGQPREPQVYTLPPSRDELTKNQVSLTCLVKGFYPSDIAVEWESNGQPENNYKTTPPVLDSDGSFFLYSKLTVDKSRWQQGNVFSCSVMHEALHNHYTQKSLSLSPGGGGSGSAHPIPDSSPLLQFGGQVRQRYLYTDDACQTEAHLEIREDGTVGGAADQSPESLLQLKALKPGVIQILGVKTSRFLCQRPDGALYGSLHFDPEACSFRELLLEDGYNVYQSEAHGLPLHLCGNKSPHRDPAPRGPARFLPLPGLPPAPPEPPGILAPQPPDVGSSDPLSMVYPSQGRSPSYAS

SEQ ID NO: 2437 - protein, 471 aa, Artificial Sequence
  Fusion Protein
HGEGTFTSDKSQLLEKRLAHLFIEWLIAGGHKSGKYSPKGGGGGGGSGGGGSGGGGSADKTHTCPPCPAPELLGGPSVFLFPPKPKDTLMISRTPEVTCVVVDVSHEDPEVKFNWYVDGVEVHNAKTKPREEQYNNASRVVSVLTVLHQDWLNGKEYKCKVSNKALPAPIEKTISKAKGQPREPQVYTLPPSRDELTKNQVSLTCLVKGFYPSDIAVEWESNGQPENNYKTTPPVLDSDGSFFLYSKLTVDKSRWQQGNVFSCSVMHEALHNHYTQKSLSLSPGGGGSGSAHPIPDSSPLLQFGGQVRQRYLYTDDACQTEAHLEIREDGTVGGAADQSPESLLQLKALKPGVIQILGVKTSRFLCQRPDGALYGSLHFDPEACSFRELLLEDGYNVYQSEAHGLPLHLPGCKSPHRDPAPRGPARFLPLPGLPPAPPEPPGILAPQPPDVGSSDPLSMVGSQGRSPSYAS

SEQ ID NO: 2438 - protein, 472 aa, Artificial Sequence
  Fusion Protein
HGEGTFTSDKSQLLEKRLAHLFIEWLIAGGHKSGKYSPKGGGGGGGSGGGGSGGGGSADKTHTCPPCPAPELLGGPSVFLFPPKPKDTLMISRTPEVTCVVVDVSHEDPEVKFNWYVDGVEVHNAKTKPREEQYNNASRVVSVLTVLHQDWLNGKEYKCKVSNKALPAPIEKTISKAKGQPREPQVYTLPPSRDELTKNQVSLTCLVKGFYPSDIAVEWESNGQPENNYKTTPPVLDSDGSFFLYSKLTVDKSRWQQGNVFSCSVMHEALHNHYTQKSLSLSPGGGGSGSAHPIPDSSPLLQFGGQVRQRYLYTDDACQTEAHLEIREDGTVGGAADQSPESLLQLKALKPGVIQILGVKTSRFLCQRPDGALYGSLHFDPEACSFRELLLEDGYNVYQSEAHGLPLHLPGCKSPHRDPAPRGPARFLPLPGLPPAPPEPPGILAPQPPDVGSSDPLSMVYPSQGRSPSYAS

SEQ ID NO: 2439 - protein, 471 aa, Artificial Sequence
  Fusion Protein
HGEGTFTSDKSQLLEKRLAHLFIEWLIAGGHKSGKYSPKGGGGGGGSGGGGSGGGGSADKTHTCPPCPAPELLGGPSVFLFPPKPKDTLMISRTPEVTCVVVDVSHEDPEVKFNWYVDGVEVHNAKTKPREEQYNNASRVVSVLTVLHQDWLNGKEYKCKVSNKALPAPIEKTISKAKGQPREPQVYTLPPSRDELTKNQVSLTCLVKGFYPSDIAVEWESNGQPENNYKTTPPVLDSDGSFFLYSKLTVDKSRWQQGNVFSCSVMHEALHNHYTQKSLSLSPGGGGSGSAHPIPDSSPLLQFGGQVRQRYLYTDDACQTEAHLEIREDGTVGGAADQSPESLLQLKALKPGVIQILGVKTSRFLCQRPDGALYGSLHFDPEACSFRELLLEDGYNVYQSEAHGLPLHLCGNKSPHRDPAPRGPARFLPLPGLPPAPPEPPGILAPQPPDVGSSDPLSMVGSQGRSPSYAS

SEQ ID NO: 2440 - protein, 472 aa, Artificial Sequence
  Fusion Protein
HGEGTFTSDKSQLLEKRLAHLFIEWLIAGGHKSGKYSPKGGGGGGGSGGGGSGGGGSADKTHTCPPCPAPELLGGPSVFLFPPKPKDTLMISRTPEVTCVVVDVSHEDPEVKFNWYVDGVEVHNAKTKPREEQYNNASRVVSVLTVLHQDWLNGKEYKCKVSNKALPAPIEKTISKAKGQPREPQVYTLPPSRDELTKNQVSLTCLVKGFYPSDIAVEWESNGQPENNYKTTPPVLDSDGSFFLYSKLTVDKSRWQQGNVFSCSVMHEALHNHYTQKSLSLSPGGGGSGSAHPIPDSSPLLQFGGQVRQRYLYTDDACQTEAHLEIREDGTVGGAADQSPESLLQLKALKPGVIQILGVKTSRFLCQRPDGALYGSLHFDPEACSFRELLLEDGYNVYQSEAHGLPLHLCGNKSPHRDPAPRGPARFLPLPGLPPAPPEPPGILAPQPPDVGSSDPLSMVYPSQGRSPSYAS

SEQ ID NO: 2441 - protein, 474 aa, Artificial Sequence
  Fusion Protein
HGEGTFTSDKSQLLEKRLAHLFIEWLIAGGHKSGKYSPKGGGGGGGSGGGGSGGGGSAESKYGPPCPPCPAPEFEGGPSVFLFPPKPKDTLMISRTPEVTCVVVDVSQEDPEVQFNWYVDGVEVHNAKTKPREEQFNSTYRVVSVLTVLHQDWLNGKEYKCKVSNKGLPSSIEKTISKAKGQPREPQVYTLPPSQEEMTKNQVSLTCLVKGFYPSDIAVEWESNGQPENNYKTTPPVLDSDGSFFLYSRLTVDKSRWQEGNVFSCSVMHEALHNHYTQKSLSLSLGGGGSGSAHPIPDSSPLLQFGGQVRQRYLYTDDACQTEAHLEIREDGTVGGAADQSPESLLQLKALKPGVIQILGVKTSRFLCQRPDGALYGSLHFDPEACSFRELLLEDGYNVYQSEAHGLPLHLPGCKSPHRDPAPRGPARFLPLPGLPPAPPEPPGILAPQPPDVGSSDPLSMVYPSQGRSPSYAS

SEQ ID NO: 2442 - protein, 473 aa, Artificial Sequence
  Fusion Protein
HGEGTFTSDKSQLLEKRLAHLFIEWLIAGGHKSGKYSPKGGGGGGGSGGGGSGGGGSAESKYGPPCPPCPAPEFEGGPSVFLFPPKPKDTLMISRTPEVTCVVVDVSQEDPEVQFNWYVDGVEVHNAKTKPREEQFNSTYRVVSVLTVLHQDWLNGKEYKCKVSNKGLPSSIEKTISKAKGQPREPQVYTLPPSQEEMTKNQVSLTCLVKGFYPSDIAVEWESNGQPENNYKTTPPVLDSDGSFFLYSRLTVDKSRWQEGNVFSCSVMHEALHNHYTQKSLSLSLGGGGSGSAHPIPDSSPLLQFGGQVRQRYLYTDDACQTEAHLEIREDGTVGGAADQSPESLLQLKALKPGVIQILGVKTSRFLCQRPDGALYGSLHFDPEACSFRELLLEDGYNVYQSEAHGLPLHLCGNKSPHRDPAPRGPARFLPLPGLPPAPPEPPGILAPQPPDVGSSDPLSMVGSQGRSPSYAS

SEQ ID NO: 2443 - protein, 474 aa, Artificial Sequence
  Fusion Protein
HGEGTFTSDKSQLLEKRLAHLFIEWLIAGGHKSGKYSPKGGGGGGGSGGGGSGGGGSAESKYGPPCPPCPAPEFEGGPSVFLFPPKPKDTLMISRTPEVTCVVVDVSQEDPEVQFNWYVDGVEVHNAKTKPREEQFNSTYRVVSVLTVLHQDWLNGKEYKCKVSNKGLPSSIEKTISKAKGQPREPQVYTLPPSQEEMTKNQVSLTCLVKGFYPSDIAVEWESNGQPENNYKTTPPVLDSDGSFFLYSRLTVDKSRWQEGNVFSCSVMHEALHNHYTQKSLSLSLGGGGSGSAHPIPDSSPLLQFGGQVRQRYLYTDDACQTEAHLEIREDGTVGGAADQSPESLLQLKALKPGVIQILGVKTSRFLCQRPDGALYGSLHFDPEACSFRELLLEDGYNVYQSEAHGLPLHLCGNKSPHRDPAPRGPARFLPLPGLPPAPPEPPGILAPQPPDVGSSDPLSMVYPSQGRSPSYAS

SEQ ID NO: 2444 - protein, 471 aa, Artificial Sequence
  Fusion Protein
HGEGTFTSDKSQLLEKRLAHLFIEWLLKGGHSKGKPPPKGGGGGGGSGGGGSGGGGSADKTHTCPPCPAPEAAGGPSVFLFPPKPKDTLMISRTPEVTCVVVDVSHEDPEVKFNWYVDGVEVHNAKTKPREEQYNSTYRVVSVLTVLHQDWLNGKEYKCKVSNKALPAPIEKTISKAKGQPREPQVYTLPPSRDELTKNQVSLTCLVKGFYPSDIAVEWESNGQPENNYKTTPPVLDSDGSFFLYSKLTVDKSRWQQGNVFSCSVMHEALHNHYTQKSLSLSPGGGGSGSAHPIPDSSPLLQFGGQVRQRYLYTDDACQTEAHLEIREDGTVGGAADQSPESLLQLKALKPGVIQILGVKTSRFLCQRPDGALYGSLHFDPEACSFRELLLEDGYNVYQSEAHGLPLHLPGCKSPHRDPAPRGPARFLPLPGLPPAPPEPPGILAPQPPDVGSSDPLSMVGSQGRSPSYAS

SEQ ID NO: 2445 - protein, 472 aa, Artificial Sequence
  Fusion Protein
HGEGTFTSDKSQLLEKRLAHLFIEWLLKGGHSKGKPPPKGGGGGGGSGGGGSGGGGSADKTHTCPPCPAPEAAGGPSVFLFPPKPKDTLMISRTPEVTCVVVDVSHEDPEVKFNWYVDGVEVHNAKTKPREEQYNSTYRVVSVLTVLHQDWLNGKEYKCKVSNKALPAPIEKTISKAKGQPREPQVYTLPPSRDELTKNQVSLTCLVKGFYPSDIAVEWESNGQPENNYKTTPPVLDSDGSFFLYSKLTVDKSRWQQGNVFSCSVMHEALHNHYTQKSLSLSPGGGGSGSAHPIPDSSPLLQFGGQVRQRYLYTDDACQTEAHLEIREDGTVGGAADQSPESLLQLKALKPGVIQILGVKTSRFLCQRPDGALYGSLHFDPEACSFRELLLEDGYNVYQSEAHGLPLHLPGCKSPHRDPAPRGPARFLPLPGLPPAPPEPPGILAPQPPDVGSSDPLSMVYPSQGRSPSYAS

SEQ ID NO: 2446 - protein, 471 aa, Artificial Sequence
  Fusion Protein
HGEGTFTSDKSQLLEKRLAHLFIEWLLKGGHSKGKPPPKGGGGGGGSGGGGSGGGGSADKTHTCPPCPAPEAAGGPSVFLFPPKPKDTLMISRTPEVTCVVVDVSHEDPEVKFNWYVDGVEVHNAKTKPREEQYNSTYRVVSVLTVLHQDWLNGKEYKCKVSNKALPAPIEKTISKAKGQPREPQVYTLPPSRDELTKNQVSLTCLVKGFYPSDIAVEWESNGQPENNYKTTPPVLDSDGSFFLYSKLTVDKSRWQQGNVFSCSVMHEALHNHYTQKSLSLSPGGGGSGSAHPIPDSSPLLQFGGQVRQRYLYTDDACQTEAHLEIREDGTVGGAADQSPESLLQLKALKPGVIQILGVKTSRFLCQRPDGALYGSLHFDPEACSFRELLLEDGYNVYQSEAHGLPLHLCGNKSPHRDPAPRGPARFLPLPGLPPAPPEPPGILAPQPPDVGSSDPLSMVGSQGRSPSYAS

SEQ ID NO: 2447 - protein, 472 aa, Artificial Sequence
  Fusion Protein
HGEGTFTSDKSQLLEKRLAHLFIEWLLKGGHSKGKPPPKGGGGGGGSGGGGSGGGGSADKTHTCPPCPAPEAAGGPSVFLFPPKPKDTLMISRTPEVTCVVVDVSHEDPEVKFNWYVDGVEVHNAKTKPREEQYNSTYRVVSVLTVLHQDWLNGKEYKCKVSNKALPAPIEKTISKAKGQPREPQVYTLPPSRDELTKNQVSLTCLVKGFYPSDIAVEWESNGQPENNYKTTPPVLDSDGSFFLYSKLTVDKSRWQQGNVFSCSVMHEALHNHYTQKSLSLSPGGGGSGSAHPIPDSSPLLQFGGQVRQRYLYTDDACQTEAHLEIREDGTVGGAADQSPESLLQLKALKPGVIQILGVKTSRFLCQRPDGALYGSLHFDPEACSFRELLLEDGYNVYQSEAHGLPLHLCGNKSPHRDPAPRGPARFLPLPGLPPAPPEPPGILAPQPPDVGSSDPLSMVYPSQGRSPSYAS

SEQ ID NO: 2448 - protein, 471 aa, Artificial Sequence
  Fusion Protein
HGEGTFTSDKSQLLEKRLAHLFIEWLLKGGHSKGKPPPKGGGGGGGSGGGGSGGGGSADKTHTCPPCPAPELLGGPSVFLFPPKPKDTLMISRTPEVTCVVVDVSHEDPEVKFNWYVDGVEVHNAKTKPREEQYNNASRVVSVLTVLHQDWLNGKEYKCKVSNKALPAPIEKTISKAKGQPREPQVYTLPPSRDELTKNQVSLTCLVKGFYPSDIAVEWESNGQPENNYKTTPPVLDSDGSFFLYSKLTVDKSRWQQGNVFSCSVMHEALHNHYTQKSLSLSPGGGGSGSAHPIPDSSPLLQFGGQVRQRYLYTDDACQTEAHLEIREDGTVGGAADQSPESLLQLKALKPGVIQILGVKTSRFLCQRPDGALYGSLHFDPEACSFRELLLEDGYNVYQSEAHGLPLHLPGCKSPHRDPAPRGPARFLPLPGLPPAPPEPPGILAPQPPDVGSSDPLSMVGSQGRSPSYAS

SEQ ID NO: 2449 - protein, 472 aa, Artificial Sequence
  Fusion Protein
HGEGTFTSDKSQLLEKRLAHLFIEWLLKGGHSKGKPPPKGGGGGGGSGGGGSGGGGSADKTHTCPPCPAPELLGGPSVFLFPPKPKDTLMISRTPEVTCVVVDVSHEDPEVKFNWYVDGVEVHNAKTKPREEQYNNASRVVSVLTVLHQDWLNGKEYKCKVSNKALPAPIEKTISKAKGQPREPQVYTLPPSRDELTKNQVSLTCLVKGFYPSDIAVEWESNGQPENNYKTTPPVLDSDGSFFLYSKLTVDKSRWQQGNVFSCSVMHEALHNHYTQKSLSLSPGGGGSGSAHPIPDSSPLLQFGGQVRQRYLYTDDACQTEAHLEIREDGTVGGAADQSPESLLQLKALKPGVIQILGVKTSRFLCQRPDGALYGSLHFDPEACSFRELLLEDGYNVYQSEAHGLPLHLPGCKSPHRDPAPRGPARFLPLPGLPPAPPEPPGILAPQPPDVGSSDPLSMVYPSQGRSPSYAS

SEQ ID NO: 2450 - protein, 471 aa, Artificial Sequence
  Fusion Protein
HGEGTFTSDKSQLLEKRLAHLFIEWLLKGGHSKGKPPPKGGGGGGGSGGGGSGGGGSADKTHTCPPCPAPELLGGPSVFLFPPKPKDTLMISRTPEVTCVVVDVSHEDPEVKFNWYVDGVEVHNAKTKPREEQYNNASRVVSVLTVLHQDWLNGKEYKCKVSNKALPAPIEKTISKAKGQPREPQVYTLPPSRDELTKNQVSLTCLVKGFYPSDIAVEWESNGQPENNYKTTPPVLDSDGSFFLYSKLTVDKSRWQQGNVFSCSVMHEALHNHYTQKSLSLSPGGGGSGSAHPIPDSSPLLQFGGQVRQRYLYTDDACQTEAHLEIREDGTVGGAADQSPESLLQLKALKPGVIQILGVKTSRFLCQRPDGALYGSLHFDPEACSFRELLLEDGYNVYQSEAHGLPLHLCGNKSPHRDPAPRGPARFLPLPGLPPAPPEPPGILAPQPPDVGSSDPLSMVGSQGRSPSYAS

SEQ ID NO: 2451 - protein, 472 aa, Artificial Sequence
  Fusion Protein
HGEGTFTSDKSQLLEKRLAHLFIEWLLKGGHSKGKPPPKGGGGGGGSGGGGSGGGGSADKTHTCPPCPAPELLGGPSVFLFPPKPKDTLMISRTPEVTCVVVDVSHEDPEVKFNWYVDGVEVHNAKTKPREEQYNNASRVVSVLTVLHQDWLNGKEYKCKVSNKALPAPIEKTISKAKGQPREPQVYTLPPSRDELTKNQVSLTCLVKGFYPSDIAVEWESNGQPENNYKTTPPVLDSDGSFFLYSKLTVDKSRWQQGNVFSCSVMHEALHNHYTQKSLSLSPGGGGSGSAHPIPDSSPLLQFGGQVRQRYLYTDDACQTEAHLEIREDGTVGGAADQSPESLLQLKALKPGVIQILGVKTSRFLCQRPDGALYGSLHFDPEACSFRELLLEDGYNVYQSEAHGLPLHLCGNKSPHRDPAPRGPARFLPLPGLPPAPPEPPGILAPQPPDVGSSDPLSMVYPSQGRSPSYAS

SEQ ID NO: 2452 - protein, 474 aa, Artificial Sequence
  Fusion Protein
HGEGTFTSDKSQLLEKRLAHLFIEWLLKGGHSKGKPPPKGGGGGGGSGGGGSGGGGSAESKYGPPCPPCPAPEFEGGPSVFLFPPKPKDTLMISRTPEVTCVVVDVSQEDPEVQFNWYVDGVEVHNAKTKPREEQFNSTYRVVSVLTVLHQDWLNGKEYKCKVSNKGLPSSIEKTISKAKGQPREPQVYTLPPSQEEMTKNQVSLTCLVKGFYPSDIAVEWESNGQPENNYKTTPPVLDSDGSFFLYSRLTVDKSRWQEGNVFSCSVMHEALHNHYTQKSLSLSLGGGGSGSAHPIPDSSPLLQFGGQVRQRYLYTDDACQTEAHLEIREDGTVGGAADQSPESLLQLKALKPGVIQILGVKTSRFLCQRPDGALYGSLHFDPEACSFRELLLEDGYNVYQSEAHGLPLHLPGCKSPHRDPAPRGPARFLPLPGLPPAPPEPPGILAPQPPDVGSSDPLSMVYPSQGRSPSYAS

SEQ ID NO: 2453 - protein, 473 aa, Artificial Sequence
  Fusion Protein
HGEGTFTSDKSQLLEKRLAHLFIEWLLKGGHSKGKPPPKGGGGGGGSGGGGSGGGGSAESKYGPPCPPCPAPEFEGGPSVFLFPPKPKDTLMISRTPEVTCVVVDVSQEDPEVQFNWYVDGVEVHNAKTKPREEQFNSTYRVVSVLTVLHQDWLNGKEYKCKVSNKGLPSSIEKTISKAKGQPREPQVYTLPPSQEEMTKNQVSLTCLVKGFYPSDIAVEWESNGQPENNYKTTPPVLDSDGSFFLYSRLTVDKSRWQEGNVFSCSVMHEALHNHYTQKSLSLSLGGGGSGSAHPIPDSSPLLQFGGQVRQRYLYTDDACQTEAHLEIREDGTVGGAADQSPESLLQLKALKPGVIQILGVKTSRFLCQRPDGALYGSLHFDPEACSFRELLLEDGYNVYQSEAHGLPLHLCGNKSPHRDPAPRGPARFLPLPGLPPAPPEPPGILAPQPPDVGSSDPLSMVGSQGRSPSYAS

SEQ ID NO: 2454 - protein, 474 aa, Artificial Sequence
  Fusion Protein
HGEGTFTSDKSQLLEKRLAHLFIEWLLKGGHSKGKPPPKGGGGGGGSGGGGSGGGGSAESKYGPPCPPCPAPEFEGGPSVFLFPPKPKDTLMISRTPEVTCVVVDVSQEDPEVQFNWYVDGVEVHNAKTKPREEQFNSTYRVVSVLTVLHQDWLNGKEYKCKVSNKGLPSSIEKTISKAKGQPREPQVYTLPPSQEEMTKNQVSLTCLVKGFYPSDIAVEWESNGQPENNYKTTPPVLDSDGSFFLYSRLTVDKSRWQEGNVFSCSVMHEALHNHYTQKSLSLSLGGGGSGSAHPIPDSSPLLQFGGQVRQRYLYTDDACQTEAHLEIREDGTVGGAADQSPESLLQLKALKPGVIQILGVKTSRFLCQRPDGALYGSLHFDPEACSFRELLLEDGYNVYQSEAHGLPLHLCGNKSPHRDPAPRGPARFLPLPGLPPAPPEPPGILAPQPPDVGSSDPLSMVYPSQGRSPSYAS

SEQ ID NO: 2455 - protein, 471 aa, Artificial Sequence
  Fusion Protein
HGEGTFTSDKSQLLEKRLAHLFIEWLIKGGPSSIKPPPKGGGGGGGSGGGGSGGGGSADKTHTCPPCPAPEAAGGPSVFLFPPKPKDTLMISRTPEVTCVVVDVSHEDPEVKFNWYVDGVEVHNAKTKPREEQYNSTYRVVSVLTVLHQDWLNGKEYKCKVSNKALPAPIEKTISKAKGQPREPQVYTLPPSRDELTKNQVSLTCLVKGFYPSDIAVEWESNGQPENNYKTTPPVLDSDGSFFLYSKLTVDKSRWQQGNVFSCSVMHEALHNHYTQKSLSLSPGGGGSGSAHPIPDSSPLLQFGGQVRQRYLYTDDACQTEAHLEIREDGTVGGAADQSPESLLQLKALKPGVIQILGVKTSRFLCQRPDGALYGSLHFDPEACSFRELLLEDGYNVYQSEAHGLPLHLPGCKSPHRDPAPRGPARFLPLPGLPPAPPEPPGILAPQPPDVGSSDPLSMVGSQGRSPSYAS

SEQ ID NO: 2456 - protein, 472 aa, Artificial Sequence
  Fusion Protein
HGEGTFTSDKSQLLEKRLAHLFIEWLIKGGPSSIKPPPKGGGGGGGSGGGGSGGGGSADKTHTCPPCPAPEAAGGPSVFLFPPKPKDTLMISRTPEVTCVVVDVSHEDPEVKFNWYVDGVEVHNAKTKPREEQYNSTYRVVSVLTVLHQDWLNGKEYKCKVSNKALPAPIEKTISKAKGQPREPQVYTLPPSRDELTKNQVSLTCLVKGFYPSDIAVEWESNGQPENNYKTTPPVLDSDGSFFLYSKLTVDKSRWQQGNVFSCSVMHEALHNHYTQKSLSLSPGGGGSGSAHPIPDSSPLLQFGGQVRQRYLYTDDACQTEAHLEIREDGTVGGAADQSPESLLQLKALKPGVIQILGVKTSRFLCQRPDGALYGSLHFDPEACSFRELLLEDGYNVYQSEAHGLPLHLPGCKSPHRDPAPRGPARFLPLPGLPPAPPEPPGILAPQPPDVGSSDPLSMVYPSQGRSPSYAS

SEQ ID NO: 2457 - protein, 471 aa, Artificial Sequence
  Fusion Protein
HGEGTFTSDKSQLLEKRLAHLFIEWLIKGGPSSIKPPPKGGGGGGGSGGGGSGGGGSADKTHTCPPCPAPEAAGGPSVFLFPPKPKDTLMISRTPEVTCVVVDVSHEDPEVKFNWYVDGVEVHNAKTKPREEQYNSTYRVVSVLTVLHQDWLNGKEYKCKVSNKALPAPIEKTISKAKGQPREPQVYTLPPSRDELTKNQVSLTCLVKGFYPSDIAVEWESNGQPENNYKTTPPVLDSDGSFFLYSKLTVDKSRWQQGNVFSCSVMHEALHNHYTQKSLSLSPGGGGSGSAHPIPDSSPLLQFGGQVRQRYLYTDDACQTEAHLEIREDGTVGGAADQSPESLLQLKALKPGVIQILGVKTSRFLCQRPDGALYGSLHFDPEACSFRELLLEDGYNVYQSEAHGLPLHLCGNKSPHRDPAPRGPARFLPLPGLPPAPPEPPGILAPQPPDVGSSDPLSMVGSQGRSPSYAS

SEQ ID NO: 2458 - protein, 472 aa, Artificial Sequence
  Fusion Protein
HGEGTFTSDKSQLLEKRLAHLFIEWLIKGGPSSIKPPPKGGGGGGGSGGGGSGGGGSADKTHTCPPCPAPEAAGGPSVFLFPPKPKDTLMISRTPEVTCVVVDVSHEDPEVKFNWYVDGVEVHNAKTKPREEQYNSTYRVVSVLTVLHQDWLNGKEYKCKVSNKALPAPIEKTISKAKGQPREPQVYTLPPSRDELTKNQVSLTCLVKGFYPSDIAVEWESNGQPENNYKTTPPVLDSDGSFFLYSKLTVDKSRWQQGNVFSCSVMHEALHNHYTQKSLSLSPGGGGSGSAHPIPDSSPLLQFGGQVRQRYLYTDDACQTEAHLEIREDGTVGGAADQSPESLLQLKALKPGVIQILGVKTSRFLCQRPDGALYGSLHFDPEACSFRELLLEDGYNVYQSEAHGLPLHLCGNKSPHRDPAPRGPARFLPLPGLPPAPPEPPGILAPQPPDVGSSDPLSMVYPSQGRSPSYAS

SEQ ID NO: 2459 - protein, 471 aa, Artificial Sequence
  Fusion Protein
HGEGTFTSDKSQLLEKRLAHLFIEWLIKGGPSSIKPPPKGGGGGGGSGGGGSGGGGSADKTHTCPPCPAPELLGGPSVFLFPPKPKDTLMISRTPEVTCVVVDVSHEDPEVKFNWYVDGVEVHNAKTKPREEQYNNASRVVSVLTVLHQDWLNGKEYKCKVSNKALPAPIEKTISKAKGQPREPQVYTLPPSRDELTKNQVSLTCLVKGFYPSDIAVEWESNGQPENNYKTTPPVLDSDGSFFLYSKLTVDKSRWQQGNVFSCSVMHEALHNHYTQKSLSLSPGGGGSGSAHPIPDSSPLLQFGGQVRQRYLYTDDACQTEAHLEIREDGTVGGAADQSPESLLQLKALKPGVIQILGVKTSRFLCQRPDGALYGSLHFDPEACSFRELLLEDGYNVYQSEAHGLPLHLPGCKSPHRDPAPRGPARFLPLPGLPPAPPEPPGILAPQPPDVGSSDPLSMVGSQGRSPSYAS

SEQ ID NO: 2460 - protein, 472 aa, Artificial Sequence
  Fusion Protein
HGEGTFTSDKSQLLEKRLAHLFIEWLIKGGPSSIKPPPKGGGGGGGSGGGGSGGGGSADKTHTCPPCPAPELLGGPSVFLFPPKPKDTLMISRTPEVTCVVVDVSHEDPEVKFNWYVDGVEVHNAKTKPREEQYNNASRVVSVLTVLHQDWLNGKEYKCKVSNKALPAPIEKTISKAKGQPREPQVYTLPPSRDELTKNQVSLTCLVKGFYPSDIAVEWESNGQPENNYKTTPPVLDSDGSFFLYSKLTVDKSRWQQGNVFSCSVMHEALHNHYTQKSLSLSPGGGGSGSAHPIPDSSPLLQFGGQVRQRYLYTDDACQTEAHLEIREDGTVGGAADQSPESLLQLKALKPGVIQILGVKTSRFLCQRPDGALYGSLHFDPEACSFRELLLEDGYNVYQSEAHGLPLHLPGCKSPHRDPAPRGPARFLPLPGLPPAPPEPPGILAPQPPDVGSSDPLSMVYPSQGRSPSYAS

SEQ ID NO: 2461 - protein, 471 aa, Artificial Sequence
  Fusion Protein
HGEGTFTSDKSQLLEKRLAHLFIEWLIKGGPSSIKPPPKGGGGGGGSGGGGSGGGGSADKTHTCPPCPAPELLGGPSVFLFPPKPKDTLMISRTPEVTCVVVDVSHEDPEVKFNWYVDGVEVHNAKTKPREEQYNNASRVVSVLTVLHQDWLNGKEYKCKVSNKALPAPIEKTISKAKGQPREPQVYTLPPSRDELTKNQVSLTCLVKGFYPSDIAVEWESNGQPENNYKTTPPVLDSDGSFFLYSKLTVDKSRWQQGNVFSCSVMHEALHNHYTQKSLSLSPGGGGSGSAHPIPDSSPLLQFGGQVRQRYLYTDDACQTEAHLEIREDGTVGGAADQSPESLLQLKALKPGVIQILGVKTSRFLCQRPDGALYGSLHFDPEACSFRELLLEDGYNVYQSEAHGLPLHLCGNKSPHRDPAPRGPARFLPLPGLPPAPPEPPGILAPQPPDVGSSDPLSMVGSQGRSPSYAS

SEQ ID NO: 2462 - protein, 472 aa, Artificial Sequence
  Fusion Protein
HGEGTFTSDKSQLLEKRLAHLFIEWLIKGGPSSIKPPPKGGGGGGGSGGGGSGGGGSADKTHTCPPCPAPELLGGPSVFLFPPKPKDTLMISRTPEVTCVVVDVSHEDPEVKFNWYVDGVEVHNAKTKPREEQYNNASRVVSVLTVLHQDWLNGKEYKCKVSNKALPAPIEKTISKAKGQPREPQVYTLPPSRDELTKNQVSLTCLVKGFYPSDIAVEWESNGQPENNYKTTPPVLDSDGSFFLYSKLTVDKSRWQQGNVFSCSVMHEALHNHYTQKSLSLSPGGGGSGSAHPIPDSSPLLQFGGQVRQRYLYTDDACQTEAHLEIREDGTVGGAADQSPESLLQLKALKPGVIQILGVKTSRFLCQRPDGALYGSLHFDPEACSFRELLLEDGYNVYQSEAHGLPLHLCGNKSPHRDPAPRGPARFLPLPGLPPAPPEPPGILAPQPPDVGSSDPLSMVYPSQGRSPSYAS

SEQ ID NO: 2463 - protein, 474 aa, Artificial Sequence
  Fusion Protein
HGEGTFTSDKSQLLEKRLAHLFIEWLIKGGPSSIKPPPKGGGGGGGSGGGGSGGGGSAESKYGPPCPPCPAPEFEGGPSVFLFPPKPKDTLMISRTPEVTCVVVDVSQEDPEVQFNWYVDGVEVHNAKTKPREEQFNSTYRVVSVLTVLHQDWLNGKEYKCKVSNKGLPSSIEKTISKAKGQPREPQVYTLPPSQEEMTKNQVSLTCLVKGFYPSDIAVEWESNGQPENNYKTTPPVLDSDGSFFLYSRLTVDKSRWQEGNVFSCSVMHEALHNHYTQKSLSLSLGGGGSGSAHPIPDSSPLLQFGGQVRQRYLYTDDACQTEAHLEIREDGTVGGAADQSPESLLQLKALKPGVIQILGVKTSRFLCQRPDGALYGSLHFDPEACSFRELLLEDGYNVYQSEAHGLPLHLPGCKSPHRDPAPRGPARFLPLPGLPPAPPEPPGILAPQPPDVGSSDPLSMVYPSQGRSPSYAS

SEQ ID NO: 2464 - protein, 473 aa, Artificial Sequence
  Fusion Protein
HGEGTFTSDKSQLLEKRLAHLFIEWLIKGGPSSIKPPPKGGGGGGGSGGGGSGGGGSAESKYGPPCPPCPAPEFEGGPSVFLFPPKPKDTLMISRTPEVTCVVVDVSQEDPEVQFNWYVDGVEVHNAKTKPREEQFNSTYRVVSVLTVLHQDWLNGKEYKCKVSNKGLPSSIEKTISKAKGQPREPQVYTLPPSQEEMTKNQVSLTCLVKGFYPSDIAVEWESNGQPENNYKTTPPVLDSDGSFFLYSRLTVDKSRWQEGNVFSCSVMHEALHNHYTQKSLSLSLGGGGSGSAHPIPDSSPLLQFGGQVRQRYLYTDDACQTEAHLEIREDGTVGGAADQSPESLLQLKALKPGVIQILGVKTSRFLCQRPDGALYGSLHFDPEACSFRELLLEDGYNVYQSEAHGLPLHLCGNKSPHRDPAPRGPARFLPLPGLPPAPPEPPGILAPQPPDVGSSDPLSMVGSQGRSPSYAS

SEQ ID NO: 2465 - protein, 474 aa, Artificial Sequence
  Fusion Protein
HGEGTFTSDKSQLLEKRLAHLFIEWLIKGGPSSIKPPPKGGGGGGGSGGGGSGGGGSAESKYGPPCPPCPAPEFEGGPSVFLFPPKPKDTLMISRTPEVTCVVVDVSQEDPEVQFNWYVDGVEVHNAKTKPREEQFNSTYRVVSVLTVLHQDWLNGKEYKCKVSNKGLPSSIEKTISKAKGQPREPQVYTLPPSQEEMTKNQVSLTCLVKGFYPSDIAVEWESNGQPENNYKTTPPVLDSDGSFFLYSRLTVDKSRWQEGNVFSCSVMHEALHNHYTQKSLSLSLGGGGSGSAHPIPDSSPLLQFGGQVRQRYLYTDDACQTEAHLEIREDGTVGGAADQSPESLLQLKALKPGVIQILGVKTSRFLCQRPDGALYGSLHFDPEACSFRELLLEDGYNVYQSEAHGLPLHLCGNKSPHRDPAPRGPARFLPLPGLPPAPPEPPGILAPQPPDVGSSDPLSMVYPSQGRSPSYAS

SEQ ID NO: 2466 - protein, 471 aa, Artificial Sequence
  Fusion Protein
HGEGTFTSDKSQLLEKRLAHLFIEWLIKGGHSSIRPPPKGGGGGGGSGGGGSGGGGSADKTHTCPPCPAPEAAGGPSVFLFPPKPKDTLMISRTPEVTCVVVDVSHEDPEVKFNWYVDGVEVHNAKTKPREEQYNSTYRVVSVLTVLHQDWLNGKEYKCKVSNKALPAPIEKTISKAKGQPREPQVYTLPPSRDELTKNQVSLTCLVKGFYPSDIAVEWESNGQPENNYKTTPPVLDSDGSFFLYSKLTVDKSRWQQGNVFSCSVMHEALHNHYTQKSLSLSPGGGGSGSAHPIPDSSPLLQFGGQVRQRYLYTDDACQTEAHLEIREDGTVGGAADQSPESLLQLKALKPGVIQILGVKTSRFLCQRPDGALYGSLHFDPEACSFRELLLEDGYNVYQSEAHGLPLHLPGCKSPHRDPAPRGPARFLPLPGLPPAPPEPPGILAPQPPDVGSSDPLSMVGSQGRSPSYAS

SEQ ID NO: 2467 - protein, 472 aa, Artificial Sequence
  Fusion Protein
HGEGTFTSDKSQLLEKRLAHLFIEWLIKGGHSSIRPPPKGGGGGGGSGGGGSGGGGSADKTHTCPPCPAPEAAGGPSVFLFPPKPKDTLMISRTPEVTCVVVDVSHEDPEVKFNWYVDGVEVHNAKTKPREEQYNSTYRVVSVLTVLHQDWLNGKEYKCKVSNKALPAPIEKTISKAKGQPREPQVYTLPPSRDELTKNQVSLTCLVKGFYPSDIAVEWESNGQPENNYKTTPPVLDSDGSFFLYSKLTVDKSRWQQGNVFSCSVMHEALHNHYTQKSLSLSPGGGGSGSAHPIPDSSPLLQFGGQVRQRYLYTDDACQTEAHLEIREDGTVGGAADQSPESLLQLKALKPGVIQILGVKTSRFLCQRPDGALYGSLHFDPEACSFRELLLEDGYNVYQSEAHGLPLHLPGCKSPHRDPAPRGPARFLPLPGLPPAPPEPPGILAPQPPDVGSSDPLSMVYPSQGRSPSYAS

SEQ ID NO: 2468 - protein, 471 aa, Artificial Sequence
  Fusion Protein
HGEGTFTSDKSQLLEKRLAHLFIEWLIKGGHSSIRPPPKGGGGGGGSGGGGSGGGGSADKTHTCPPCPAPEAAGGPSVFLFPPKPKDTLMISRTPEVTCVVVDVSHEDPEVKFNWYVDGVEVHNAKTKPREEQYNSTYRVVSVLTVLHQDWLNGKEYKCKVSNKALPAPIEKTISKAKGQPREPQVYTLPPSRDELTKNQVSLTCLVKGFYPSDIAVEWESNGQPENNYKTTPPVLDSDGSFFLYSKLTVDKSRWQQGNVFSCSVMHEALHNHYTQKSLSLSPGGGGSGSAHPIPDSSPLLQFGGQVRQRYLYTDDACQTEAHLEIREDGTVGGAADQSPESLLQLKALKPGVIQILGVKTSRFLCQRPDGALYGSLHFDPEACSFRELLLEDGYNVYQSEAHGLPLHLCGNKSPHRDPAPRGPARFLPLPGLPPAPPEPPGILAPQPPDVGSSDPLSMVGSQGRSPSYAS

SEQ ID NO: 2469 - protein, 472 aa, Artificial Sequence
  Fusion Protein
HGEGTFTSDKSQLLEKRLAHLFIEWLIKGGHSSIRPPPKGGGGGGGSGGGGSGGGGSADKTHTCPPCPAPEAAGGPSVFLFPPKPKDTLMISRTPEVTCVVVDVSHEDPEVKFNWYVDGVEVHNAKTKPREEQYNSTYRVVSVLTVLHQDWLNGKEYKCKVSNKALPAPIEKTISKAKGQPREPQVYTLPPSRDELTKNQVSLTCLVKGFYPSDIAVEWESNGQPENNYKTTPPVLDSDGSFFLYSKLTVDKSRWQQGNVFSCSVMHEALHNHYTQKSLSLSPGGGGSGSAHPIPDSSPLLQFGGQVRQRYLYTDDACQTEAHLEIREDGTVGGAADQSPESLLQLKALKPGVIQILGVKTSRFLCQRPDGALYGSLHFDPEACSFRELLLEDGYNVYQSEAHGLPLHLCGNKSPHRDPAPRGPARFLPLPGLPPAPPEPPGILAPQPPDVGSSDPLSMVYPSQGRSPSYAS

SEQ ID NO: 2470 - protein, 471 aa, Artificial Sequence
  Fusion Protein
HGEGTFTSDKSQLLEKRLAHLFIEWLIKGGHSSIRPPPKGGGGGGGSGGGGSGGGGSADKTHTCPPCPAPELLGGPSVFLFPPKPKDTLMISRTPEVTCVVVDVSHEDPEVKFNWYVDGVEVHNAKTKPREEQYNNASRVVSVLTVLHQDWLNGKEYKCKVSNKALPAPIEKTISKAKGQPREPQVYTLPPSRDELTKNQVSLTCLVKGFYPSDIAVEWESNGQPENNYKTTPPVLDSDGSFFLYSKLTVDKSRWQQGNVFSCSVMHEALHNHYTQKSLSLSPGGGGSGSAHPIPDSSPLLQFGGQVRQRYLYTDDACQTEAHLEIREDGTVGGAADQSPESLLQLKALKPGVIQILGVKTSRFLCQRPDGALYGSLHFDPEACSFRELLLEDGYNVYQSEAHGLPLHLPGCKSPHRDPAPRGPARFLPLPGLPPAPPEPPGILAPQPPDVGSSDPLSMVGSQGRSPSYAS

SEQ ID NO: 2471 - protein, 472 aa, Artificial Sequence
  Fusion Protein
HGEGTFTSDKSQLLEKRLAHLFIEWLIKGGHSSIRPPPKGGGGGGGSGGGGSGGGGSADKTHTCPPCPAPELLGGPSVFLFPPKPKDTLMISRTPEVTCVVVDVSHEDPEVKFNWYVDGVEVHNAKTKPREEQYNNASRVVSVLTVLHQDWLNGKEYKCKVSNKALPAPIEKTISKAKGQPREPQVYTLPPSRDELTKNQVSLTCLVKGFYPSDIAVEWESNGQPENNYKTTPPVLDSDGSFFLYSKLTVDKSRWQQGNVFSCSVMHEALHNHYTQKSLSLSPGGGGSGSAHPIPDSSPLLQFGGQVRQRYLYTDDACQTEAHLEIREDGTVGGAADQSPESLLQLKALKPGVIQILGVKTSRFLCQRPDGALYGSLHFDPEACSFRELLLEDGYNVYQSEAHGLPLHLPGCKSPHRDPAPRGPARFLPLPGLPPAPPEPPGILAPQPPDVGSSDPLSMVYPSQGRSPSYAS

SEQ ID NO: 2472 - protein, 471 aa, Artificial Sequence
  Fusion Protein
HGEGTFTSDKSQLLEKRLAHLFIEWLIKGGHSSIRPPPKGGGGGGGSGGGGSGGGGSADKTHTCPPCPAPELLGGPSVFLFPPKPKDTLMISRTPEVTCVVVDVSHEDPEVKFNWYVDGVEVHNAKTKPREEQYNNASRVVSVLTVLHQDWLNGKEYKCKVSNKALPAPIEKTISKAKGQPREPQVYTLPPSRDELTKNQVSLTCLVKGFYPSDIAVEWESNGQPENNYKTTPPVLDSDGSFFLYSKLTVDKSRWQQGNVFSCSVMHEALHNHYTQKSLSLSPGGGGSGSAHPIPDSSPLLQFGGQVRQRYLYTDDACQTEAHLEIREDGTVGGAADQSPESLLQLKALKPGVIQILGVKTSRFLCQRPDGALYGSLHFDPEACSFRELLLEDGYNVYQSEAHGLPLHLCGNKSPHRDPAPRGPARFLPLPGLPPAPPEPPGILAPQPPDVGSSDPLSMVGSQGRSPSYAS

SEQ ID NO: 2473 - protein, 472 aa, Artificial Sequence
  Fusion Protein
HGEGTFTSDKSQLLEKRLAHLFIEWLIKGGHSSIRPPPKGGGGGGGSGGGGSGGGGSADKTHTCPPCPAPELLGGPSVFLFPPKPKDTLMISRTPEVTCVVVDVSHEDPEVKFNWYVDGVEVHNAKTKPREEQYNNASRVVSVLTVLHQDWLNGKEYKCKVSNKALPAPIEKTISKAKGQPREPQVYTLPPSRDELTKNQVSLTCLVKGFYPSDIAVEWESNGQPENNYKTTPPVLDSDGSFFLYSKLTVDKSRWQQGNVFSCSVMHEALHNHYTQKSLSLSPGGGGSGSAHPIPDSSPLLQFGGQVRQRYLYTDDACQTEAHLEIREDGTVGGAADQSPESLLQLKALKPGVIQILGVKTSRFLCQRPDGALYGSLHFDPEACSFRELLLEDGYNVYQSEAHGLPLHLCGNKSPHRDPAPRGPARFLPLPGLPPAPPEPPGILAPQPPDVGSSDPLSMVYPSQGRSPSYAS

SEQ ID NO: 2474 - protein, 474 aa, Artificial Sequence
  Fusion Protein
HGEGTFTSDKSQLLEKRLAHLFIEWLIKGGHSSIRPPPKGGGGGGGSGGGGSGGGGSAESKYGPPCPPCPAPEFEGGPSVFLFPPKPKDTLMISRTPEVTCVVVDVSQEDPEVQFNWYVDGVEVHNAKTKPREEQFNSTYRVVSVLTVLHQDWLNGKEYKCKVSNKGLPSSIEKTISKAKGQPREPQVYTLPPSQEEMTKNQVSLTCLVKGFYPSDIAVEWESNGQPENNYKTTPPVLDSDGSFFLYSRLTVDKSRWQEGNVFSCSVMHEALHNHYTQKSLSLSLGGGGSGSAHPIPDSSPLLQFGGQVRQRYLYTDDACQTEAHLEIREDGTVGGAADQSPESLLQLKALKPGVIQILGVKTSRFLCQRPDGALYGSLHFDPEACSFRELLLEDGYNVYQSEAHGLPLHLPGCKSPHRDPAPRGPARFLPLPGLPPAPPEPPGILAPQPPDVGSSDPLSMVYPSQGRSPSYAS

SEQ ID NO: 2475 - protein, 473 aa, Artificial Sequence
  Fusion Protein
HGEGTFTSDKSQLLEKRLAHLFIEWLIKGGHSSIRPPPKGGGGGGGSGGGGSGGGGSAESKYGPPCPPCPAPEFEGGPSVFLFPPKPKDTLMISRTPEVTCVVVDVSQEDPEVQFNWYVDGVEVHNAKTKPREEQFNSTYRVVSVLTVLHQDWLNGKEYKCKVSNKGLPSSIEKTISKAKGQPREPQVYTLPPSQEEMTKNQVSLTCLVKGFYPSDIAVEWESNGQPENNYKTTPPVLDSDGSFFLYSRLTVDKSRWQEGNVFSCSVMHEALHNHYTQKSLSLSLGGGGSGSAHPIPDSSPLLQFGGQVRQRYLYTDDACQTEAHLEIREDGTVGGAADQSPESLLQLKALKPGVIQILGVKTSRFLCQRPDGALYGSLHFDPEACSFRELLLEDGYNVYQSEAHGLPLHLCGNKSPHRDPAPRGPARFLPLPGLPPAPPEPPGILAPQPPDVGSSDPLSMVGSQGRSPSYAS

SEQ ID NO: 2476 - protein, 474 aa, Artificial Sequence
  Fusion Protein
HGEGTFTSDKSQLLEKRLAHLFIEWLIKGGHSSIRPPPKGGGGGGGSGGGGSGGGGSAESKYGPPCPPCPAPEFEGGPSVFLFPPKPKDTLMISRTPEVTCVVVDVSQEDPEVQFNWYVDGVEVHNAKTKPREEQFNSTYRVVSVLTVLHQDWLNGKEYKCKVSNKGLPSSIEKTISKAKGQPREPQVYTLPPSQEEMTKNQVSLTCLVKGFYPSDIAVEWESNGQPENNYKTTPPVLDSDGSFFLYSRLTVDKSRWQEGNVFSCSVMHEALHNHYTQKSLSLSLGGGGSGSAHPIPDSSPLLQFGGQVRQRYLYTDDACQTEAHLEIREDGTVGGAADQSPESLLQLKALKPGVIQILGVKTSRFLCQRPDGALYGSLHFDPEACSFRELLLEDGYNVYQSEAHGLPLHLCGNKSPHRDPAPRGPARFLPLPGLPPAPPEPPGILAPQPPDVGSSDPLSMVYPSQGRSPSYAS

SEQ ID NO: 2477 - protein, 471 aa, Artificial Sequence
  Fusion Protein
HGEGTFTSDKSQLLEKRLAHLFIEWLLAGGHKKGKPPPKGGGGGGGSGGGGSGGGGSADKTHTCPPCPAPEAAGGPSVFLFPPKPKDTLMISRTPEVTCVVVDVSHEDPEVKFNWYVDGVEVHNAKTKPREEQYNSTYRVVSVLTVLHQDWLNGKEYKCKVSNKALPAPIEKTISKAKGQPREPQVYTLPPSRDELTKNQVSLTCLVKGFYPSDIAVEWESNGQPENNYKTTPPVLDSDGSFFLYSKLTVDKSRWQQGNVFSCSVMHEALHNHYTQKSLSLSPGGGGSGSAHPIPDSSPLLQFGGQVRQRYLYTDDACQTEAHLEIREDGTVGGAADQSPESLLQLKALKPGVIQILGVKTSRFLCQRPDGALYGSLHFDPEACSFRELLLEDGYNVYQSEAHGLPLHLPGCKSPHRDPAPRGPARFLPLPGLPPAPPEPPGILAPQPPDVGSSDPLSMVGSQGRSPSYAS

SEQ ID NO: 2478 - protein, 472 aa, Artificial Sequence
  Fusion Protein
HGEGTFTSDKSQLLEKRLAHLFIEWLLAGGHKKGKPPPKGGGGGGGSGGGGSGGGGSADKTHTCPPCPAPEAAGGPSVFLFPPKPKDTLMISRTPEVTCVVVDVSHEDPEVKFNWYVDGVEVHNAKTKPREEQYNSTYRVVSVLTVLHQDWLNGKEYKCKVSNKALPAPIEKTISKAKGQPREPQVYTLPPSRDELTKNQVSLTCLVKGFYPSDIAVEWESNGQPENNYKTTPPVLDSDGSFFLYSKLTVDKSRWQQGNVFSCSVMHEALHNHYTQKSLSLSPGGGGSGSAHPIPDSSPLLQFGGQVRQRYLYTDDACQTEAHLEIREDGTVGGAADQSPESLLQLKALKPGVIQILGVKTSRFLCQRPDGALYGSLHFDPEACSFRELLLEDGYNVYQSEAHGLPLHLPGCKSPHRDPAPRGPARFLPLPGLPPAPPEPPGILAPQPPDVGSSDPLSMVYPSQGRSPSYAS

SEQ ID NO: 2479 - protein, 471 aa, Artificial Sequence
  Fusion Protein
HGEGTFTSDKSQLLEKRLAHLFIEWLLAGGHKKGKPPPKGGGGGGGSGGGGSGGGGSADKTHTCPPCPAPEAAGGPSVFLFPPKPKDTLMISRTPEVTCVVVDVSHEDPEVKFNWYVDGVEVHNAKTKPREEQYNSTYRVVSVLTVLHQDWLNGKEYKCKVSNKALPAPIEKTISKAKGQPREPQVYTLPPSRDELTKNQVSLTCLVKGFYPSDIAVEWESNGQPENNYKTTPPVLDSDGSFFLYSKLTVDKSRWQQGNVFSCSVMHEALHNHYTQKSLSLSPGGGGSGSAHPIPDSSPLLQFGGQVRQRYLYTDDACQTEAHLEIREDGTVGGAADQSPESLLQLKALKPGVIQILGVKTSRFLCQRPDGALYGSLHFDPEACSFRELLLEDGYNVYQSEAHGLPLHLCGNKSPHRDPAPRGPARFLPLPGLPPAPPEPPGILAPQPPDVGSSDPLSMVGSQGRSPSYAS

SEQ ID NO: 2480 - protein, 472 aa, Artificial Sequence
  Fusion Protein
HGEGTFTSDKSQLLEKRLAHLFIEWLLAGGHKKGKPPPKGGGGGGGSGGGGSGGGGSADKTHTCPPCPAPEAAGGPSVFLFPPKPKDTLMISRTPEVTCVVVDVSHEDPEVKFNWYVDGVEVHNAKTKPREEQYNSTYRVVSVLTVLHQDWLNGKEYKCKVSNKALPAPIEKTISKAKGQPREPQVYTLPPSRDELTKNQVSLTCLVKGFYPSDIAVEWESNGQPENNYKTTPPVLDSDGSFFLYSKLTVDKSRWQQGNVFSCSVMHEALHNHYTQKSLSLSPGGGGSGSAHPIPDSSPLLQFGGQVRQRYLYTDDACQTEAHLEIREDGTVGGAADQSPESLLQLKALKPGVIQILGVKTSRFLCQRPDGALYGSLHFDPEACSFRELLLEDGYNVYQSEAHGLPLHLCGNKSPHRDPAPRGPARFLPLPGLPPAPPEPPGILAPQPPDVGSSDPLSMVYPSQGRSPSYAS

SEQ ID NO: 2481 - protein, 471 aa, Artificial Sequence
  Fusion Protein
HGEGTFTSDKSQLLEKRLAHLFIEWLLAGGHKKGKPPPKGGGGGGGSGGGGSGGGGSADKTHTCPPCPAPELLGGPSVFLFPPKPKDTLMISRTPEVTCVVVDVSHEDPEVKFNWYVDGVEVHNAKTKPREEQYNNASRVVSVLTVLHQDWLNGKEYKCKVSNKALPAPIEKTISKAKGQPREPQVYTLPPSRDELTKNQVSLTCLVKGFYPSDIAVEWESNGQPENNYKTTPPVLDSDGSFFLYSKLTVDKSRWQQGNVFSCSVMHEALHNHYTQKSLSLSPGGGGSGSAHPIPDSSPLLQFGGQVRQRYLYTDDACQTEAHLEIREDGTVGGAADQSPESLLQLKALKPGVIQILGVKTSRFLCQRPDGALYGSLHFDPEACSFRELLLEDGYNVYQSEAHGLPLHLPGCKSPHRDPAPRGPARFLPLPGLPPAPPEPPGILAPQPPDVGSSDPLSMVGSQGRSPSYAS

SEQ ID NO: 2482 - protein, 472 aa, Artificial Sequence
  Fusion Protein
HGEGTFTSDKSQLLEKRLAHLFIEWLLAGGHKKGKPPPKGGGGGGGSGGGGSGGGGSADKTHTCPPCPAPELLGGPSVFLFPPKPKDTLMISRTPEVTCVVVDVSHEDPEVKFNWYVDGVEVHNAKTKPREEQYNNASRVVSVLTVLHQDWLNGKEYKCKVSNKALPAPIEKTISKAKGQPREPQVYTLPPSRDELTKNQVSLTCLVKGFYPSDIAVEWESNGQPENNYKTTPPVLDSDGSFFLYSKLTVDKSRWQQGNVFSCSVMHEALHNHYTQKSLSLSPGGGGSGSAHPIPDSSPLLQFGGQVRQRYLYTDDACQTEAHLEIREDGTVGGAADQSPESLLQLKALKPGVIQILGVKTSRFLCQRPDGALYGSLHFDPEACSFRELLLEDGYNVYQSEAHGLPLHLPGCKSPHRDPAPRGPARFLPLPGLPPAPPEPPGILAPQPPDVGSSDPLSMVYPSQGRSPSYAS

SEQ ID NO: 2483 - protein, 471 aa, Artificial Sequence
  Fusion Protein
HGEGTFTSDKSQLLEKRLAHLFIEWLLAGGHKKGKPPPKGGGGGGGSGGGGSGGGGSADKTHTCPPCPAPELLGGPSVFLFPPKPKDTLMISRTPEVTCVVVDVSHEDPEVKFNWYVDGVEVHNAKTKPREEQYNNASRVVSVLTVLHQDWLNGKEYKCKVSNKALPAPIEKTISKAKGQPREPQVYTLPPSRDELTKNQVSLTCLVKGFYPSDIAVEWESNGQPENNYKTTPPVLDSDGSFFLYSKLTVDKSRWQQGNVFSCSVMHEALHNHYTQKSLSLSPGGGGSGSAHPIPDSSPLLQFGGQVRQRYLYTDDACQTEAHLEIREDGTVGGAADQSPESLLQLKALKPGVIQILGVKTSRFLCQRPDGALYGSLHFDPEACSFRELLLEDGYNVYQSEAHGLPLHLCGNKSPHRDPAPRGPARFLPLPGLPPAPPEPPGILAPQPPDVGSSDPLSMVGSQGRSPSYAS

SEQ ID NO: 2484 - protein, 472 aa, Artificial Sequence
  Fusion Protein
HGEGTFTSDKSQLLEKRLAHLFIEWLLAGGHKKGKPPPKGGGGGGGSGGGGSGGGGSADKTHTCPPCPAPELLGGPSVFLFPPKPKDTLMISRTPEVTCVVVDVSHEDPEVKFNWYVDGVEVHNAKTKPREEQYNNASRVVSVLTVLHQDWLNGKEYKCKVSNKALPAPIEKTISKAKGQPREPQVYTLPPSRDELTKNQVSLTCLVKGFYPSDIAVEWESNGQPENNYKTTPPVLDSDGSFFLYSKLTVDKSRWQQGNVFSCSVMHEALHNHYTQKSLSLSPGGGGSGSAHPIPDSSPLLQFGGQVRQRYLYTDDACQTEAHLEIREDGTVGGAADQSPESLLQLKALKPGVIQILGVKTSRFLCQRPDGALYGSLHFDPEACSFRELLLEDGYNVYQSEAHGLPLHLCGNKSPHRDPAPRGPARFLPLPGLPPAPPEPPGILAPQPPDVGSSDPLSMVYPSQGRSPSYAS

SEQ ID NO: 2485 - protein, 474 aa, Artificial Sequence
  Fusion Protein
HGEGTFTSDKSQLLEKRLAHLFIEWLLAGGHKKGKPPPKGGGGGGGSGGGGSGGGGSAESKYGPPCPPCPAPEFEGGPSVFLFPPKPKDTLMISRTPEVTCVVVDVSQEDPEVQFNWYVDGVEVHNAKTKPREEQFNSTYRVVSVLTVLHQDWLNGKEYKCKVSNKGLPSSIEKTISKAKGQPREPQVYTLPPSQEEMTKNQVSLTCLVKGFYPSDIAVEWESNGQPENNYKTTPPVLDSDGSFFLYSRLTVDKSRWQEGNVFSCSVMHEALHNHYTQKSLSLSLGGGGSGSAHPIPDSSPLLQFGGQVRQRYLYTDDACQTEAHLEIREDGTVGGAADQSPESLLQLKALKPGVIQILGVKTSRFLCQRPDGALYGSLHFDPEACSFRELLLEDGYNVYQSEAHGLPLHLPGCKSPHRDPAPRGPARFLPLPGLPPAPPEPPGILAPQPPDVGSSDPLSMVYPSQGRSPSYAS

SEQ ID NO: 2486 - protein, 473 aa, Artificial Sequence
  Fusion Protein
HGEGTFTSDKSQLLEKRLAHLFIEWLLAGGHKKGKPPPKGGGGGGGSGGGGSGGGGSAESKYGPPCPPCPAPEFEGGPSVFLFPPKPKDTLMISRTPEVTCVVVDVSQEDPEVQFNWYVDGVEVHNAKTKPREEQFNSTYRVVSVLTVLHQDWLNGKEYKCKVSNKGLPSSIEKTISKAKGQPREPQVYTLPPSQEEMTKNQVSLTCLVKGFYPSDIAVEWESNGQPENNYKTTPPVLDSDGSFFLYSRLTVDKSRWQEGNVFSCSVMHEALHNHYTQKSLSLSLGGGGSGSAHPIPDSSPLLQFGGQVRQRYLYTDDACQTEAHLEIREDGTVGGAADQSPESLLQLKALKPGVIQILGVKTSRFLCQRPDGALYGSLHFDPEACSFRELLLEDGYNVYQSEAHGLPLHLCGNKSPHRDPAPRGPARFLPLPGLPPAPPEPPGILAPQPPDVGSSDPLSMVGSQGRSPSYAS

SEQ ID NO: 2487 - protein, 474 aa, Artificial Sequence
  Fusion Protein
HGEGTFTSDKSQLLEKRLAHLFIEWLLAGGHKKGKPPPKGGGGGGGSGGGGSGGGGSAESKYGPPCPPCPAPEFEGGPSVFLFPPKPKDTLMISRTPEVTCVVVDVSQEDPEVQFNWYVDGVEVHNAKTKPREEQFNSTYRVVSVLTVLHQDWLNGKEYKCKVSNKGLPSSIEKTISKAKGQPREPQVYTLPPSQEEMTKNQVSLTCLVKGFYPSDIAVEWESNGQPENNYKTTPPVLDSDGSFFLYSRLTVDKSRWQEGNVFSCSVMHEALHNHYTQKSLSLSLGGGGSGSAHPIPDSSPLLQFGGQVRQRYLYTDDACQTEAHLEIREDGTVGGAADQSPESLLQLKALKPGVIQILGVKTSRFLCQRPDGALYGSLHFDPEACSFRELLLEDGYNVYQSEAHGLPLHLCGNKSPHRDPAPRGPARFLPLPGLPPAPPEPPGILAPQPPDVGSSDPLSMVYPSQGRSPSYAS

SEQ ID NO: 2488 - protein, 471 aa, Artificial Sequence
  Fusion Protein
HGEGTFTSDKSQLLEKRLAHLFIEWLLKGGHSSGRPPPKGGGGGGGSGGGGSGGGGSADKTHTCPPCPAPEAAGGPSVFLFPPKPKDTLMISRTPEVTCVVVDVSHEDPEVKFNWYVDGVEVHNAKTKPREEQYNSTYRVVSVLTVLHQDWLNGKEYKCKVSNKALPAPIEKTISKAKGQPREPQVYTLPPSRDELTKNQVSLTCLVKGFYPSDIAVEWESNGQPENNYKTTPPVLDSDGSFFLYSKLTVDKSRWQQGNVFSCSVMHEALHNHYTQKSLSLSPGGGGSGSAHPIPDSSPLLQFGGQVRQRYLYTDDACQTEAHLEIREDGTVGGAADQSPESLLQLKALKPGVIQILGVKTSRFLCQRPDGALYGSLHFDPEACSFRELLLEDGYNVYQSEAHGLPLHLPGCKSPHRDPAPRGPARFLPLPGLPPAPPEPPGILAPQPPDVGSSDPLSMVGSQGRSPSYAS

SEQ ID NO: 2489 - protein, 472 aa, Artificial Sequence
  Fusion Protein
HGEGTFTSDKSQLLEKRLAHLFIEWLLKGGHSSGRPPPKGGGGGGGSGGGGSGGGGSADKTHTCPPCPAPEAAGGPSVFLFPPKPKDTLMISRTPEVTCVVVDVSHEDPEVKFNWYVDGVEVHNAKTKPREEQYNSTYRVVSVLTVLHQDWLNGKEYKCKVSNKALPAPIEKTISKAKGQPREPQVYTLPPSRDELTKNQVSLTCLVKGFYPSDIAVEWESNGQPENNYKTTPPVLDSDGSFFLYSKLTVDKSRWQQGNVFSCSVMHEALHNHYTQKSLSLSPGGGGSGSAHPIPDSSPLLQFGGQVRQRYLYTDDACQTEAHLEIREDGTVGGAADQSPESLLQLKALKPGVIQILGVKTSRFLCQRPDGALYGSLHFDPEACSFRELLLEDGYNVYQSEAHGLPLHLPGCKSPHRDPAPRGPARFLPLPGLPPAPPEPPGILAPQPPDVGSSDPLSMVYPSQGRSPSYAS

SEQ ID NO: 2490 - protein, 471 aa, Artificial Sequence
  Fusion Protein
HGEGTFTSDKSQLLEKRLAHLFIEWLLKGGHSSGRPPPKGGGGGGGSGGGGSGGGGSADKTHTCPPCPAPEAAGGPSVFLFPPKPKDTLMISRTPEVTCVVVDVSHEDPEVKFNWYVDGVEVHNAKTKPREEQYNSTYRVVSVLTVLHQDWLNGKEYKCKVSNKALPAPIEKTISKAKGQPREPQVYTLPPSRDELTKNQVSLTCLVKGFYPSDIAVEWESNGQPENNYKTTPPVLDSDGSFFLYSKLTVDKSRWQQGNVFSCSVMHEALHNHYTQKSLSLSPGGGGSGSAHPIPDSSPLLQFGGQVRQRYLYTDDACQTEAHLEIREDGTVGGAADQSPESLLQLKALKPGVIQILGVKTSRFLCQRPDGALYGSLHFDPEACSFRELLLEDGYNVYQSEAHGLPLHLCGNKSPHRDPAPRGPARFLPLPGLPPAPPEPPGILAPQPPDVGSSDPLSMVGSQGRSPSYAS

SEQ ID NO: 2491 - protein, 472 aa, Artificial Sequence
  Fusion Protein
HGEGTFTSDKSQLLEKRLAHLFIEWLLKGGHSSGRPPPKGGGGGGGSGGGGSGGGGSADKTHTCPPCPAPEAAGGPSVFLFPPKPKDTLMISRTPEVTCVVVDVSHEDPEVKFNWYVDGVEVHNAKTKPREEQYNSTYRVVSVLTVLHQDWLNGKEYKCKVSNKALPAPIEKTISKAKGQPREPQVYTLPPSRDELTKNQVSLTCLVKGFYPSDIAVEWESNGQPENNYKTTPPVLDSDGSFFLYSKLTVDKSRWQQGNVFSCSVMHEALHNHYTQKSLSLSPGGGGSGSAHPIPDSSPLLQFGGQVRQRYLYTDDACQTEAHLEIREDGTVGGAADQSPESLLQLKALKPGVIQILGVKTSRFLCQRPDGALYGSLHFDPEACSFRELLLEDGYNVYQSEAHGLPLHLCGNKSPHRDPAPRGPARFLPLPGLPPAPPEPPGILAPQPPDVGSSDPLSMVYPSQGRSPSYAS

SEQ ID NO: 2492 - protein, 471 aa, Artificial Sequence
  Fusion Protein
HGEGTFTSDKSQLLEKRLAHLFIEWLLKGGHSSGRPPPKGGGGGGGSGGGGSGGGGSADKTHTCPPCPAPELLGGPSVFLFPPKPKDTLMISRTPEVTCVVVDVSHEDPEVKFNWYVDGVEVHNAKTKPREEQYNNASRVVSVLTVLHQDWLNGKEYKCKVSNKALPAPIEKTISKAKGQPREPQVYTLPPSRDELTKNQVSLTCLVKGFYPSDIAVEWESNGQPENNYKTTPPVLDSDGSFFLYSKLTVDKSRWQQGNVFSCSVMHEALHNHYTQKSLSLSPGGGGSGSAHPIPDSSPLLQFGGQVRQRYLYTDDACQTEAHLEIREDGTVGGAADQSPESLLQLKALKPGVIQILGVKTSRFLCQRPDGALYGSLHFDPEACSFRELLLEDGYNVYQSEAHGLPLHLPGCKSPHRDPAPRGPARFLPLPGLPPAPPEPPGILAPQPPDVGSSDPLSMVGSQGRSPSYAS

SEQ ID NO: 2493 - protein, 472 aa, Artificial Sequence
  Fusion Protein
HGEGTFTSDKSQLLEKRLAHLFIEWLLKGGHSSGRPPPKGGGGGGGSGGGGSGGGGSADKTHTCPPCPAPELLGGPSVFLFPPKPKDTLMISRTPEVTCVVVDVSHEDPEVKFNWYVDGVEVHNAKTKPREEQYNNASRVVSVLTVLHQDWLNGKEYKCKVSNKALPAPIEKTISKAKGQPREPQVYTLPPSRDELTKNQVSLTCLVKGFYPSDIAVEWESNGQPENNYKTTPPVLDSDGSFFLYSKLTVDKSRWQQGNVFSCSVMHEALHNHYTQKSLSLSPGGGGSGSAHPIPDSSPLLQFGGQVRQRYLYTDDACQTEAHLEIREDGTVGGAADQSPESLLQLKALKPGVIQILGVKTSRFLCQRPDGALYGSLHFDPEACSFRELLLEDGYNVYQSEAHGLPLHLPGCKSPHRDPAPRGPARFLPLPGLPPAPPEPPGILAPQPPDVGSSDPLSMVYPSQGRSPSYAS

SEQ ID NO: 2494 - protein, 471 aa, Artificial Sequence
  Fusion Protein
HGEGTFTSDKSQLLEKRLAHLFIEWLLKGGHSSGRPPPKGGGGGGGSGGGGSGGGGSADKTHTCPPCPAPELLGGPSVFLFPPKPKDTLMISRTPEVTCVVVDVSHEDPEVKFNWYVDGVEVHNAKTKPREEQYNNASRVVSVLTVLHQDWLNGKEYKCKVSNKALPAPIEKTISKAKGQPREPQVYTLPPSRDELTKNQVSLTCLVKGFYPSDIAVEWESNGQPENNYKTTPPVLDSDGSFFLYSKLTVDKSRWQQGNVFSCSVMHEALHNHYTQKSLSLSPGGGGSGSAHPIPDSSPLLQFGGQVRQRYLYTDDACQTEAHLEIREDGTVGGAADQSPESLLQLKALKPGVIQILGVKTSRFLCQRPDGALYGSLHFDPEACSFRELLLEDGYNVYQSEAHGLPLHLCGNKSPHRDPAPRGPARFLPLPGLPPAPPEPPGILAPQPPDVGSSDPLSMVGSQGRSPSYAS

SEQ ID NO: 2495 - protein, 472 aa, Artificial Sequence
  Fusion Protein
HGEGTFTSDKSQLLEKRLAHLFIEWLLKGGHSSGRPPPKGGGGGGGSGGGGSGGGGSADKTHTCPPCPAPELLGGPSVFLFPPKPKDTLMISRTPEVTCVVVDVSHEDPEVKFNWYVDGVEVHNAKTKPREEQYNNASRVVSVLTVLHQDWLNGKEYKCKVSNKALPAPIEKTISKAKGQPREPQVYTLPPSRDELTKNQVSLTCLVKGFYPSDIAVEWESNGQPENNYKTTPPVLDSDGSFFLYSKLTVDKSRWQQGNVFSCSVMHEALHNHYTQKSLSLSPGGGGSGSAHPIPDSSPLLQFGGQVRQRYLYTDDACQTEAHLEIREDGTVGGAADQSPESLLQLKALKPGVIQILGVKTSRFLCQRPDGALYGSLHFDPEACSFRELLLEDGYNVYQSEAHGLPLHLCGNKSPHRDPAPRGPARFLPLPGLPPAPPEPPGILAPQPPDVGSSDPLSMVYPSQGRSPSYAS

SEQ ID NO: 2496 - protein, 474 aa, Artificial Sequence
  Fusion Protein
HGEGTFTSDKSQLLEKRLAHLFIEWLLKGGHSSGRPPPKGGGGGGGSGGGGSGGGGSAESKYGPPCPPCPAPEFEGGPSVFLFPPKPKDTLMISRTPEVTCVVVDVSQEDPEVQFNWYVDGVEVHNAKTKPREEQFNSTYRVVSVLTVLHQDWLNGKEYKCKVSNKGLPSSIEKTISKAKGQPREPQVYTLPPSQEEMTKNQVSLTCLVKGFYPSDIAVEWESNGQPENNYKTTPPVLDSDGSFFLYSRLTVDKSRWQEGNVFSCSVMHEALHNHYTQKSLSLSLGGGGSGSAHPIPDSSPLLQFGGQVRQRYLYTDDACQTEAHLEIREDGTVGGAADQSPESLLQLKALKPGVIQILGVKTSRFLCQRPDGALYGSLHFDPEACSFRELLLEDGYNVYQSEAHGLPLHLPGCKSPHRDPAPRGPARFLPLPGLPPAPPEPPGILAPQPPDVGSSDPLSMVYPSQGRSPSYAS

SEQ ID NO: 2497 - protein, 473 aa, Artificial Sequence
  Fusion Protein
HGEGTFTSDKSQLLEKRLAHLFIEWLLKGGHSSGRPPPKGGGGGGGSGGGGSGGGGSAESKYGPPCPPCPAPEFEGGPSVFLFPPKPKDTLMISRTPEVTCVVVDVSQEDPEVQFNWYVDGVEVHNAKTKPREEQFNSTYRVVSVLTVLHQDWLNGKEYKCKVSNKGLPSSIEKTISKAKGQPREPQVYTLPPSQEEMTKNQVSLTCLVKGFYPSDIAVEWESNGQPENNYKTTPPVLDSDGSFFLYSRLTVDKSRWQEGNVFSCSVMHEALHNHYTQKSLSLSLGGGGSGSAHPIPDSSPLLQFGGQVRQRYLYTDDACQTEAHLEIREDGTVGGAADQSPESLLQLKALKPGVIQILGVKTSRFLCQRPDGALYGSLHFDPEACSFRELLLEDGYNVYQSEAHGLPLHLCGNKSPHRDPAPRGPARFLPLPGLPPAPPEPPGILAPQPPDVGSSDPLSMVGSQGRSPSYAS

SEQ ID NO: 2498 - protein, 474 aa, Artificial Sequence
  Fusion Protein
HGEGTFTSDKSQLLEKRLAHLFIEWLLKGGHSSGRPPPKGGGGGGGSGGGGSGGGGSAESKYGPPCPPCPAPEFEGGPSVFLFPPKPKDTLMISRTPEVTCVVVDVSQEDPEVQFNWYVDGVEVHNAKTKPREEQFNSTYRVVSVLTVLHQDWLNGKEYKCKVSNKGLPSSIEKTISKAKGQPREPQVYTLPPSQEEMTKNQVSLTCLVKGFYPSDIAVEWESNGQPENNYKTTPPVLDSDGSFFLYSRLTVDKSRWQEGNVFSCSVMHEALHNHYTQKSLSLSLGGGGSGSAHPIPDSSPLLQFGGQVRQRYLYTDDACQTEAHLEIREDGTVGGAADQSPESLLQLKALKPGVIQILGVKTSRFLCQRPDGALYGSLHFDPEACSFRELLLEDGYNVYQSEAHGLPLHLCGNKSPHRDPAPRGPARFLPLPGLPPAPPEPPGILAPQPPDVGSSDPLSMVYPSQGRSPSYAS

SEQ ID NO: 2499 - protein, 471 aa, Artificial Sequence
  Fusion Protein
HGEGTFTSDKSQLLEKRLAHLFIEWLIAGGPSSGKYSPKGGGGGGGSGGGGSGGGGSADKTHTCPPCPAPEAAGGPSVFLFPPKPKDTLMISRTPEVTCVVVDVSHEDPEVKFNWYVDGVEVHNAKTKPREEQYNSTYRVVSVLTVLHQDWLNGKEYKCKVSNKALPAPIEKTISKAKGQPREPQVYTLPPSRDELTKNQVSLTCLVKGFYPSDIAVEWESNGQPENNYKTTPPVLDSDGSFFLYSKLTVDKSRWQQGNVFSCSVMHEALHNHYTQKSLSLSPGGGGSGSAHPIPDSSPLLQFGGQVRQRYLYTDDACQTEAHLEIREDGTVGGAADQSPESLLQLKALKPGVIQILGVKTSRFLCQRPDGALYGSLHFDPEACSFRELLLEDGYNVYQSEAHGLPLHLPGCKSPHRDPAPRGPARFLPLPGLPPAPPEPPGILAPQPPDVGSSDPLSMVGSQGRSPSYAS

SEQ ID NO: 2500 - protein, 472 aa, Artificial Sequence
  Fusion Protein
HGEGTFTSDKSQLLEKRLAHLFIEWLIAGGPSSGKYSPKGGGGGGGSGGGGSGGGGSADKTHTCPPCPAPEAAGGPSVFLFPPKPKDTLMISRTPEVTCVVVDVSHEDPEVKFNWYVDGVEVHNAKTKPREEQYNSTYRVVSVLTVLHQDWLNGKEYKCKVSNKALPAPIEKTISKAKGQPREPQVYTLPPSRDELTKNQVSLTCLVKGFYPSDIAVEWESNGQPENNYKTTPPVLDSDGSFFLYSKLTVDKSRWQQGNVFSCSVMHEALHNHYTQKSLSLSPGGGGSGSAHPIPDSSPLLQFGGQVRQRYLYTDDACQTEAHLEIREDGTVGGAADQSPESLLQLKALKPGVIQILGVKTSRFLCQRPDGALYGSLHFDPEACSFRELLLEDGYNVYQSEAHGLPLHLPGCKSPHRDPAPRGPARFLPLPGLPPAPPEPPGILAPQPPDVGSSDPLSMVYPSQGRSPSYAS

SEQ ID NO: 2501 - protein, 471 aa, Artificial Sequence
  Fusion Protein
HGEGTFTSDKSQLLEKRLAHLFIEWLIAGGPSSGKYSPKGGGGGGGSGGGGSGGGGSADKTHTCPPCPAPEAAGGPSVFLFPPKPKDTLMISRTPEVTCVVVDVSHEDPEVKFNWYVDGVEVHNAKTKPREEQYNSTYRVVSVLTVLHQDWLNGKEYKCKVSNKALPAPIEKTISKAKGQPREPQVYTLPPSRDELTKNQVSLTCLVKGFYPSDIAVEWESNGQPENNYKTTPPVLDSDGSFFLYSKLTVDKSRWQQGNVFSCSVMHEALHNHYTQKSLSLSPGGGGSGSAHPIPDSSPLLQFGGQVRQRYLYTDDACQTEAHLEIREDGTVGGAADQSPESLLQLKALKPGVIQILGVKTSRFLCQRPDGALYGSLHFDPEACSFRELLLEDGYNVYQSEAHGLPLHLCGNKSPHRDPAPRGPARFLPLPGLPPAPPEPPGILAPQPPDVGSSDPLSMVGSQGRSPSYAS

SEQ ID NO: 2502 - protein, 472 aa, Artificial Sequence
  Fusion Protein
HGEGTFTSDKSQLLEKRLAHLFIEWLIAGGPSSGKYSPKGGGGGGGSGGGGSGGGGSADKTHTCPPCPAPEAAGGPSVFLFPPKPKDTLMISRTPEVTCVVVDVSHEDPEVKFNWYVDGVEVHNAKTKPREEQYNSTYRVVSVLTVLHQDWLNGKEYKCKVSNKALPAPIEKTISKAKGQPREPQVYTLPPSRDELTKNQVSLTCLVKGFYPSDIAVEWESNGQPENNYKTTPPVLDSDGSFFLYSKLTVDKSRWQQGNVFSCSVMHEALHNHYTQKSLSLSPGGGGSGSAHPIPDSSPLLQFGGQVRQRYLYTDDACQTEAHLEIREDGTVGGAADQSPESLLQLKALKPGVIQILGVKTSRFLCQRPDGALYGSLHFDPEACSFRELLLEDGYNVYQSEAHGLPLHLCGNKSPHRDPAPRGPARFLPLPGLPPAPPEPPGILAPQPPDVGSSDPLSMVYPSQGRSPSYAS

SEQ ID NO: 2503 - protein, 471 aa, Artificial Sequence
  Fusion Protein
HGEGTFTSDKSQLLEKRLAHLFIEWLIAGGPSSGKYSPKGGGGGGGSGGGGSGGGGSADKTHTCPPCPAPELLGGPSVFLFPPKPKDTLMISRTPEVTCVVVDVSHEDPEVKFNWYVDGVEVHNAKTKPREEQYNNASRVVSVLTVLHQDWLNGKEYKCKVSNKALPAPIEKTISKAKGQPREPQVYTLPPSRDELTKNQVSLTCLVKGFYPSDIAVEWESNGQPENNYKTTPPVLDSDGSFFLYSKLTVDKSRWQQGNVFSCSVMHEALHNHYTQKSLSLSPGGGGSGSAHPIPDSSPLLQFGGQVRQRYLYTDDACQTEAHLEIREDGTVGGAADQSPESLLQLKALKPGVIQILGVKTSRFLCQRPDGALYGSLHFDPEACSFRELLLEDGYNVYQSEAHGLPLHLPGCKSPHRDPAPRGPARFLPLPGLPPAPPEPPGILAPQPPDVGSSDPLSMVGSQGRSPSYAS

SEQ ID NO: 2504 - protein, 472 aa, Artificial Sequence
  Fusion Protein
HGEGTFTSDKSQLLEKRLAHLFIEWLIAGGPSSGKYSPKGGGGGGGSGGGGSGGGGSADKTHTCPPCPAPELLGGPSVFLFPPKPKDTLMISRTPEVTCVVVDVSHEDPEVKFNWYVDGVEVHNAKTKPREEQYNNASRVVSVLTVLHQDWLNGKEYKCKVSNKALPAPIEKTISKAKGQPREPQVYTLPPSRDELTKNQVSLTCLVKGFYPSDIAVEWESNGQPENNYKTTPPVLDSDGSFFLYSKLTVDKSRWQQGNVFSCSVMHEALHNHYTQKSLSLSPGGGGSGSAHPIPDSSPLLQFGGQVRQRYLYTDDACQTEAHLEIREDGTVGGAADQSPESLLQLKALKPGVIQILGVKTSRFLCQRPDGALYGSLHFDPEACSFRELLLEDGYNVYQSEAHGLPLHLPGCKSPHRDPAPRGPARFLPLPGLPPAPPEPPGILAPQPPDVGSSDPLSMVYPSQGRSPSYAS

SEQ ID NO: 2505 - protein, 471 aa, Artificial Sequence
  Fusion Protein
HGEGTFTSDKSQLLEKRLAHLFIEWLIAGGPSSGKYSPKGGGGGGGSGGGGSGGGGSADKTHTCPPCPAPELLGGPSVFLFPPKPKDTLMISRTPEVTCVVVDVSHEDPEVKFNWYVDGVEVHNAKTKPREEQYNNASRVVSVLTVLHQDWLNGKEYKCKVSNKALPAPIEKTISKAKGQPREPQVYTLPPSRDELTKNQVSLTCLVKGFYPSDIAVEWESNGQPENNYKTTPPVLDSDGSFFLYSKLTVDKSRWQQGNVFSCSVMHEALHNHYTQKSLSLSPGGGGSGSAHPIPDSSPLLQFGGQVRQRYLYTDDACQTEAHLEIREDGTVGGAADQSPESLLQLKALKPGVIQILGVKTSRFLCQRPDGALYGSLHFDPEACSFRELLLEDGYNVYQSEAHGLPLHLCGNKSPHRDPAPRGPARFLPLPGLPPAPPEPPGILAPQPPDVGSSDPLSMVGSQGRSPSYAS

SEQ ID NO: 2506 - protein, 472 aa, Artificial Sequence
  Fusion Protein
HGEGTFTSDKSQLLEKRLAHLFIEWLIAGGPSSGKYSPKGGGGGGGSGGGGSGGGGSADKTHTCPPCPAPELLGGPSVFLFPPKPKDTLMISRTPEVTCVVVDVSHEDPEVKFNWYVDGVEVHNAKTKPREEQYNNASRVVSVLTVLHQDWLNGKEYKCKVSNKALPAPIEKTISKAKGQPREPQVYTLPPSRDELTKNQVSLTCLVKGFYPSDIAVEWESNGQPENNYKTTPPVLDSDGSFFLYSKLTVDKSRWQQGNVFSCSVMHEALHNHYTQKSLSLSPGGGGSGSAHPIPDSSPLLQFGGQVRQRYLYTDDACQTEAHLEIREDGTVGGAADQSPESLLQLKALKPGVIQILGVKTSRFLCQRPDGALYGSLHFDPEACSFRELLLEDGYNVYQSEAHGLPLHLCGNKSPHRDPAPRGPARFLPLPGLPPAPPEPPGILAPQPPDVGSSDPLSMVYPSQGRSPSYAS

SEQ ID NO: 2507 - protein, 474 aa, Artificial Sequence
  Fusion Protein
HGEGTFTSDKSQLLEKRLAHLFIEWLIAGGPSSGKYSPKGGGGGGGSGGGGSGGGGSAESKYGPPCPPCPAPEFEGGPSVFLFPPKPKDTLMISRTPEVTCVVVDVSQEDPEVQFNWYVDGVEVHNAKTKPREEQFNSTYRVVSVLTVLHQDWLNGKEYKCKVSNKGLPSSIEKTISKAKGQPREPQVYTLPPSQEEMTKNQVSLTCLVKGFYPSDIAVEWESNGQPENNYKTTPPVLDSDGSFFLYSRLTVDKSRWQEGNVFSCSVMHEALHNHYTQKSLSLSLGGGGSGSAHPIPDSSPLLQFGGQVRQRYLYTDDACQTEAHLEIREDGTVGGAADQSPESLLQLKALKPGVIQILGVKTSRFLCQRPDGALYGSLHFDPEACSFRELLLEDGYNVYQSEAHGLPLHLPGCKSPHRDPAPRGPARFLPLPGLPPAPPEPPGILAPQPPDVGSSDPLSMVYPSQGRSPSYAS

SEQ ID NO: 2508 - protein, 473 aa, Artificial Sequence
  Fusion Protein
HGEGTFTSDKSQLLEKRLAHLFIEWLIAGGPSSGKYSPKGGGGGGGSGGGGSGGGGSAESKYGPPCPPCPAPEFEGGPSVFLFPPKPKDTLMISRTPEVTCVVVDVSQEDPEVQFNWYVDGVEVHNAKTKPREEQFNSTYRVVSVLTVLHQDWLNGKEYKCKVSNKGLPSSIEKTISKAKGQPREPQVYTLPPSQEEMTKNQVSLTCLVKGFYPSDIAVEWESNGQPENNYKTTPPVLDSDGSFFLYSRLTVDKSRWQEGNVFSCSVMHEALHNHYTQKSLSLSLGGGGSGSAHPIPDSSPLLQFGGQVRQRYLYTDDACQTEAHLEIREDGTVGGAADQSPESLLQLKALKPGVIQILGVKTSRFLCQRPDGALYGSLHFDPEACSFRELLLEDGYNVYQSEAHGLPLHLCGNKSPHRDPAPRGPARFLPLPGLPPAPPEPPGILAPQPPDVGSSDPLSMVGSQGRSPSYAS

SEQ ID NO: 2509 - protein, 474 aa, Artificial Sequence
  Fusion Protein
HGEGTFTSDKSQLLEKRLAHLFIEWLIAGGPSSGKYSPKGGGGGGGSGGGGSGGGGSAESKYGPPCPPCPAPEFEGGPSVFLFPPKPKDTLMISRTPEVTCVVVDVSQEDPEVQFNWYVDGVEVHNAKTKPREEQFNSTYRVVSVLTVLHQDWLNGKEYKCKVSNKGLPSSIEKTISKAKGQPREPQVYTLPPSQEEMTKNQVSLTCLVKGFYPSDIAVEWESNGQPENNYKTTPPVLDSDGSFFLYSRLTVDKSRWQEGNVFSCSVMHEALHNHYTQKSLSLSLGGGGSGSAHPIPDSSPLLQFGGQVRQRYLYTDDACQTEAHLEIREDGTVGGAADQSPESLLQLKALKPGVIQILGVKTSRFLCQRPDGALYGSLHFDPEACSFRELLLEDGYNVYQSEAHGLPLHLCGNKSPHRDPAPRGPARFLPLPGLPPAPPEPPGILAPQPPDVGSSDPLSMVYPSQGRSPSYAS

SEQ ID NO: 2510 - protein, 471 aa, Artificial Sequence
  Fusion Protein
HGEGTFTSDKSQLLEKRAAHLFIEWLIAGGPSSGKLPPKGGGGGGGSGGGGSGGGGSADKTHTCPPCPAPEAAGGPSVFLFPPKPKDTLMISRTPEVTCVVVDVSHEDPEVKFNWYVDGVEVHNAKTKPREEQYNSTYRVVSVLTVLHQDWLNGKEYKCKVSNKALPAPIEKTISKAKGQPREPQVYTLPPSRDELTKNQVSLTCLVKGFYPSDIAVEWESNGQPENNYKTTPPVLDSDGSFFLYSKLTVDKSRWQQGNVFSCSVMHEALHNHYTQKSLSLSPGGGGSGSAHPIPDSSPLLQFGGQVRQRYLYTDDACQTEAHLEIREDGTVGGAADQSPESLLQLKALKPGVIQILGVKTSRFLCQRPDGALYGSLHFDPEACSFRELLLEDGYNVYQSEAHGLPLHLPGCKSPHRDPAPRGPARFLPLPGLPPAPPEPPGILAPQPPDVGSSDPLSMVGSQGRSPSYAS

SEQ ID NO: 2511 - protein, 472 aa, Artificial Sequence
  Fusion Protein
HGEGTFTSDKSQLLEKRAAHLFIEWLIAGGPSSGKLPPKGGGGGGGSGGGGSGGGGSADKTHTCPPCPAPEAAGGPSVFLFPPKPKDTLMISRTPEVTCVVVDVSHEDPEVKFNWYVDGVEVHNAKTKPREEQYNSTYRVVSVLTVLHQDWLNGKEYKCKVSNKALPAPIEKTISKAKGQPREPQVYTLPPSRDELTKNQVSLTCLVKGFYPSDIAVEWESNGQPENNYKTTPPVLDSDGSFFLYSKLTVDKSRWQQGNVFSCSVMHEALHNHYTQKSLSLSPGGGGSGSAHPIPDSSPLLQFGGQVRQRYLYTDDACQTEAHLEIREDGTVGGAADQSPESLLQLKALKPGVIQILGVKTSRFLCQRPDGALYGSLHFDPEACSFRELLLEDGYNVYQSEAHGLPLHLPGCKSPHRDPAPRGPARFLPLPGLPPAPPEPPGILAPQPPDVGSSDPLSMVYPSQGRSPSYAS

SEQ ID NO: 2512 - protein, 471 aa, Artificial Sequence
  Fusion Protein
HGEGTFTSDKSQLLEKRAAHLFIEWLIAGGPSSGKLPPKGGGGGGGSGGGGSGGGGSADKTHTCPPCPAPEAAGGPSVFLFPPKPKDTLMISRTPEVTCVVVDVSHEDPEVKFNWYVDGVEVHNAKTKPREEQYNSTYRVVSVLTVLHQDWLNGKEYKCKVSNKALPAPIEKTISKAKGQPREPQVYTLPPSRDELTKNQVSLTCLVKGFYPSDIAVEWESNGQPENNYKTTPPVLDSDGSFFLYSKLTVDKSRWQQGNVFSCSVMHEALHNHYTQKSLSLSPGGGGSGSAHPIPDSSPLLQFGGQVRQRYLYTDDACQTEAHLEIREDGTVGGAADQSPESLLQLKALKPGVIQILGVKTSRFLCQRPDGALYGSLHFDPEACSFRELLLEDGYNVYQSEAHGLPLHLCGNKSPHRDPAPRGPARFLPLPGLPPAPPEPPGILAPQPPDVGSSDPLSMVGSQGRSPSYAS

SEQ ID NO: 2513 - protein, 472 aa, Artificial Sequence
  Fusion Protein
HGEGTFTSDKSQLLEKRAAHLFIEWLIAGGPSSGKLPPKGGGGGGGSGGGGSGGGGSADKTHTCPPCPAPEAAGGPSVFLFPPKPKDTLMISRTPEVTCVVVDVSHEDPEVKFNWYVDGVEVHNAKTKPREEQYNSTYRVVSVLTVLHQDWLNGKEYKCKVSNKALPAPIEKTISKAKGQPREPQVYTLPPSRDELTKNQVSLTCLVKGFYPSDIAVEWESNGQPENNYKTTPPVLDSDGSFFLYSKLTVDKSRWQQGNVFSCSVMHEALHNHYTQKSLSLSPGGGGSGSAHPIPDSSPLLQFGGQVRQRYLYTDDACQTEAHLEIREDGTVGGAADQSPESLLQLKALKPGVIQILGVKTSRFLCQRPDGALYGSLHFDPEACSFRELLLEDGYNVYQSEAHGLPLHLCGNKSPHRDPAPRGPARFLPLPGLPPAPPEPPGILAPQPPDVGSSDPLSMVYPSQGRSPSYAS

SEQ ID NO: 2514 - protein, 471 aa, Artificial Sequence
  Fusion Protein
HGEGTFTSDKSQLLEKRAAHLFIEWLIAGGPSSGKLPPKGGGGGGGSGGGGSGGGGSADKTHTCPPCPAPELLGGPSVFLFPPKPKDTLMISRTPEVTCVVVDVSHEDPEVKFNWYVDGVEVHNAKTKPREEQYNNASRVVSVLTVLHQDWLNGKEYKCKVSNKALPAPIEKTISKAKGQPREPQVYTLPPSRDELTKNQVSLTCLVKGFYPSDIAVEWESNGQPENNYKTTPPVLDSDGSFFLYSKLTVDKSRWQQGNVFSCSVMHEALHNHYTQKSLSLSPGGGGSGSAHPIPDSSPLLQFGGQVRQRYLYTDDACQTEAHLEIREDGTVGGAADQSPESLLQLKALKPGVIQILGVKTSRFLCQRPDGALYGSLHFDPEACSFRELLLEDGYNVYQSEAHGLPLHLPGCKSPHRDPAPRGPARFLPLPGLPPAPPEPPGILAPQPPDVGSSDPLSMVGSQGRSPSYAS

SEQ ID NO: 2515 - protein, 472 aa, Artificial Sequence
  Fusion Protein
HGEGTFTSDKSQLLEKRAAHLFIEWLIAGGPSSGKLPPKGGGGGGGSGGGGSGGGGSADKTHTCPPCPAPELLGGPSVFLFPPKPKDTLMISRTPEVTCVVVDVSHEDPEVKFNWYVDGVEVHNAKTKPREEQYNNASRVVSVLTVLHQDWLNGKEYKCKVSNKALPAPIEKTISKAKGQPREPQVYTLPPSRDELTKNQVSLTCLVKGFYPSDIAVEWESNGQPENNYKTTPPVLDSDGSFFLYSKLTVDKSRWQQGNVFSCSVMHEALHNHYTQKSLSLSPGGGGSGSAHPIPDSSPLLQFGGQVRQRYLYTDDACQTEAHLEIREDGTVGGAADQSPESLLQLKALKPGVIQILGVKTSRFLCQRPDGALYGSLHFDPEACSFRELLLEDGYNVYQSEAHGLPLHLPGCKSPHRDPAPRGPARFLPLPGLPPAPPEPPGILAPQPPDVGSSDPLSMVYPSQGRSPSYAS

SEQ ID NO: 2516 - protein, 471 aa, Artificial Sequence
  Fusion Protein
HGEGTFTSDKSQLLEKRAAHLFIEWLIAGGPSSGKLPPKGGGGGGGSGGGGSGGGGSADKTHTCPPCPAPELLGGPSVFLFPPKPKDTLMISRTPEVTCVVVDVSHEDPEVKFNWYVDGVEVHNAKTKPREEQYNNASRVVSVLTVLHQDWLNGKEYKCKVSNKALPAPIEKTISKAKGQPREPQVYTLPPSRDELTKNQVSLTCLVKGFYPSDIAVEWESNGQPENNYKTTPPVLDSDGSFFLYSKLTVDKSRWQQGNVFSCSVMHEALHNHYTQKSLSLSPGGGGSGSAHPIPDSSPLLQFGGQVRQRYLYTDDACQTEAHLEIREDGTVGGAADQSPESLLQLKALKPGVIQILGVKTSRFLCQRPDGALYGSLHFDPEACSFRELLLEDGYNVYQSEAHGLPLHLCGNKSPHRDPAPRGPARFLPLPGLPPAPPEPPGILAPQPPDVGSSDPLSMVGSQGRSPSYAS

SEQ ID NO: 2517 - protein, 472 aa, Artificial Sequence
  Fusion Protein
HGEGTFTSDKSQLLEKRAAHLFIEWLIAGGPSSGKLPPKGGGGGGGSGGGGSGGGGSADKTHTCPPCPAPELLGGPSVFLFPPKPKDTLMISRTPEVTCVVVDVSHEDPEVKFNWYVDGVEVHNAKTKPREEQYNNASRVVSVLTVLHQDWLNGKEYKCKVSNKALPAPIEKTISKAKGQPREPQVYTLPPSRDELTKNQVSLTCLVKGFYPSDIAVEWESNGQPENNYKTTPPVLDSDGSFFLYSKLTVDKSRWQQGNVFSCSVMHEALHNHYTQKSLSLSPGGGGSGSAHPIPDSSPLLQFGGQVRQRYLYTDDACQTEAHLEIREDGTVGGAADQSPESLLQLKALKPGVIQILGVKTSRFLCQRPDGALYGSLHFDPEACSFRELLLEDGYNVYQSEAHGLPLHLCGNKSPHRDPAPRGPARFLPLPGLPPAPPEPPGILAPQPPDVGSSDPLSMVYPSQGRSPSYAS

SEQ ID NO: 2518 - protein, 474 aa, Artificial Sequence
  Fusion Protein
HGEGTFTSDKSQLLEKRAAHLFIEWLIAGGPSSGKLPPKGGGGGGGSGGGGSGGGGSAESKYGPPCPPCPAPEFEGGPSVFLFPPKPKDTLMISRTPEVTCVVVDVSQEDPEVQFNWYVDGVEVHNAKTKPREEQFNSTYRVVSVLTVLHQDWLNGKEYKCKVSNKGLPSSIEKTISKAKGQPREPQVYTLPPSQEEMTKNQVSLTCLVKGFYPSDIAVEWESNGQPENNYKTTPPVLDSDGSFFLYSRLTVDKSRWQEGNVFSCSVMHEALHNHYTQKSLSLSLGGGGSGSAHPIPDSSPLLQFGGQVRQRYLYTDDACQTEAHLEIREDGTVGGAADQSPESLLQLKALKPGVIQILGVKTSRFLCQRPDGALYGSLHFDPEACSFRELLLEDGYNVYQSEAHGLPLHLPGCKSPHRDPAPRGPARFLPLPGLPPAPPEPPGILAPQPPDVGSSDPLSMVYPSQGRSPSYAS

SEQ ID NO: 2519 - protein, 473 aa, Artificial Sequence
  Fusion Protein
HGEGTFTSDKSQLLEKRAAHLFIEWLIAGGPSSGKLPPKGGGGGGGSGGGGSGGGGSAESKYGPPCPPCPAPEFEGGPSVFLFPPKPKDTLMISRTPEVTCVVVDVSQEDPEVQFNWYVDGVEVHNAKTKPREEQFNSTYRVVSVLTVLHQDWLNGKEYKCKVSNKGLPSSIEKTISKAKGQPREPQVYTLPPSQEEMTKNQVSLTCLVKGFYPSDIAVEWESNGQPENNYKTTPPVLDSDGSFFLYSRLTVDKSRWQEGNVFSCSVMHEALHNHYTQKSLSLSLGGGGSGSAHPIPDSSPLLQFGGQVRQRYLYTDDACQTEAHLEIREDGTVGGAADQSPESLLQLKALKPGVIQILGVKTSRFLCQRPDGALYGSLHFDPEACSFRELLLEDGYNVYQSEAHGLPLHLCGNKSPHRDPAPRGPARFLPLPGLPPAPPEPPGILAPQPPDVGSSDPLSMVGSQGRSPSYAS

SEQ ID NO: 2520 - protein, 474 aa, Artificial Sequence
  Fusion Protein
HGEGTFTSDKSQLLEKRAAHLFIEWLIAGGPSSGKLPPKGGGGGGGSGGGGSGGGGSAESKYGPPCPPCPAPEFEGGPSVFLFPPKPKDTLMISRTPEVTCVVVDVSQEDPEVQFNWYVDGVEVHNAKTKPREEQFNSTYRVVSVLTVLHQDWLNGKEYKCKVSNKGLPSSIEKTISKAKGQPREPQVYTLPPSQEEMTKNQVSLTCLVKGFYPSDIAVEWESNGQPENNYKTTPPVLDSDGSFFLYSRLTVDKSRWQEGNVFSCSVMHEALHNHYTQKSLSLSLGGGGSGSAHPIPDSSPLLQFGGQVRQRYLYTDDACQTEAHLEIREDGTVGGAADQSPESLLQLKALKPGVIQILGVKTSRFLCQRPDGALYGSLHFDPEACSFRELLLEDGYNVYQSEAHGLPLHLCGNKSPHRDPAPRGPARFLPLPGLPPAPPEPPGILAPQPPDVGSSDPLSMVYPSQGRSPSYAS

SEQ ID NO: 2521 - protein, 471 aa, Artificial Sequence
  Fusion Protein
HGEGTFTSDKSQLLEKELAHLFIEWLIAGGHSKGRPPPKGGGGGGGSGGGGSGGGGSADKTHTCPPCPAPEAAGGPSVFLFPPKPKDTLMISRTPEVTCVVVDVSHEDPEVKFNWYVDGVEVHNAKTKPREEQYNSTYRVVSVLTVLHQDWLNGKEYKCKVSNKALPAPIEKTISKAKGQPREPQVYTLPPSRDELTKNQVSLTCLVKGFYPSDIAVEWESNGQPENNYKTTPPVLDSDGSFFLYSKLTVDKSRWQQGNVFSCSVMHEALHNHYTQKSLSLSPGGGGSGSAHPIPDSSPLLQFGGQVRQRYLYTDDACQTEAHLEIREDGTVGGAADQSPESLLQLKALKPGVIQILGVKTSRFLCQRPDGALYGSLHFDPEACSFRELLLEDGYNVYQSEAHGLPLHLPGCKSPHRDPAPRGPARFLPLPGLPPAPPEPPGILAPQPPDVGSSDPLSMVGSQGRSPSYAS

SEQ ID NO: 2522 - protein, 472 aa, Artificial Sequence
  Fusion Protein
HGEGTFTSDKSQLLEKELAHLFIEWLIAGGHSKGRPPPKGGGGGGGSGGGGSGGGGSADKTHTCPPCPAPEAAGGPSVFLFPPKPKDTLMISRTPEVTCVVVDVSHEDPEVKFNWYVDGVEVHNAKTKPREEQYNSTYRVVSVLTVLHQDWLNGKEYKCKVSNKALPAPIEKTISKAKGQPREPQVYTLPPSRDELTKNQVSLTCLVKGFYPSDIAVEWESNGQPENNYKTTPPVLDSDGSFFLYSKLTVDKSRWQQGNVFSCSVMHEALHNHYTQKSLSLSPGGGGSGSAHPIPDSSPLLQFGGQVRQRYLYTDDACQTEAHLEIREDGTVGGAADQSPESLLQLKALKPGVIQILGVKTSRFLCQRPDGALYGSLHFDPEACSFRELLLEDGYNVYQSEAHGLPLHLPGCKSPHRDPAPRGPARFLPLPGLPPAPPEPPGILAPQPPDVGSSDPLSMVYPSQGRSPSYAS

SEQ ID NO: 2523 - protein, 471 aa, Artificial Sequence
  Fusion Protein
HGEGTFTSDKSQLLEKELAHLFIEWLIAGGHSKGRPPPKGGGGGGGSGGGGSGGGGSADKTHTCPPCPAPEAAGGPSVFLFPPKPKDTLMISRTPEVTCVVVDVSHEDPEVKFNWYVDGVEVHNAKTKPREEQYNSTYRVVSVLTVLHQDWLNGKEYKCKVSNKALPAPIEKTISKAKGQPREPQVYTLPPSRDELTKNQVSLTCLVKGFYPSDIAVEWESNGQPENNYKTTPPVLDSDGSFFLYSKLTVDKSRWQQGNVFSCSVMHEALHNHYTQKSLSLSPGGGGSGSAHPIPDSSPLLQFGGQVRQRYLYTDDACQTEAHLEIREDGTVGGAADQSPESLLQLKALKPGVIQILGVKTSRFLCQRPDGALYGSLHFDPEACSFRELLLEDGYNVYQSEAHGLPLHLCGNKSPHRDPAPRGPARFLPLPGLPPAPPEPPGILAPQPPDVGSSDPLSMVGSQGRSPSYAS

SEQ ID NO: 2524 - protein, 472 aa, Artificial Sequence
  Fusion Protein
HGEGTFTSDKSQLLEKELAHLFIEWLIAGGHSKGRPPPKGGGGGGGSGGGGSGGGGSADKTHTCPPCPAPEAAGGPSVFLFPPKPKDTLMISRTPEVTCVVVDVSHEDPEVKFNWYVDGVEVHNAKTKPREEQYNSTYRVVSVLTVLHQDWLNGKEYKCKVSNKALPAPIEKTISKAKGQPREPQVYTLPPSRDELTKNQVSLTCLVKGFYPSDIAVEWESNGQPENNYKTTPPVLDSDGSFFLYSKLTVDKSRWQQGNVFSCSVMHEALHNHYTQKSLSLSPGGGGSGSAHPIPDSSPLLQFGGQVRQRYLYTDDACQTEAHLEIREDGTVGGAADQSPESLLQLKALKPGVIQILGVKTSRFLCQRPDGALYGSLHFDPEACSFRELLLEDGYNVYQSEAHGLPLHLCGNKSPHRDPAPRGPARFLPLPGLPPAPPEPPGILAPQPPDVGSSDPLSMVYPSQGRSPSYAS

SEQ ID NO: 2525 - protein, 471 aa, Artificial Sequence
  Fusion Protein
HGEGTFTSDKSQLLEKELAHLFIEWLIAGGHSKGRPPPKGGGGGGGSGGGGSGGGGSADKTHTCPPCPAPELLGGPSVFLFPPKPKDTLMISRTPEVTCVVVDVSHEDPEVKFNWYVDGVEVHNAKTKPREEQYNNASRVVSVLTVLHQDWLNGKEYKCKVSNKALPAPIEKTISKAKGQPREPQVYTLPPSRDELTKNQVSLTCLVKGFYPSDIAVEWESNGQPENNYKTTPPVLDSDGSFFLYSKLTVDKSRWQQGNVFSCSVMHEALHNHYTQKSLSLSPGGGGSGSAHPIPDSSPLLQFGGQVRQRYLYTDDACQTEAHLEIREDGTVGGAADQSPESLLQLKALKPGVIQILGVKTSRFLCQRPDGALYGSLHFDPEACSFRELLLEDGYNVYQSEAHGLPLHLPGCKSPHRDPAPRGPARFLPLPGLPPAPPEPPGILAPQPPDVGSSDPLSMVGSQGRSPSYAS

SEQ ID NO: 2526 - protein, 472 aa, Artificial Sequence
  Fusion Protein
HGEGTFTSDKSQLLEKELAHLFIEWLIAGGHSKGRPPPKGGGGGGGSGGGGSGGGGSADKTHTCPPCPAPELLGGPSVFLFPPKPKDTLMISRTPEVTCVVVDVSHEDPEVKFNWYVDGVEVHNAKTKPREEQYNNASRVVSVLTVLHQDWLNGKEYKCKVSNKALPAPIEKTISKAKGQPREPQVYTLPPSRDELTKNQVSLTCLVKGFYPSDIAVEWESNGQPENNYKTTPPVLDSDGSFFLYSKLTVDKSRWQQGNVFSCSVMHEALHNHYTQKSLSLSPGGGGSGSAHPIPDSSPLLQFGGQVRQRYLYTDDACQTEAHLEIREDGTVGGAADQSPESLLQLKALKPGVIQILGVKTSRFLCQRPDGALYGSLHFDPEACSFRELLLEDGYNVYQSEAHGLPLHLPGCKSPHRDPAPRGPARFLPLPGLPPAPPEPPGILAPQPPDVGSSDPLSMVYPSQGRSPSYAS

SEQ ID NO: 2527 - protein, 471 aa, Artificial Sequence
  Fusion Protein
HGEGTFTSDKSQLLEKELAHLFIEWLIAGGHSKGRPPPKGGGGGGGSGGGGSGGGGSADKTHTCPPCPAPELLGGPSVFLFPPKPKDTLMISRTPEVTCVVVDVSHEDPEVKFNWYVDGVEVHNAKTKPREEQYNNASRVVSVLTVLHQDWLNGKEYKCKVSNKALPAPIEKTISKAKGQPREPQVYTLPPSRDELTKNQVSLTCLVKGFYPSDIAVEWESNGQPENNYKTTPPVLDSDGSFFLYSKLTVDKSRWQQGNVFSCSVMHEALHNHYTQKSLSLSPGGGGSGSAHPIPDSSPLLQFGGQVRQRYLYTDDACQTEAHLEIREDGTVGGAADQSPESLLQLKALKPGVIQILGVKTSRFLCQRPDGALYGSLHFDPEACSFRELLLEDGYNVYQSEAHGLPLHLCGNKSPHRDPAPRGPARFLPLPGLPPAPPEPPGILAPQPPDVGSSDPLSMVGSQGRSPSYAS

SEQ ID NO: 2528 - protein, 472 aa, Artificial Sequence
  Fusion Protein
HGEGTFTSDKSQLLEKELAHLFIEWLIAGGHSKGRPPPKGGGGGGGSGGGGSGGGGSADKTHTCPPCPAPELLGGPSVFLFPPKPKDTLMISRTPEVTCVVVDVSHEDPEVKFNWYVDGVEVHNAKTKPREEQYNNASRVVSVLTVLHQDWLNGKEYKCKVSNKALPAPIEKTISKAKGQPREPQVYTLPPSRDELTKNQVSLTCLVKGFYPSDIAVEWESNGQPENNYKTTPPVLDSDGSFFLYSKLTVDKSRWQQGNVFSCSVMHEALHNHYTQKSLSLSPGGGGSGSAHPIPDSSPLLQFGGQVRQRYLYTDDACQTEAHLEIREDGTVGGAADQSPESLLQLKALKPGVIQILGVKTSRFLCQRPDGALYGSLHFDPEACSFRELLLEDGYNVYQSEAHGLPLHLCGNKSPHRDPAPRGPARFLPLPGLPPAPPEPPGILAPQPPDVGSSDPLSMVYPSQGRSPSYAS

SEQ ID NO: 2529 - protein, 474 aa, Artificial Sequence
  Fusion Protein
HGEGTFTSDKSQLLEKELAHLFIEWLIAGGHSKGRPPPKGGGGGGGSGGGGSGGGGSAESKYGPPCPPCPAPEFEGGPSVFLFPPKPKDTLMISRTPEVTCVVVDVSQEDPEVQFNWYVDGVEVHNAKTKPREEQFNSTYRVVSVLTVLHQDWLNGKEYKCKVSNKGLPSSIEKTISKAKGQPREPQVYTLPPSQEEMTKNQVSLTCLVKGFYPSDIAVEWESNGQPENNYKTTPPVLDSDGSFFLYSRLTVDKSRWQEGNVFSCSVMHEALHNHYTQKSLSLSLGGGGSGSAHPIPDSSPLLQFGGQVRQRYLYTDDACQTEAHLEIREDGTVGGAADQSPESLLQLKALKPGVIQILGVKTSRFLCQRPDGALYGSLHFDPEACSFRELLLEDGYNVYQSEAHGLPLHLPGCKSPHRDPAPRGPARFLPLPGLPPAPPEPPGILAPQPPDVGSSDPLSMVYPSQGRSPSYAS

SEQ ID NO: 2530 - protein, 473 aa, Artificial Sequence
  Fusion Protein
HGEGTFTSDKSQLLEKELAHLFIEWLIAGGHSKGRPPPKGGGGGGGSGGGGSGGGGSAESKYGPPCPPCPAPEFEGGPSVFLFPPKPKDTLMISRTPEVTCVVVDVSQEDPEVQFNWYVDGVEVHNAKTKPREEQFNSTYRVVSVLTVLHQDWLNGKEYKCKVSNKGLPSSIEKTISKAKGQPREPQVYTLPPSQEEMTKNQVSLTCLVKGFYPSDIAVEWESNGQPENNYKTTPPVLDSDGSFFLYSRLTVDKSRWQEGNVFSCSVMHEALHNHYTQKSLSLSLGGGGSGSAHPIPDSSPLLQFGGQVRQRYLYTDDACQTEAHLEIREDGTVGGAADQSPESLLQLKALKPGVIQILGVKTSRFLCQRPDGALYGSLHFDPEACSFRELLLEDGYNVYQSEAHGLPLHLCGNKSPHRDPAPRGPARFLPLPGLPPAPPEPPGILAPQPPDVGSSDPLSMVGSQGRSPSYAS

SEQ ID NO: 2531 - protein, 474 aa, Artificial Sequence
  Fusion Protein
HGEGTFTSDKSQLLEKELAHLFIEWLIAGGHSKGRPPPKGGGGGGGSGGGGSGGGGSAESKYGPPCPPCPAPEFEGGPSVFLFPPKPKDTLMISRTPEVTCVVVDVSQEDPEVQFNWYVDGVEVHNAKTKPREEQFNSTYRVVSVLTVLHQDWLNGKEYKCKVSNKGLPSSIEKTISKAKGQPREPQVYTLPPSQEEMTKNQVSLTCLVKGFYPSDIAVEWESNGQPENNYKTTPPVLDSDGSFFLYSRLTVDKSRWQEGNVFSCSVMHEALHNHYTQKSLSLSLGGGGSGSAHPIPDSSPLLQFGGQVRQRYLYTDDACQTEAHLEIREDGTVGGAADQSPESLLQLKALKPGVIQILGVKTSRFLCQRPDGALYGSLHFDPEACSFRELLLEDGYNVYQSEAHGLPLHLCGNKSPHRDPAPRGPARFLPLPGLPPAPPEPPGILAPQPPDVGSSDPLSMVYPSQGRSPSYAS

SEQ ID NO: 2532 - protein, 471 aa, Artificial Sequence
  Fusion Protein
HGEGTFTSDKSQLLEKRLAHLFIEWLIAGGHSSGRYSPKGGGGGGGSGGGGSGGGGSADKTHTCPPCPAPEAAGGPSVFLFPPKPKDTLMISRTPEVTCVVVDVSHEDPEVKFNWYVDGVEVHNAKTKPREEQYNSTYRVVSVLTVLHQDWLNGKEYKCKVSNKALPAPIEKTISKAKGQPREPQVYTLPPSRDELTKNQVSLTCLVKGFYPSDIAVEWESNGQPENNYKTTPPVLDSDGSFFLYSKLTVDKSRWQQGNVFSCSVMHEALHNHYTQKSLSLSPGGGGSGSAHPIPDSSPLLQFGGQVRQRYLYTDDACQTEAHLEIREDGTVGGAADQSPESLLQLKALKPGVIQILGVKTSRFLCQRPDGALYGSLHFDPEACSFRELLLEDGYNVYQSEAHGLPLHLPGCKSPHRDPAPRGPARFLPLPGLPPAPPEPPGILAPQPPDVGSSDPLSMVGSQGRSPSYAS

SEQ ID NO: 2533 - protein, 472 aa, Artificial Sequence
  Fusion Protein
HGEGTFTSDKSQLLEKRLAHLFIEWLIAGGHSSGRYSPKGGGGGGGSGGGGSGGGGSADKTHTCPPCPAPEAAGGPSVFLFPPKPKDTLMISRTPEVTCVVVDVSHEDPEVKFNWYVDGVEVHNAKTKPREEQYNSTYRVVSVLTVLHQDWLNGKEYKCKVSNKALPAPIEKTISKAKGQPREPQVYTLPPSRDELTKNQVSLTCLVKGFYPSDIAVEWESNGQPENNYKTTPPVLDSDGSFFLYSKLTVDKSRWQQGNVFSCSVMHEALHNHYTQKSLSLSPGGGGSGSAHPIPDSSPLLQFGGQVRQRYLYTDDACQTEAHLEIREDGTVGGAADQSPESLLQLKALKPGVIQILGVKTSRFLCQRPDGALYGSLHFDPEACSFRELLLEDGYNVYQSEAHGLPLHLPGCKSPHRDPAPRGPARFLPLPGLPPAPPEPPGILAPQPPDVGSSDPLSMVYPSQGRSPSYAS

SEQ ID NO: 2534 - protein, 471 aa, Artificial Sequence
  Fusion Protein
HGEGTFTSDKSQLLEKRLAHLFIEWLIAGGHSSGRYSPKGGGGGGGSGGGGSGGGGSADKTHTCPPCPAPEAAGGPSVFLFPPKPKDTLMISRTPEVTCVVVDVSHEDPEVKFNWYVDGVEVHNAKTKPREEQYNSTYRVVSVLTVLHQDWLNGKEYKCKVSNKALPAPIEKTISKAKGQPREPQVYTLPPSRDELTKNQVSLTCLVKGFYPSDIAVEWESNGQPENNYKTTPPVLDSDGSFFLYSKLTVDKSRWQQGNVFSCSVMHEALHNHYTQKSLSLSPGGGGSGSAHPIPDSSPLLQFGGQVRQRYLYTDDACQTEAHLEIREDGTVGGAADQSPESLLQLKALKPGVIQILGVKTSRFLCQRPDGALYGSLHFDPEACSFRELLLEDGYNVYQSEAHGLPLHLCGNKSPHRDPAPRGPARFLPLPGLPPAPPEPPGILAPQPPDVGSSDPLSMVGSQGRSPSYAS

SEQ ID NO: 2535 - protein, 472 aa, Artificial Sequence
  Fusion Protein
HGEGTFTSDKSQLLEKRLAHLFIEWLIAGGHSSGRYSPKGGGGGGGSGGGGSGGGGSADKTHTCPPCPAPEAAGGPSVFLFPPKPKDTLMISRTPEVTCVVVDVSHEDPEVKFNWYVDGVEVHNAKTKPREEQYNSTYRVVSVLTVLHQDWLNGKEYKCKVSNKALPAPIEKTISKAKGQPREPQVYTLPPSRDELTKNQVSLTCLVKGFYPSDIAVEWESNGQPENNYKTTPPVLDSDGSFFLYSKLTVDKSRWQQGNVFSCSVMHEALHNHYTQKSLSLSPGGGGSGSAHPIPDSSPLLQFGGQVRQRYLYTDDACQTEAHLEIREDGTVGGAADQSPESLLQLKALKPGVIQILGVKTSRFLCQRPDGALYGSLHFDPEACSFRELLLEDGYNVYQSEAHGLPLHLCGNKSPHRDPAPRGPARFLPLPGLPPAPPEPPGILAPQPPDVGSSDPLSMVYPSQGRSPSYAS

SEQ ID NO: 2536 - protein, 471 aa, Artificial Sequence
  Fusion Protein
HGEGTFTSDKSQLLEKRLAHLFIEWLIAGGHSSGRYSPKGGGGGGGSGGGGSGGGGSADKTHTCPPCPAPELLGGPSVFLFPPKPKDTLMISRTPEVTCVVVDVSHEDPEVKFNWYVDGVEVHNAKTKPREEQYNNASRVVSVLTVLHQDWLNGKEYKCKVSNKALPAPIEKTISKAKGQPREPQVYTLPPSRDELTKNQVSLTCLVKGFYPSDIAVEWESNGQPENNYKTTPPVLDSDGSFFLYSKLTVDKSRWQQGNVFSCSVMHEALHNHYTQKSLSLSPGGGGSGSAHPIPDSSPLLQFGGQVRQRYLYTDDACQTEAHLEIREDGTVGGAADQSPESLLQLKALKPGVIQILGVKTSRFLCQRPDGALYGSLHFDPEACSFRELLLEDGYNVYQSEAHGLPLHLPGCKSPHRDPAPRGPARFLPLPGLPPAPPEPPGILAPQPPDVGSSDPLSMVGSQGRSPSYAS

SEQ ID NO: 2537 - protein, 472 aa, Artificial Sequence
  Fusion Protein
HGEGTFTSDKSQLLEKRLAHLFIEWLIAGGHSSGRYSPKGGGGGGGSGGGGSGGGGSADKTHTCPPCPAPELLGGPSVFLFPPKPKDTLMISRTPEVTCVVVDVSHEDPEVKFNWYVDGVEVHNAKTKPREEQYNNASRVVSVLTVLHQDWLNGKEYKCKVSNKALPAPIEKTISKAKGQPREPQVYTLPPSRDELTKNQVSLTCLVKGFYPSDIAVEWESNGQPENNYKTTPPVLDSDGSFFLYSKLTVDKSRWQQGNVFSCSVMHEALHNHYTQKSLSLSPGGGGSGSAHPIPDSSPLLQFGGQVRQRYLYTDDACQTEAHLEIREDGTVGGAADQSPESLLQLKALKPGVIQILGVKTSRFLCQRPDGALYGSLHFDPEACSFRELLLEDGYNVYQSEAHGLPLHLPGCKSPHRDPAPRGPARFLPLPGLPPAPPEPPGILAPQPPDVGSSDPLSMVYPSQGRSPSYAS

SEQ ID NO: 2538 - protein, 471 aa, Artificial Sequence
  Fusion Protein
HGEGTFTSDKSQLLEKRLAHLFIEWLIAGGHSSGRYSPKGGGGGGGSGGGGSGGGGSADKTHTCPPCPAPELLGGPSVFLFPPKPKDTLMISRTPEVTCVVVDVSHEDPEVKFNWYVDGVEVHNAKTKPREEQYNNASRVVSVLTVLHQDWLNGKEYKCKVSNKALPAPIEKTISKAKGQPREPQVYTLPPSRDELTKNQVSLTCLVKGFYPSDIAVEWESNGQPENNYKTTPPVLDSDGSFFLYSKLTVDKSRWQQGNVFSCSVMHEALHNHYTQKSLSLSPGGGGSGSAHPIPDSSPLLQFGGQVRQRYLYTDDACQTEAHLEIREDGTVGGAADQSPESLLQLKALKPGVIQILGVKTSRFLCQRPDGALYGSLHFDPEACSFRELLLEDGYNVYQSEAHGLPLHLCGNKSPHRDPAPRGPARFLPLPGLPPAPPEPPGILAPQPPDVGSSDPLSMVGSQGRSPSYAS

SEQ ID NO: 2539 - protein, 472 aa, Artificial Sequence
  Fusion Protein
HGEGTFTSDKSQLLEKRLAHLFIEWLIAGGHSSGRYSPKGGGGGGGSGGGGSGGGGSADKTHTCPPCPAPELLGGPSVFLFPPKPKDTLMISRTPEVTCVVVDVSHEDPEVKFNWYVDGVEVHNAKTKPREEQYNNASRVVSVLTVLHQDWLNGKEYKCKVSNKALPAPIEKTISKAKGQPREPQVYTLPPSRDELTKNQVSLTCLVKGFYPSDIAVEWESNGQPENNYKTTPPVLDSDGSFFLYSKLTVDKSRWQQGNVFSCSVMHEALHNHYTQKSLSLSPGGGGSGSAHPIPDSSPLLQFGGQVRQRYLYTDDACQTEAHLEIREDGTVGGAADQSPESLLQLKALKPGVIQILGVKTSRFLCQRPDGALYGSLHFDPEACSFRELLLEDGYNVYQSEAHGLPLHLCGNKSPHRDPAPRGPARFLPLPGLPPAPPEPPGILAPQPPDVGSSDPLSMVYPSQGRSPSYAS

SEQ ID NO: 2540 - protein, 474 aa, Artificial Sequence
  Fusion Protein
HGEGTFTSDKSQLLEKRLAHLFIEWLIAGGHSSGRYSPKGGGGGGGSGGGGSGGGGSAESKYGPPCPPCPAPEFEGGPSVFLFPPKPKDTLMISRTPEVTCVVVDVSQEDPEVQFNWYVDGVEVHNAKTKPREEQFNSTYRVVSVLTVLHQDWLNGKEYKCKVSNKGLPSSIEKTISKAKGQPREPQVYTLPPSQEEMTKNQVSLTCLVKGFYPSDIAVEWESNGQPENNYKTTPPVLDSDGSFFLYSRLTVDKSRWQEGNVFSCSVMHEALHNHYTQKSLSLSLGGGGSGSAHPIPDSSPLLQFGGQVRQRYLYTDDACQTEAHLEIREDGTVGGAADQSPESLLQLKALKPGVIQILGVKTSRFLCQRPDGALYGSLHFDPEACSFRELLLEDGYNVYQSEAHGLPLHLPGCKSPHRDPAPRGPARFLPLPGLPPAPPEPPGILAPQPPDVGSSDPLSMVYPSQGRSPSYAS

SEQ ID NO: 2541 - protein, 473 aa, Artificial Sequence
  Fusion Protein
HGEGTFTSDKSQLLEKRLAHLFIEWLIAGGHSSGRYSPKGGGGGGGSGGGGSGGGGSAESKYGPPCPPCPAPEFEGGPSVFLFPPKPKDTLMISRTPEVTCVVVDVSQEDPEVQFNWYVDGVEVHNAKTKPREEQFNSTYRVVSVLTVLHQDWLNGKEYKCKVSNKGLPSSIEKTISKAKGQPREPQVYTLPPSQEEMTKNQVSLTCLVKGFYPSDIAVEWESNGQPENNYKTTPPVLDSDGSFFLYSRLTVDKSRWQEGNVFSCSVMHEALHNHYTQKSLSLSLGGGGSGSAHPIPDSSPLLQFGGQVRQRYLYTDDACQTEAHLEIREDGTVGGAADQSPESLLQLKALKPGVIQILGVKTSRFLCQRPDGALYGSLHFDPEACSFRELLLEDGYNVYQSEAHGLPLHLCGNKSPHRDPAPRGPARFLPLPGLPPAPPEPPGILAPQPPDVGSSDPLSMVGSQGRSPSYAS

SEQ ID NO: 2542 - protein, 474 aa, Artificial Sequence
  Fusion Protein
HGEGTFTSDKSQLLEKRLAHLFIEWLIAGGHSSGRYSPKGGGGGGGSGGGGSGGGGSAESKYGPPCPPCPAPEFEGGPSVFLFPPKPKDTLMISRTPEVTCVVVDVSQEDPEVQFNWYVDGVEVHNAKTKPREEQFNSTYRVVSVLTVLHQDWLNGKEYKCKVSNKGLPSSIEKTISKAKGQPREPQVYTLPPSQEEMTKNQVSLTCLVKGFYPSDIAVEWESNGQPENNYKTTPPVLDSDGSFFLYSRLTVDKSRWQEGNVFSCSVMHEALHNHYTQKSLSLSLGGGGSGSAHPIPDSSPLLQFGGQVRQRYLYTDDACQTEAHLEIREDGTVGGAADQSPESLLQLKALKPGVIQILGVKTSRFLCQRPDGALYGSLHFDPEACSFRELLLEDGYNVYQSEAHGLPLHLCGNKSPHRDPAPRGPARFLPLPGLPPAPPEPPGILAPQPPDVGSSDPLSMVYPSQGRSPSYAS

SEQ ID NO: 2543 - protein, 471 aa, Artificial Sequence
  Fusion Protein
HGEGTFTSDKSQLLEKRLAHLFIEWLLAGGHSSIRPPPKGGGGGGGSGGGGSGGGGSADKTHTCPPCPAPEAAGGPSVFLFPPKPKDTLMISRTPEVTCVVVDVSHEDPEVKFNWYVDGVEVHNAKTKPREEQYNSTYRVVSVLTVLHQDWLNGKEYKCKVSNKALPAPIEKTISKAKGQPREPQVYTLPPSRDELTKNQVSLTCLVKGFYPSDIAVEWESNGQPENNYKTTPPVLDSDGSFFLYSKLTVDKSRWQQGNVFSCSVMHEALHNHYTQKSLSLSPGGGGSGSAHPIPDSSPLLQFGGQVRQRYLYTDDACQTEAHLEIREDGTVGGAADQSPESLLQLKALKPGVIQILGVKTSRFLCQRPDGALYGSLHFDPEACSFRELLLEDGYNVYQSEAHGLPLHLPGCKSPHRDPAPRGPARFLPLPGLPPAPPEPPGILAPQPPDVGSSDPLSMVGSQGRSPSYAS

SEQ ID NO: 2544 - protein, 472 aa, Artificial Sequence
  Fusion Protein
HGEGTFTSDKSQLLEKRLAHLFIEWLLAGGHSSIRPPPKGGGGGGGSGGGGSGGGGSADKTHTCPPCPAPEAAGGPSVFLFPPKPKDTLMISRTPEVTCVVVDVSHEDPEVKFNWYVDGVEVHNAKTKPREEQYNSTYRVVSVLTVLHQDWLNGKEYKCKVSNKALPAPIEKTISKAKGQPREPQVYTLPPSRDELTKNQVSLTCLVKGFYPSDIAVEWESNGQPENNYKTTPPVLDSDGSFFLYSKLTVDKSRWQQGNVFSCSVMHEALHNHYTQKSLSLSPGGGGSGSAHPIPDSSPLLQFGGQVRQRYLYTDDACQTEAHLEIREDGTVGGAADQSPESLLQLKALKPGVIQILGVKTSRFLCQRPDGALYGSLHFDPEACSFRELLLEDGYNVYQSEAHGLPLHLPGCKSPHRDPAPRGPARFLPLPGLPPAPPEPPGILAPQPPDVGSSDPLSMVYPSQGRSPSYAS

SEQ ID NO: 2545 - protein, 471 aa, Artificial Sequence
  Fusion Protein
HGEGTFTSDKSQLLEKRLAHLFIEWLLAGGHSSIRPPPKGGGGGGGSGGGGSGGGGSADKTHTCPPCPAPEAAGGPSVFLFPPKPKDTLMISRTPEVTCVVVDVSHEDPEVKFNWYVDGVEVHNAKTKPREEQYNSTYRVVSVLTVLHQDWLNGKEYKCKVSNKALPAPIEKTISKAKGQPREPQVYTLPPSRDELTKNQVSLTCLVKGFYPSDIAVEWESNGQPENNYKTTPPVLDSDGSFFLYSKLTVDKSRWQQGNVFSCSVMHEALHNHYTQKSLSLSPGGGGSGSAHPIPDSSPLLQFGGQVRQRYLYTDDACQTEAHLEIREDGTVGGAADQSPESLLQLKALKPGVIQILGVKTSRFLCQRPDGALYGSLHFDPEACSFRELLLEDGYNVYQSEAHGLPLHLCGNKSPHRDPAPRGPARFLPLPGLPPAPPEPPGILAPQPPDVGSSDPLSMVGSQGRSPSYAS

SEQ ID NO: 2546 - protein, 472 aa, Artificial Sequence
  Fusion Protein
HGEGTFTSDKSQLLEKRLAHLFIEWLLAGGHSSIRPPPKGGGGGGGSGGGGSGGGGSADKTHTCPPCPAPEAAGGPSVFLFPPKPKDTLMISRTPEVTCVVVDVSHEDPEVKFNWYVDGVEVHNAKTKPREEQYNSTYRVVSVLTVLHQDWLNGKEYKCKVSNKALPAPIEKTISKAKGQPREPQVYTLPPSRDELTKNQVSLTCLVKGFYPSDIAVEWESNGQPENNYKTTPPVLDSDGSFFLYSKLTVDKSRWQQGNVFSCSVMHEALHNHYTQKSLSLSPGGGGSGSAHPIPDSSPLLQFGGQVRQRYLYTDDACQTEAHLEIREDGTVGGAADQSPESLLQLKALKPGVIQILGVKTSRFLCQRPDGALYGSLHFDPEACSFRELLLEDGYNVYQSEAHGLPLHLCGNKSPHRDPAPRGPARFLPLPGLPPAPPEPPGILAPQPPDVGSSDPLSMVYPSQGRSPSYAS

SEQ ID NO: 2547 - protein, 471 aa, Artificial Sequence
  Fusion Protein
HGEGTFTSDKSQLLEKRLAHLFIEWLLAGGHSSIRPPPKGGGGGGGSGGGGSGGGGSADKTHTCPPCPAPELLGGPSVFLFPPKPKDTLMISRTPEVTCVVVDVSHEDPEVKFNWYVDGVEVHNAKTKPREEQYNNASRVVSVLTVLHQDWLNGKEYKCKVSNKALPAPIEKTISKAKGQPREPQVYTLPPSRDELTKNQVSLTCLVKGFYPSDIAVEWESNGQPENNYKTTPPVLDSDGSFFLYSKLTVDKSRWQQGNVFSCSVMHEALHNHYTQKSLSLSPGGGGSGSAHPIPDSSPLLQFGGQVRQRYLYTDDACQTEAHLEIREDGTVGGAADQSPESLLQLKALKPGVIQILGVKTSRFLCQRPDGALYGSLHFDPEACSFRELLLEDGYNVYQSEAHGLPLHLPGCKSPHRDPAPRGPARFLPLPGLPPAPPEPPGILAPQPPDVGSSDPLSMVGSQGRSPSYAS

SEQ ID NO: 2548 - protein, 472 aa, Artificial Sequence
  Fusion Protein
HGEGTFTSDKSQLLEKRLAHLFIEWLLAGGHSSIRPPPKGGGGGGGSGGGGSGGGGSADKTHTCPPCPAPELLGGPSVFLFPPKPKDTLMISRTPEVTCVVVDVSHEDPEVKFNWYVDGVEVHNAKTKPREEQYNNASRVVSVLTVLHQDWLNGKEYKCKVSNKALPAPIEKTISKAKGQPREPQVYTLPPSRDELTKNQVSLTCLVKGFYPSDIAVEWESNGQPENNYKTTPPVLDSDGSFFLYSKLTVDKSRWQQGNVFSCSVMHEALHNHYTQKSLSLSPGGGGSGSAHPIPDSSPLLQFGGQVRQRYLYTDDACQTEAHLEIREDGTVGGAADQSPESLLQLKALKPGVIQILGVKTSRFLCQRPDGALYGSLHFDPEACSFRELLLEDGYNVYQSEAHGLPLHLPGCKSPHRDPAPRGPARFLPLPGLPPAPPEPPGILAPQPPDVGSSDPLSMVYPSQGRSPSYAS

SEQ ID NO: 2549 - protein, 471 aa, Artificial Sequence
  Fusion Protein
HGEGTFTSDKSQLLEKRLAHLFIEWLLAGGHSSIRPPPKGGGGGGGSGGGGSGGGGSADKTHTCPPCPAPELLGGPSVFLFPPKPKDTLMISRTPEVTCVVVDVSHEDPEVKFNWYVDGVEVHNAKTKPREEQYNNASRVVSVLTVLHQDWLNGKEYKCKVSNKALPAPIEKTISKAKGQPREPQVYTLPPSRDELTKNQVSLTCLVKGFYPSDIAVEWESNGQPENNYKTTPPVLDSDGSFFLYSKLTVDKSRWQQGNVFSCSVMHEALHNHYTQKSLSLSPGGGGSGSAHPIPDSSPLLQFGGQVRQRYLYTDDACQTEAHLEIREDGTVGGAADQSPESLLQLKALKPGVIQILGVKTSRFLCQRPDGALYGSLHFDPEACSFRELLLEDGYNVYQSEAHGLPLHLCGNKSPHRDPAPRGPARFLPLPGLPPAPPEPPGILAPQPPDVGSSDPLSMVGSQGRSPSYAS

SEQ ID NO: 2550 - protein, 472 aa, Artificial Sequence
  Fusion Protein
HGEGTFTSDKSQLLEKRLAHLFIEWLLAGGHSSIRPPPKGGGGGGGSGGGGSGGGGSADKTHTCPPCPAPELLGGPSVFLFPPKPKDTLMISRTPEVTCVVVDVSHEDPEVKFNWYVDGVEVHNAKTKPREEQYNNASRVVSVLTVLHQDWLNGKEYKCKVSNKALPAPIEKTISKAKGQPREPQVYTLPPSRDELTKNQVSLTCLVKGFYPSDIAVEWESNGQPENNYKTTPPVLDSDGSFFLYSKLTVDKSRWQQGNVFSCSVMHEALHNHYTQKSLSLSPGGGGSGSAHPIPDSSPLLQFGGQVRQRYLYTDDACQTEAHLEIREDGTVGGAADQSPESLLQLKALKPGVIQILGVKTSRFLCQRPDGALYGSLHFDPEACSFRELLLEDGYNVYQSEAHGLPLHLCGNKSPHRDPAPRGPARFLPLPGLPPAPPEPPGILAPQPPDVGSSDPLSMVYPSQGRSPSYAS

SEQ ID NO: 2551 - protein, 474 aa, Artificial Sequence
  Fusion Protein
HGEGTFTSDKSQLLEKRLAHLFIEWLLAGGHSSIRPPPKGGGGGGGSGGGGSGGGGSAESKYGPPCPPCPAPEFEGGPSVFLFPPKPKDTLMISRTPEVTCVVVDVSQEDPEVQFNWYVDGVEVHNAKTKPREEQFNSTYRVVSVLTVLHQDWLNGKEYKCKVSNKGLPSSIEKTISKAKGQPREPQVYTLPPSQEEMTKNQVSLTCLVKGFYPSDIAVEWESNGQPENNYKTTPPVLDSDGSFFLYSRLTVDKSRWQEGNVFSCSVMHEALHNHYTQKSLSLSLGGGGSGSAHPIPDSSPLLQFGGQVRQRYLYTDDACQTEAHLEIREDGTVGGAADQSPESLLQLKALKPGVIQILGVKTSRFLCQRPDGALYGSLHFDPEACSFRELLLEDGYNVYQSEAHGLPLHLPGCKSPHRDPAPRGPARFLPLPGLPPAPPEPPGILAPQPPDVGSSDPLSMVYPSQGRSPSYAS

SEQ ID NO: 2552 - protein, 473 aa, Artificial Sequence
  Fusion Protein
HGEGTFTSDKSQLLEKRLAHLFIEWLLAGGHSSIRPPPKGGGGGGGSGGGGSGGGGSAESKYGPPCPPCPAPEFEGGPSVFLFPPKPKDTLMISRTPEVTCVVVDVSQEDPEVQFNWYVDGVEVHNAKTKPREEQFNSTYRVVSVLTVLHQDWLNGKEYKCKVSNKGLPSSIEKTISKAKGQPREPQVYTLPPSQEEMTKNQVSLTCLVKGFYPSDIAVEWESNGQPENNYKTTPPVLDSDGSFFLYSRLTVDKSRWQEGNVFSCSVMHEALHNHYTQKSLSLSLGGGGSGSAHPIPDSSPLLQFGGQVRQRYLYTDDACQTEAHLEIREDGTVGGAADQSPESLLQLKALKPGVIQILGVKTSRFLCQRPDGALYGSLHFDPEACSFRELLLEDGYNVYQSEAHGLPLHLCGNKSPHRDPAPRGPARFLPLPGLPPAPPEPPGILAPQPPDVGSSDPLSMVGSQGRSPSYAS

SEQ ID NO: 2553 - protein, 474 aa, Artificial Sequence
  Fusion Protein
HGEGTFTSDKSQLLEKRLAHLFIEWLLAGGHSSIRPPPKGGGGGGGSGGGGSGGGGSAESKYGPPCPPCPAPEFEGGPSVFLFPPKPKDTLMISRTPEVTCVVVDVSQEDPEVQFNWYVDGVEVHNAKTKPREEQFNSTYRVVSVLTVLHQDWLNGKEYKCKVSNKGLPSSIEKTISKAKGQPREPQVYTLPPSQEEMTKNQVSLTCLVKGFYPSDIAVEWESNGQPENNYKTTPPVLDSDGSFFLYSRLTVDKSRWQEGNVFSCSVMHEALHNHYTQKSLSLSLGGGGSGSAHPIPDSSPLLQFGGQVRQRYLYTDDACQTEAHLEIREDGTVGGAADQSPESLLQLKALKPGVIQILGVKTSRFLCQRPDGALYGSLHFDPEACSFRELLLEDGYNVYQSEAHGLPLHLCGNKSPHRDPAPRGPARFLPLPGLPPAPPEPPGILAPQPPDVGSSDPLSMVYPSQGRSPSYAS

SEQ ID NO: 2554 - protein, 471 aa, Artificial Sequence
  Fusion Protein
HGEGTFTSDKSQLLEKRLAHLFIEWLLAGGHSSIKPPPKGGGGGGGSGGGGSGGGGSADKTHTCPPCPAPEAAGGPSVFLFPPKPKDTLMISRTPEVTCVVVDVSHEDPEVKFNWYVDGVEVHNAKTKPREEQYNSTYRVVSVLTVLHQDWLNGKEYKCKVSNKALPAPIEKTISKAKGQPREPQVYTLPPSRDELTKNQVSLTCLVKGFYPSDIAVEWESNGQPENNYKTTPPVLDSDGSFFLYSKLTVDKSRWQQGNVFSCSVMHEALHNHYTQKSLSLSPGGGGSGSAHPIPDSSPLLQFGGQVRQRYLYTDDACQTEAHLEIREDGTVGGAADQSPESLLQLKALKPGVIQILGVKTSRFLCQRPDGALYGSLHFDPEACSFRELLLEDGYNVYQSEAHGLPLHLPGCKSPHRDPAPRGPARFLPLPGLPPAPPEPPGILAPQPPDVGSSDPLSMVGSQGRSPSYAS

SEQ ID NO: 2555 - protein, 472 aa, Artificial Sequence
  Fusion Protein
HGEGTFTSDKSQLLEKRLAHLFIEWLLAGGHSSIKPPPKGGGGGGGSGGGGSGGGGSADKTHTCPPCPAPEAAGGPSVFLFPPKPKDTLMISRTPEVTCVVVDVSHEDPEVKFNWYVDGVEVHNAKTKPREEQYNSTYRVVSVLTVLHQDWLNGKEYKCKVSNKALPAPIEKTISKAKGQPREPQVYTLPPSRDELTKNQVSLTCLVKGFYPSDIAVEWESNGQPENNYKTTPPVLDSDGSFFLYSKLTVDKSRWQQGNVFSCSVMHEALHNHYTQKSLSLSPGGGGSGSAHPIPDSSPLLQFGGQVRQRYLYTDDACQTEAHLEIREDGTVGGAADQSPESLLQLKALKPGVIQILGVKTSRFLCQRPDGALYGSLHFDPEACSFRELLLEDGYNVYQSEAHGLPLHLPGCKSPHRDPAPRGPARFLPLPGLPPAPPEPPGILAPQPPDVGSSDPLSMVYPSQGRSPSYAS

SEQ ID NO: 2556 - protein, 471 aa, Artificial Sequence
  Fusion Protein
HGEGTFTSDKSQLLEKRLAHLFIEWLLAGGHSSIKPPPKGGGGGGGSGGGGSGGGGSADKTHTCPPCPAPEAAGGPSVFLFPPKPKDTLMISRTPEVTCVVVDVSHEDPEVKFNWYVDGVEVHNAKTKPREEQYNSTYRVVSVLTVLHQDWLNGKEYKCKVSNKALPAPIEKTISKAKGQPREPQVYTLPPSRDELTKNQVSLTCLVKGFYPSDIAVEWESNGQPENNYKTTPPVLDSDGSFFLYSKLTVDKSRWQQGNVFSCSVMHEALHNHYTQKSLSLSPGGGGSGSAHPIPDSSPLLQFGGQVRQRYLYTDDACQTEAHLEIREDGTVGGAADQSPESLLQLKALKPGVIQILGVKTSRFLCQRPDGALYGSLHFDPEACSFRELLLEDGYNVYQSEAHGLPLHLCGNKSPHRDPAPRGPARFLPLPGLPPAPPEPPGILAPQPPDVGSSDPLSMVGSQGRSPSYAS

SEQ ID NO: 2557 - protein, 472 aa, Artificial Sequence
  Fusion Protein
HGEGTFTSDKSQLLEKRLAHLFIEWLLAGGHSSIKPPPKGGGGGGGSGGGGSGGGGSADKTHTCPPCPAPEAAGGPSVFLFPPKPKDTLMISRTPEVTCVVVDVSHEDPEVKFNWYVDGVEVHNAKTKPREEQYNSTYRVVSVLTVLHQDWLNGKEYKCKVSNKALPAPIEKTISKAKGQPREPQVYTLPPSRDELTKNQVSLTCLVKGFYPSDIAVEWESNGQPENNYKTTPPVLDSDGSFFLYSKLTVDKSRWQQGNVFSCSVMHEALHNHYTQKSLSLSPGGGGSGSAHPIPDSSPLLQFGGQVRQRYLYTDDACQTEAHLEIREDGTVGGAADQSPESLLQLKALKPGVIQILGVKTSRFLCQRPDGALYGSLHFDPEACSFRELLLEDGYNVYQSEAHGLPLHLCGNKSPHRDPAPRGPARFLPLPGLPPAPPEPPGILAPQPPDVGSSDPLSMVYPSQGRSPSYAS

SEQ ID NO: 2558 - protein, 471 aa, Artificial Sequence
  Fusion Protein
HGEGTFTSDKSQLLEKRLAHLFIEWLLAGGHSSIKPPPKGGGGGGGSGGGGSGGGGSADKTHTCPPCPAPELLGGPSVFLFPPKPKDTLMISRTPEVTCVVVDVSHEDPEVKFNWYVDGVEVHNAKTKPREEQYNNASRVVSVLTVLHQDWLNGKEYKCKVSNKALPAPIEKTISKAKGQPREPQVYTLPPSRDELTKNQVSLTCLVKGFYPSDIAVEWESNGQPENNYKTTPPVLDSDGSFFLYSKLTVDKSRWQQGNVFSCSVMHEALHNHYTQKSLSLSPGGGGSGSAHPIPDSSPLLQFGGQVRQRYLYTDDACQTEAHLEIREDGTVGGAADQSPESLLQLKALKPGVIQILGVKTSRFLCQRPDGALYGSLHFDPEACSFRELLLEDGYNVYQSEAHGLPLHLPGCKSPHRDPAPRGPARFLPLPGLPPAPPEPPGILAPQPPDVGSSDPLSMVGSQGRSPSYAS

SEQ ID NO: 2559 - protein, 472 aa, Artificial Sequence
  Fusion Protein
HGEGTFTSDKSQLLEKRLAHLFIEWLLAGGHSSIKPPPKGGGGGGGSGGGGSGGGGSADKTHTCPPCPAPELLGGPSVFLFPPKPKDTLMISRTPEVTCVVVDVSHEDPEVKFNWYVDGVEVHNAKTKPREEQYNNASRVVSVLTVLHQDWLNGKEYKCKVSNKALPAPIEKTISKAKGQPREPQVYTLPPSRDELTKNQVSLTCLVKGFYPSDIAVEWESNGQPENNYKTTPPVLDSDGSFFLYSKLTVDKSRWQQGNVFSCSVMHEALHNHYTQKSLSLSPGGGGSGSAHPIPDSSPLLQFGGQVRQRYLYTDDACQTEAHLEIREDGTVGGAADQSPESLLQLKALKPGVIQILGVKTSRFLCQRPDGALYGSLHFDPEACSFRELLLEDGYNVYQSEAHGLPLHLPGCKSPHRDPAPRGPARFLPLPGLPPAPPEPPGILAPQPPDVGSSDPLSMVYPSQGRSPSYAS

SEQ ID NO: 2560 - protein, 471 aa, Artificial Sequence
  Fusion Protein
HGEGTFTSDKSQLLEKRLAHLFIEWLLAGGHSSIKPPPKGGGGGGGSGGGGSGGGGSADKTHTCPPCPAPELLGGPSVFLFPPKPKDTLMISRTPEVTCVVVDVSHEDPEVKFNWYVDGVEVHNAKTKPREEQYNNASRVVSVLTVLHQDWLNGKEYKCKVSNKALPAPIEKTISKAKGQPREPQVYTLPPSRDELTKNQVSLTCLVKGFYPSDIAVEWESNGQPENNYKTTPPVLDSDGSFFLYSKLTVDKSRWQQGNVFSCSVMHEALHNHYTQKSLSLSPGGGGSGSAHPIPDSSPLLQFGGQVRQRYLYTDDACQTEAHLEIREDGTVGGAADQSPESLLQLKALKPGVIQILGVKTSRFLCQRPDGALYGSLHFDPEACSFRELLLEDGYNVYQSEAHGLPLHLCGNKSPHRDPAPRGPARFLPLPGLPPAPPEPPGILAPQPPDVGSSDPLSMVGSQGRSPSYAS

SEQ ID NO: 2561 - protein, 472 aa, Artificial Sequence
  Fusion Protein
HGEGTFTSDKSQLLEKRLAHLFIEWLLAGGHSSIKPPPKGGGGGGGSGGGGSGGGGSADKTHTCPPCPAPELLGGPSVFLFPPKPKDTLMISRTPEVTCVVVDVSHEDPEVKFNWYVDGVEVHNAKTKPREEQYNNASRVVSVLTVLHQDWLNGKEYKCKVSNKALPAPIEKTISKAKGQPREPQVYTLPPSRDELTKNQVSLTCLVKGFYPSDIAVEWESNGQPENNYKTTPPVLDSDGSFFLYSKLTVDKSRWQQGNVFSCSVMHEALHNHYTQKSLSLSPGGGGSGSAHPIPDSSPLLQFGGQVRQRYLYTDDACQTEAHLEIREDGTVGGAADQSPESLLQLKALKPGVIQILGVKTSRFLCQRPDGALYGSLHFDPEACSFRELLLEDGYNVYQSEAHGLPLHLCGNKSPHRDPAPRGPARFLPLPGLPPAPPEPPGILAPQPPDVGSSDPLSMVYPSQGRSPSYAS

SEQ ID NO: 2562 - protein, 474 aa, Artificial Sequence
  Fusion Protein
HGEGTFTSDKSQLLEKRLAHLFIEWLLAGGHSSIKPPPKGGGGGGGSGGGGSGGGGSAESKYGPPCPPCPAPEFEGGPSVFLFPPKPKDTLMISRTPEVTCVVVDVSQEDPEVQFNWYVDGVEVHNAKTKPREEQFNSTYRVVSVLTVLHQDWLNGKEYKCKVSNKGLPSSIEKTISKAKGQPREPQVYTLPPSQEEMTKNQVSLTCLVKGFYPSDIAVEWESNGQPENNYKTTPPVLDSDGSFFLYSRLTVDKSRWQEGNVFSCSVMHEALHNHYTQKSLSLSLGGGGSGSAHPIPDSSPLLQFGGQVRQRYLYTDDACQTEAHLEIREDGTVGGAADQSPESLLQLKALKPGVIQILGVKTSRFLCQRPDGALYGSLHFDPEACSFRELLLEDGYNVYQSEAHGLPLHLPGCKSPHRDPAPRGPARFLPLPGLPPAPPEPPGILAPQPPDVGSSDPLSMVYPSQGRSPSYAS

SEQ ID NO: 2563 - protein, 473 aa, Artificial Sequence
  Fusion Protein
HGEGTFTSDKSQLLEKRLAHLFIEWLLAGGHSSIKPPPKGGGGGGGSGGGGSGGGGSAESKYGPPCPPCPAPEFEGGPSVFLFPPKPKDTLMISRTPEVTCVVVDVSQEDPEVQFNWYVDGVEVHNAKTKPREEQFNSTYRVVSVLTVLHQDWLNGKEYKCKVSNKGLPSSIEKTISKAKGQPREPQVYTLPPSQEEMTKNQVSLTCLVKGFYPSDIAVEWESNGQPENNYKTTPPVLDSDGSFFLYSRLTVDKSRWQEGNVFSCSVMHEALHNHYTQKSLSLSLGGGGSGSAHPIPDSSPLLQFGGQVRQRYLYTDDACQTEAHLEIREDGTVGGAADQSPESLLQLKALKPGVIQILGVKTSRFLCQRPDGALYGSLHFDPEACSFRELLLEDGYNVYQSEAHGLPLHLCGNKSPHRDPAPRGPARFLPLPGLPPAPPEPPGILAPQPPDVGSSDPLSMVGSQGRSPSYAS

SEQ ID NO: 2564 - protein, 474 aa, Artificial Sequence
  Fusion Protein
HGEGTFTSDKSQLLEKRLAHLFIEWLLAGGHSSIKPPPKGGGGGGGSGGGGSGGGGSAESKYGPPCPPCPAPEFEGGPSVFLFPPKPKDTLMISRTPEVTCVVVDVSQEDPEVQFNWYVDGVEVHNAKTKPREEQFNSTYRVVSVLTVLHQDWLNGKEYKCKVSNKGLPSSIEKTISKAKGQPREPQVYTLPPSQEEMTKNQVSLTCLVKGFYPSDIAVEWESNGQPENNYKTTPPVLDSDGSFFLYSRLTVDKSRWQEGNVFSCSVMHEALHNHYTQKSLSLSLGGGGSGSAHPIPDSSPLLQFGGQVRQRYLYTDDACQTEAHLEIREDGTVGGAADQSPESLLQLKALKPGVIQILGVKTSRFLCQRPDGALYGSLHFDPEACSFRELLLEDGYNVYQSEAHGLPLHLCGNKSPHRDPAPRGPARFLPLPGLPPAPPEPPGILAPQPPDVGSSDPLSMVYPSQGRSPSYAS

SEQ ID NO: 2565 - protein, 471 aa, Artificial Sequence
  Fusion Protein
HGEGTFTSDKSQLLEKEAAHLFIEWLIAGGHSSIKPPPKGGGGGGGSGGGGSGGGGSADKTHTCPPCPAPEAAGGPSVFLFPPKPKDTLMISRTPEVTCVVVDVSHEDPEVKFNWYVDGVEVHNAKTKPREEQYNSTYRVVSVLTVLHQDWLNGKEYKCKVSNKALPAPIEKTISKAKGQPREPQVYTLPPSRDELTKNQVSLTCLVKGFYPSDIAVEWESNGQPENNYKTTPPVLDSDGSFFLYSKLTVDKSRWQQGNVFSCSVMHEALHNHYTQKSLSLSPGGGGSGSAHPIPDSSPLLQFGGQVRQRYLYTDDACQTEAHLEIREDGTVGGAADQSPESLLQLKALKPGVIQILGVKTSRFLCQRPDGALYGSLHFDPEACSFRELLLEDGYNVYQSEAHGLPLHLPGCKSPHRDPAPRGPARFLPLPGLPPAPPEPPGILAPQPPDVGSSDPLSMVGSQGRSPSYAS

SEQ ID NO: 2566 - protein, 472 aa, Artificial Sequence
  Fusion Protein
HGEGTFTSDKSQLLEKEAAHLFIEWLIAGGHSSIKPPPKGGGGGGGSGGGGSGGGGSADKTHTCPPCPAPEAAGGPSVFLFPPKPKDTLMISRTPEVTCVVVDVSHEDPEVKFNWYVDGVEVHNAKTKPREEQYNSTYRVVSVLTVLHQDWLNGKEYKCKVSNKALPAPIEKTISKAKGQPREPQVYTLPPSRDELTKNQVSLTCLVKGFYPSDIAVEWESNGQPENNYKTTPPVLDSDGSFFLYSKLTVDKSRWQQGNVFSCSVMHEALHNHYTQKSLSLSPGGGGSGSAHPIPDSSPLLQFGGQVRQRYLYTDDACQTEAHLEIREDGTVGGAADQSPESLLQLKALKPGVIQILGVKTSRFLCQRPDGALYGSLHFDPEACSFRELLLEDGYNVYQSEAHGLPLHLPGCKSPHRDPAPRGPARFLPLPGLPPAPPEPPGILAPQPPDVGSSDPLSMVYPSQGRSPSYAS

SEQ ID NO: 2567 - protein, 471 aa, Artificial Sequence
  Fusion Protein
HGEGTFTSDKSQLLEKEAAHLFIEWLIAGGHSSIKPPPKGGGGGGGSGGGGSGGGGSADKTHTCPPCPAPEAAGGPSVFLFPPKPKDTLMISRTPEVTCVVVDVSHEDPEVKFNWYVDGVEVHNAKTKPREEQYNSTYRVVSVLTVLHQDWLNGKEYKCKVSNKALPAPIEKTISKAKGQPREPQVYTLPPSRDELTKNQVSLTCLVKGFYPSDIAVEWESNGQPENNYKTTPPVLDSDGSFFLYSKLTVDKSRWQQGNVFSCSVMHEALHNHYTQKSLSLSPGGGGSGSAHPIPDSSPLLQFGGQVRQRYLYTDDACQTEAHLEIREDGTVGGAADQSPESLLQLKALKPGVIQILGVKTSRFLCQRPDGALYGSLHFDPEACSFRELLLEDGYNVYQSEAHGLPLHLCGNKSPHRDPAPRGPARFLPLPGLPPAPPEPPGILAPQPPDVGSSDPLSMVGSQGRSPSYAS

SEQ ID NO: 2568 - protein, 472 aa, Artificial Sequence
  Fusion Protein
HGEGTFTSDKSQLLEKEAAHLFIEWLIAGGHSSIKPPPKGGGGGGGSGGGGSGGGGSADKTHTCPPCPAPEAAGGPSVFLFPPKPKDTLMISRTPEVTCVVVDVSHEDPEVKFNWYVDGVEVHNAKTKPREEQYNSTYRVVSVLTVLHQDWLNGKEYKCKVSNKALPAPIEKTISKAKGQPREPQVYTLPPSRDELTKNQVSLTCLVKGFYPSDIAVEWESNGQPENNYKTTPPVLDSDGSFFLYSKLTVDKSRWQQGNVFSCSVMHEALHNHYTQKSLSLSPGGGGSGSAHPIPDSSPLLQFGGQVRQRYLYTDDACQTEAHLEIREDGTVGGAADQSPESLLQLKALKPGVIQILGVKTSRFLCQRPDGALYGSLHFDPEACSFRELLLEDGYNVYQSEAHGLPLHLCGNKSPHRDPAPRGPARFLPLPGLPPAPPEPPGILAPQPPDVGSSDPLSMVYPSQGRSPSYAS

SEQ ID NO: 2569 - protein, 471 aa, Artificial Sequence
  Fusion Protein
HGEGTFTSDKSQLLEKEAAHLFIEWLIAGGHSSIKPPPKGGGGGGGSGGGGSGGGGSADKTHTCPPCPAPELLGGPSVFLFPPKPKDTLMISRTPEVTCVVVDVSHEDPEVKFNWYVDGVEVHNAKTKPREEQYNNASRVVSVLTVLHQDWLNGKEYKCKVSNKALPAPIEKTISKAKGQPREPQVYTLPPSRDELTKNQVSLTCLVKGFYPSDIAVEWESNGQPENNYKTTPPVLDSDGSFFLYSKLTVDKSRWQQGNVFSCSVMHEALHNHYTQKSLSLSPGGGGSGSAHPIPDSSPLLQFGGQVRQRYLYTDDACQTEAHLEIREDGTVGGAADQSPESLLQLKALKPGVIQILGVKTSRFLCQRPDGALYGSLHFDPEACSFRELLLEDGYNVYQSEAHGLPLHLPGCKSPHRDPAPRGPARFLPLPGLPPAPPEPPGILAPQPPDVGSSDPLSMVGSQGRSPSYAS

SEQ ID NO: 2570 - protein, 472 aa, Artificial Sequence
  Fusion Protein
HGEGTFTSDKSQLLEKEAAHLFIEWLIAGGHSSIKPPPKGGGGGGGSGGGGSGGGGSADKTHTCPPCPAPELLGGPSVFLFPPKPKDTLMISRTPEVTCVVVDVSHEDPEVKFNWYVDGVEVHNAKTKPREEQYNNASRVVSVLTVLHQDWLNGKEYKCKVSNKALPAPIEKTISKAKGQPREPQVYTLPPSRDELTKNQVSLTCLVKGFYPSDIAVEWESNGQPENNYKTTPPVLDSDGSFFLYSKLTVDKSRWQQGNVFSCSVMHEALHNHYTQKSLSLSPGGGGSGSAHPIPDSSPLLQFGGQVRQRYLYTDDACQTEAHLEIREDGTVGGAADQSPESLLQLKALKPGVIQILGVKTSRFLCQRPDGALYGSLHFDPEACSFRELLLEDGYNVYQSEAHGLPLHLPGCKSPHRDPAPRGPARFLPLPGLPPAPPEPPGILAPQPPDVGSSDPLSMVYPSQGRSPSYAS

SEQ ID NO: 2571 - protein, 471 aa, Artificial Sequence
  Fusion Protein
HGEGTFTSDKSQLLEKEAAHLFIEWLIAGGHSSIKPPPKGGGGGGGSGGGGSGGGGSADKTHTCPPCPAPELLGGPSVFLFPPKPKDTLMISRTPEVTCVVVDVSHEDPEVKFNWYVDGVEVHNAKTKPREEQYNNASRVVSVLTVLHQDWLNGKEYKCKVSNKALPAPIEKTISKAKGQPREPQVYTLPPSRDELTKNQVSLTCLVKGFYPSDIAVEWESNGQPENNYKTTPPVLDSDGSFFLYSKLTVDKSRWQQGNVFSCSVMHEALHNHYTQKSLSLSPGGGGSGSAHPIPDSSPLLQFGGQVRQRYLYTDDACQTEAHLEIREDGTVGGAADQSPESLLQLKALKPGVIQILGVKTSRFLCQRPDGALYGSLHFDPEACSFRELLLEDGYNVYQSEAHGLPLHLCGNKSPHRDPAPRGPARFLPLPGLPPAPPEPPGILAPQPPDVGSSDPLSMVGSQGRSPSYAS

SEQ ID NO: 2572 - protein, 472 aa, Artificial Sequence
  Fusion Protein
HGEGTFTSDKSQLLEKEAAHLFIEWLIAGGHSSIKPPPKGGGGGGGSGGGGSGGGGSADKTHTCPPCPAPELLGGPSVFLFPPKPKDTLMISRTPEVTCVVVDVSHEDPEVKFNWYVDGVEVHNAKTKPREEQYNNASRVVSVLTVLHQDWLNGKEYKCKVSNKALPAPIEKTISKAKGQPREPQVYTLPPSRDELTKNQVSLTCLVKGFYPSDIAVEWESNGQPENNYKTTPPVLDSDGSFFLYSKLTVDKSRWQQGNVFSCSVMHEALHNHYTQKSLSLSPGGGGSGSAHPIPDSSPLLQFGGQVRQRYLYTDDACQTEAHLEIREDGTVGGAADQSPESLLQLKALKPGVIQILGVKTSRFLCQRPDGALYGSLHFDPEACSFRELLLEDGYNVYQSEAHGLPLHLCGNKSPHRDPAPRGPARFLPLPGLPPAPPEPPGILAPQPPDVGSSDPLSMVYPSQGRSPSYAS

SEQ ID NO: 2573 - protein, 474 aa, Artificial Sequence
  Fusion Protein
HGEGTFTSDKSQLLEKEAAHLFIEWLIAGGHSSIKPPPKGGGGGGGSGGGGSGGGGSAESKYGPPCPPCPAPEFEGGPSVFLFPPKPKDTLMISRTPEVTCVVVDVSQEDPEVQFNWYVDGVEVHNAKTKPREEQFNSTYRVVSVLTVLHQDWLNGKEYKCKVSNKGLPSSIEKTISKAKGQPREPQVYTLPPSQEEMTKNQVSLTCLVKGFYPSDIAVEWESNGQPENNYKTTPPVLDSDGSFFLYSRLTVDKSRWQEGNVFSCSVMHEALHNHYTQKSLSLSLGGGGSGSAHPIPDSSPLLQFGGQVRQRYLYTDDACQTEAHLEIREDGTVGGAADQSPESLLQLKALKPGVIQILGVKTSRFLCQRPDGALYGSLHFDPEACSFRELLLEDGYNVYQSEAHGLPLHLPGCKSPHRDPAPRGPARFLPLPGLPPAPPEPPGILAPQPPDVGSSDPLSMVYPSQGRSPSYAS

SEQ ID NO: 2574 - protein, 473 aa, Artificial Sequence
  Fusion Protein
HGEGTFTSDKSQLLEKEAAHLFIEWLIAGGHSSIKPPPKGGGGGGGSGGGGSGGGGSAESKYGPPCPPCPAPEFEGGPSVFLFPPKPKDTLMISRTPEVTCVVVDVSQEDPEVQFNWYVDGVEVHNAKTKPREEQFNSTYRVVSVLTVLHQDWLNGKEYKCKVSNKGLPSSIEKTISKAKGQPREPQVYTLPPSQEEMTKNQVSLTCLVKGFYPSDIAVEWESNGQPENNYKTTPPVLDSDGSFFLYSRLTVDKSRWQEGNVFSCSVMHEALHNHYTQKSLSLSLGGGGSGSAHPIPDSSPLLQFGGQVRQRYLYTDDACQTEAHLEIREDGTVGGAADQSPESLLQLKALKPGVIQILGVKTSRFLCQRPDGALYGSLHFDPEACSFRELLLEDGYNVYQSEAHGLPLHLCGNKSPHRDPAPRGPARFLPLPGLPPAPPEPPGILAPQPPDVGSSDPLSMVGSQGRSPSYAS

SEQ ID NO: 2575 - protein, 474 aa, Artificial Sequence
  Fusion Protein
HGEGTFTSDKSQLLEKEAAHLFIEWLIAGGHSSIKPPPKGGGGGGGSGGGGSGGGGSAESKYGPPCPPCPAPEFEGGPSVFLFPPKPKDTLMISRTPEVTCVVVDVSQEDPEVQFNWYVDGVEVHNAKTKPREEQFNSTYRVVSVLTVLHQDWLNGKEYKCKVSNKGLPSSIEKTISKAKGQPREPQVYTLPPSQEEMTKNQVSLTCLVKGFYPSDIAVEWESNGQPENNYKTTPPVLDSDGSFFLYSRLTVDKSRWQEGNVFSCSVMHEALHNHYTQKSLSLSLGGGGSGSAHPIPDSSPLLQFGGQVRQRYLYTDDACQTEAHLEIREDGTVGGAADQSPESLLQLKALKPGVIQILGVKTSRFLCQRPDGALYGSLHFDPEACSFRELLLEDGYNVYQSEAHGLPLHLCGNKSPHRDPAPRGPARFLPLPGLPPAPPEPPGILAPQPPDVGSSDPLSMVYPSQGRSPSYAS

SEQ ID NO: 2576 - protein, 471 aa, Artificial Sequence
  Fusion Protein
HGEGTFTSDKSQLLEKRLAHLFIEWLIAGGHSKGRLPPKGGGGGGGSGGGGSGGGGSADKTHTCPPCPAPEAAGGPSVFLFPPKPKDTLMISRTPEVTCVVVDVSHEDPEVKFNWYVDGVEVHNAKTKPREEQYNSTYRVVSVLTVLHQDWLNGKEYKCKVSNKALPAPIEKTISKAKGQPREPQVYTLPPSRDELTKNQVSLTCLVKGFYPSDIAVEWESNGQPENNYKTTPPVLDSDGSFFLYSKLTVDKSRWQQGNVFSCSVMHEALHNHYTQKSLSLSPGGGGSGSAHPIPDSSPLLQFGGQVRQRYLYTDDACQTEAHLEIREDGTVGGAADQSPESLLQLKALKPGVIQILGVKTSRFLCQRPDGALYGSLHFDPEACSFRELLLEDGYNVYQSEAHGLPLHLPGCKSPHRDPAPRGPARFLPLPGLPPAPPEPPGILAPQPPDVGSSDPLSMVGSQGRSPSYAS

SEQ ID NO: 2577 - protein, 472 aa, Artificial Sequence
  Fusion Protein
HGEGTFTSDKSQLLEKRLAHLFIEWLIAGGHSKGRLPPKGGGGGGGSGGGGSGGGGSADKTHTCPPCPAPEAAGGPSVFLFPPKPKDTLMISRTPEVTCVVVDVSHEDPEVKFNWYVDGVEVHNAKTKPREEQYNSTYRVVSVLTVLHQDWLNGKEYKCKVSNKALPAPIEKTISKAKGQPREPQVYTLPPSRDELTKNQVSLTCLVKGFYPSDIAVEWESNGQPENNYKTTPPVLDSDGSFFLYSKLTVDKSRWQQGNVFSCSVMHEALHNHYTQKSLSLSPGGGGSGSAHPIPDSSPLLQFGGQVRQRYLYTDDACQTEAHLEIREDGTVGGAADQSPESLLQLKALKPGVIQILGVKTSRFLCQRPDGALYGSLHFDPEACSFRELLLEDGYNVYQSEAHGLPLHLPGCKSPHRDPAPRGPARFLPLPGLPPAPPEPPGILAPQPPDVGSSDPLSMVYPSQGRSPSYAS

SEQ ID NO: 2578 - protein, 471 aa, Artificial Sequence
  Fusion Protein
HGEGTFTSDKSQLLEKRLAHLFIEWLIAGGHSKGRLPPKGGGGGGGSGGGGSGGGGSADKTHTCPPCPAPEAAGGPSVFLFPPKPKDTLMISRTPEVTCVVVDVSHEDPEVKFNWYVDGVEVHNAKTKPREEQYNSTYRVVSVLTVLHQDWLNGKEYKCKVSNKALPAPIEKTISKAKGQPREPQVYTLPPSRDELTKNQVSLTCLVKGFYPSDIAVEWESNGQPENNYKTTPPVLDSDGSFFLYSKLTVDKSRWQQGNVFSCSVMHEALHNHYTQKSLSLSPGGGGSGSAHPIPDSSPLLQFGGQVRQRYLYTDDACQTEAHLEIREDGTVGGAADQSPESLLQLKALKPGVIQILGVKTSRFLCQRPDGALYGSLHFDPEACSFRELLLEDGYNVYQSEAHGLPLHLCGNKSPHRDPAPRGPARFLPLPGLPPAPPEPPGILAPQPPDVGSSDPLSMVGSQGRSPSYAS

SEQ ID NO: 2579 - protein, 472 aa, Artificial Sequence
  Fusion Protein
HGEGTFTSDKSQLLEKRLAHLFIEWLIAGGHSKGRLPPKGGGGGGGSGGGGSGGGGSADKTHTCPPCPAPEAAGGPSVFLFPPKPKDTLMISRTPEVTCVVVDVSHEDPEVKFNWYVDGVEVHNAKTKPREEQYNSTYRVVSVLTVLHQDWLNGKEYKCKVSNKALPAPIEKTISKAKGQPREPQVYTLPPSRDELTKNQVSLTCLVKGFYPSDIAVEWESNGQPENNYKTTPPVLDSDGSFFLYSKLTVDKSRWQQGNVFSCSVMHEALHNHYTQKSLSLSPGGGGSGSAHPIPDSSPLLQFGGQVRQRYLYTDDACQTEAHLEIREDGTVGGAADQSPESLLQLKALKPGVIQILGVKTSRFLCQRPDGALYGSLHFDPEACSFRELLLEDGYNVYQSEAHGLPLHLCGNKSPHRDPAPRGPARFLPLPGLPPAPPEPPGILAPQPPDVGSSDPLSMVYPSQGRSPSYAS

SEQ ID NO: 2580 - protein, 471 aa, Artificial Sequence
  Fusion Protein
HGEGTFTSDKSQLLEKRLAHLFIEWLIAGGHSKGRLPPKGGGGGGGSGGGGSGGGGSADKTHTCPPCPAPELLGGPSVFLFPPKPKDTLMISRTPEVTCVVVDVSHEDPEVKFNWYVDGVEVHNAKTKPREEQYNNASRVVSVLTVLHQDWLNGKEYKCKVSNKALPAPIEKTISKAKGQPREPQVYTLPPSRDELTKNQVSLTCLVKGFYPSDIAVEWESNGQPENNYKTTPPVLDSDGSFFLYSKLTVDKSRWQQGNVFSCSVMHEALHNHYTQKSLSLSPGGGGSGSAHPIPDSSPLLQFGGQVRQRYLYTDDACQTEAHLEIREDGTVGGAADQSPESLLQLKALKPGVIQILGVKTSRFLCQRPDGALYGSLHFDPEACSFRELLLEDGYNVYQSEAHGLPLHLPGCKSPHRDPAPRGPARFLPLPGLPPAPPEPPGILAPQPPDVGSSDPLSMVGSQGRSPSYAS

SEQ ID NO: 2581 - protein, 472 aa, Artificial Sequence
  Fusion Protein
HGEGTFTSDKSQLLEKRLAHLFIEWLIAGGHSKGRLPPKGGGGGGGSGGGGSGGGGSADKTHTCPPCPAPELLGGPSVFLFPPKPKDTLMISRTPEVTCVVVDVSHEDPEVKFNWYVDGVEVHNAKTKPREEQYNNASRVVSVLTVLHQDWLNGKEYKCKVSNKALPAPIEKTISKAKGQPREPQVYTLPPSRDELTKNQVSLTCLVKGFYPSDIAVEWESNGQPENNYKTTPPVLDSDGSFFLYSKLTVDKSRWQQGNVFSCSVMHEALHNHYTQKSLSLSPGGGGSGSAHPIPDSSPLLQFGGQVRQRYLYTDDACQTEAHLEIREDGTVGGAADQSPESLLQLKALKPGVIQILGVKTSRFLCQRPDGALYGSLHFDPEACSFRELLLEDGYNVYQSEAHGLPLHLPGCKSPHRDPAPRGPARFLPLPGLPPAPPEPPGILAPQPPDVGSSDPLSMVYPSQGRSPSYAS

SEQ ID NO: 2582 - protein, 471 aa, Artificial Sequence
  Fusion Protein
HGEGTFTSDKSQLLEKRLAHLFIEWLIAGGHSKGRLPPKGGGGGGGSGGGGSGGGGSADKTHTCPPCPAPELLGGPSVFLFPPKPKDTLMISRTPEVTCVVVDVSHEDPEVKFNWYVDGVEVHNAKTKPREEQYNNASRVVSVLTVLHQDWLNGKEYKCKVSNKALPAPIEKTISKAKGQPREPQVYTLPPSRDELTKNQVSLTCLVKGFYPSDIAVEWESNGQPENNYKTTPPVLDSDGSFFLYSKLTVDKSRWQQGNVFSCSVMHEALHNHYTQKSLSLSPGGGGSGSAHPIPDSSPLLQFGGQVRQRYLYTDDACQTEAHLEIREDGTVGGAADQSPESLLQLKALKPGVIQILGVKTSRFLCQRPDGALYGSLHFDPEACSFRELLLEDGYNVYQSEAHGLPLHLCGNKSPHRDPAPRGPARFLPLPGLPPAPPEPPGILAPQPPDVGSSDPLSMVGSQGRSPSYAS

SEQ ID NO: 2583 - protein, 472 aa, Artificial Sequence
  Fusion Protein
HGEGTFTSDKSQLLEKRLAHLFIEWLIAGGHSKGRLPPKGGGGGGGSGGGGSGGGGSADKTHTCPPCPAPELLGGPSVFLFPPKPKDTLMISRTPEVTCVVVDVSHEDPEVKFNWYVDGVEVHNAKTKPREEQYNNASRVVSVLTVLHQDWLNGKEYKCKVSNKALPAPIEKTISKAKGQPREPQVYTLPPSRDELTKNQVSLTCLVKGFYPSDIAVEWESNGQPENNYKTTPPVLDSDGSFFLYSKLTVDKSRWQQGNVFSCSVMHEALHNHYTQKSLSLSPGGGGSGSAHPIPDSSPLLQFGGQVRQRYLYTDDACQTEAHLEIREDGTVGGAADQSPESLLQLKALKPGVIQILGVKTSRFLCQRPDGALYGSLHFDPEACSFRELLLEDGYNVYQSEAHGLPLHLCGNKSPHRDPAPRGPARFLPLPGLPPAPPEPPGILAPQPPDVGSSDPLSMVYPSQGRSPSYAS

SEQ ID NO: 2584 - protein, 474 aa, Artificial Sequence
  Fusion Protein
HGEGTFTSDKSQLLEKRLAHLFIEWLIAGGHSKGRLPPKGGGGGGGSGGGGSGGGGSAESKYGPPCPPCPAPEFEGGPSVFLFPPKPKDTLMISRTPEVTCVVVDVSQEDPEVQFNWYVDGVEVHNAKTKPREEQFNSTYRVVSVLTVLHQDWLNGKEYKCKVSNKGLPSSIEKTISKAKGQPREPQVYTLPPSQEEMTKNQVSLTCLVKGFYPSDIAVEWESNGQPENNYKTTPPVLDSDGSFFLYSRLTVDKSRWQEGNVFSCSVMHEALHNHYTQKSLSLSLGGGGSGSAHPIPDSSPLLQFGGQVRQRYLYTDDACQTEAHLEIREDGTVGGAADQSPESLLQLKALKPGVIQILGVKTSRFLCQRPDGALYGSLHFDPEACSFRELLLEDGYNVYQSEAHGLPLHLPGCKSPHRDPAPRGPARFLPLPGLPPAPPEPPGILAPQPPDVGSSDPLSMVYPSQGRSPSYAS

SEQ ID NO: 2585 - protein, 473 aa, Artificial Sequence
  Fusion Protein
HGEGTFTSDKSQLLEKRLAHLFIEWLIAGGHSKGRLPPKGGGGGGGSGGGGSGGGGSAESKYGPPCPPCPAPEFEGGPSVFLFPPKPKDTLMISRTPEVTCVVVDVSQEDPEVQFNWYVDGVEVHNAKTKPREEQFNSTYRVVSVLTVLHQDWLNGKEYKCKVSNKGLPSSIEKTISKAKGQPREPQVYTLPPSQEEMTKNQVSLTCLVKGFYPSDIAVEWESNGQPENNYKTTPPVLDSDGSFFLYSRLTVDKSRWQEGNVFSCSVMHEALHNHYTQKSLSLSLGGGGSGSAHPIPDSSPLLQFGGQVRQRYLYTDDACQTEAHLEIREDGTVGGAADQSPESLLQLKALKPGVIQILGVKTSRFLCQRPDGALYGSLHFDPEACSFRELLLEDGYNVYQSEAHGLPLHLCGNKSPHRDPAPRGPARFLPLPGLPPAPPEPPGILAPQPPDVGSSDPLSMVGSQGRSPSYAS

SEQ ID NO: 2586 - protein, 474 aa, Artificial Sequence
  Fusion Protein
HGEGTFTSDKSQLLEKRLAHLFIEWLIAGGHSKGRLPPKGGGGGGGSGGGGSGGGGSAESKYGPPCPPCPAPEFEGGPSVFLFPPKPKDTLMISRTPEVTCVVVDVSQEDPEVQFNWYVDGVEVHNAKTKPREEQFNSTYRVVSVLTVLHQDWLNGKEYKCKVSNKGLPSSIEKTISKAKGQPREPQVYTLPPSQEEMTKNQVSLTCLVKGFYPSDIAVEWESNGQPENNYKTTPPVLDSDGSFFLYSRLTVDKSRWQEGNVFSCSVMHEALHNHYTQKSLSLSLGGGGSGSAHPIPDSSPLLQFGGQVRQRYLYTDDACQTEAHLEIREDGTVGGAADQSPESLLQLKALKPGVIQILGVKTSRFLCQRPDGALYGSLHFDPEACSFRELLLEDGYNVYQSEAHGLPLHLCGNKSPHRDPAPRGPARFLPLPGLPPAPPEPPGILAPQPPDVGSSDPLSMVYPSQGRSPSYAS

SEQ ID NO: 2587 - protein, 471 aa, Artificial Sequence
  Fusion Protein
HGEGTFTSDKSQLLEKRLAHLFIEWLIAGGHSSGRLSPKGGGGGGGSGGGGSGGGGSADKTHTCPPCPAPEAAGGPSVFLFPPKPKDTLMISRTPEVTCVVVDVSHEDPEVKFNWYVDGVEVHNAKTKPREEQYNSTYRVVSVLTVLHQDWLNGKEYKCKVSNKALPAPIEKTISKAKGQPREPQVYTLPPSRDELTKNQVSLTCLVKGFYPSDIAVEWESNGQPENNYKTTPPVLDSDGSFFLYSKLTVDKSRWQQGNVFSCSVMHEALHNHYTQKSLSLSPGGGGSGSAHPIPDSSPLLQFGGQVRQRYLYTDDACQTEAHLEIREDGTVGGAADQSPESLLQLKALKPGVIQILGVKTSRFLCQRPDGALYGSLHFDPEACSFRELLLEDGYNVYQSEAHGLPLHLPGCKSPHRDPAPRGPARFLPLPGLPPAPPEPPGILAPQPPDVGSSDPLSMVGSQGRSPSYAS

SEQ ID NO: 2588 - protein, 472 aa, Artificial Sequence
  Fusion Protein
HGEGTFTSDKSQLLEKRLAHLFIEWLIAGGHSSGRLSPKGGGGGGGSGGGGSGGGGSADKTHTCPPCPAPEAAGGPSVFLFPPKPKDTLMISRTPEVTCVVVDVSHEDPEVKFNWYVDGVEVHNAKTKPREEQYNSTYRVVSVLTVLHQDWLNGKEYKCKVSNKALPAPIEKTISKAKGQPREPQVYTLPPSRDELTKNQVSLTCLVKGFYPSDIAVEWESNGQPENNYKTTPPVLDSDGSFFLYSKLTVDKSRWQQGNVFSCSVMHEALHNHYTQKSLSLSPGGGGSGSAHPIPDSSPLLQFGGQVRQRYLYTDDACQTEAHLEIREDGTVGGAADQSPESLLQLKALKPGVIQILGVKTSRFLCQRPDGALYGSLHFDPEACSFRELLLEDGYNVYQSEAHGLPLHLPGCKSPHRDPAPRGPARFLPLPGLPPAPPEPPGILAPQPPDVGSSDPLSMVYPSQGRSPSYAS

SEQ ID NO: 2589 - protein, 471 aa, Artificial Sequence
  Fusion Protein
HGEGTFTSDKSQLLEKRLAHLFIEWLIAGGHSSGRLSPKGGGGGGGSGGGGSGGGGSADKTHTCPPCPAPEAAGGPSVFLFPPKPKDTLMISRTPEVTCVVVDVSHEDPEVKFNWYVDGVEVHNAKTKPREEQYNSTYRVVSVLTVLHQDWLNGKEYKCKVSNKALPAPIEKTISKAKGQPREPQVYTLPPSRDELTKNQVSLTCLVKGFYPSDIAVEWESNGQPENNYKTTPPVLDSDGSFFLYSKLTVDKSRWQQGNVFSCSVMHEALHNHYTQKSLSLSPGGGGSGSAHPIPDSSPLLQFGGQVRQRYLYTDDACQTEAHLEIREDGTVGGAADQSPESLLQLKALKPGVIQILGVKTSRFLCQRPDGALYGSLHFDPEACSFRELLLEDGYNVYQSEAHGLPLHLCGNKSPHRDPAPRGPARFLPLPGLPPAPPEPPGILAPQPPDVGSSDPLSMVGSQGRSPSYAS

SEQ ID NO: 2590 - protein, 472 aa, Artificial Sequence
  Fusion Protein
HGEGTFTSDKSQLLEKRLAHLFIEWLIAGGHSSGRLSPKGGGGGGGSGGGGSGGGGSADKTHTCPPCPAPEAAGGPSVFLFPPKPKDTLMISRTPEVTCVVVDVSHEDPEVKFNWYVDGVEVHNAKTKPREEQYNSTYRVVSVLTVLHQDWLNGKEYKCKVSNKALPAPIEKTISKAKGQPREPQVYTLPPSRDELTKNQVSLTCLVKGFYPSDIAVEWESNGQPENNYKTTPPVLDSDGSFFLYSKLTVDKSRWQQGNVFSCSVMHEALHNHYTQKSLSLSPGGGGSGSAHPIPDSSPLLQFGGQVRQRYLYTDDACQTEAHLEIREDGTVGGAADQSPESLLQLKALKPGVIQILGVKTSRFLCQRPDGALYGSLHFDPEACSFRELLLEDGYNVYQSEAHGLPLHLCGNKSPHRDPAPRGPARFLPLPGLPPAPPEPPGILAPQPPDVGSSDPLSMVYPSQGRSPSYAS

SEQ ID NO: 2591 - protein, 471 aa, Artificial Sequence
  Fusion Protein
HGEGTFTSDKSQLLEKRLAHLFIEWLIAGGHSSGRLSPKGGGGGGGSGGGGSGGGGSADKTHTCPPCPAPELLGGPSVFLFPPKPKDTLMISRTPEVTCVVVDVSHEDPEVKFNWYVDGVEVHNAKTKPREEQYNNASRVVSVLTVLHQDWLNGKEYKCKVSNKALPAPIEKTISKAKGQPREPQVYTLPPSRDELTKNQVSLTCLVKGFYPSDIAVEWESNGQPENNYKTTPPVLDSDGSFFLYSKLTVDKSRWQQGNVFSCSVMHEALHNHYTQKSLSLSPGGGGSGSAHPIPDSSPLLQFGGQVRQRYLYTDDACQTEAHLEIREDGTVGGAADQSPESLLQLKALKPGVIQILGVKTSRFLCQRPDGALYGSLHFDPEACSFRELLLEDGYNVYQSEAHGLPLHLPGCKSPHRDPAPRGPARFLPLPGLPPAPPEPPGILAPQPPDVGSSDPLSMVGSQGRSPSYAS

SEQ ID NO: 2592 - protein, 472 aa, Artificial Sequence
  Fusion Protein
HGEGTFTSDKSQLLEKRLAHLFIEWLIAGGHSSGRLSPKGGGGGGGSGGGGSGGGGSADKTHTCPPCPAPELLGGPSVFLFPPKPKDTLMISRTPEVTCVVVDVSHEDPEVKFNWYVDGVEVHNAKTKPREEQYNNASRVVSVLTVLHQDWLNGKEYKCKVSNKALPAPIEKTISKAKGQPREPQVYTLPPSRDELTKNQVSLTCLVKGFYPSDIAVEWESNGQPENNYKTTPPVLDSDGSFFLYSKLTVDKSRWQQGNVFSCSVMHEALHNHYTQKSLSLSPGGGGSGSAHPIPDSSPLLQFGGQVRQRYLYTDDACQTEAHLEIREDGTVGGAADQSPESLLQLKALKPGVIQILGVKTSRFLCQRPDGALYGSLHFDPEACSFRELLLEDGYNVYQSEAHGLPLHLPGCKSPHRDPAPRGPARFLPLPGLPPAPPEPPGILAPQPPDVGSSDPLSMVYPSQGRSPSYAS

SEQ ID NO: 2593 - protein, 471 aa, Artificial Sequence
  Fusion Protein
HGEGTFTSDKSQLLEKRLAHLFIEWLIAGGHSSGRLSPKGGGGGGGSGGGGSGGGGSADKTHTCPPCPAPELLGGPSVFLFPPKPKDTLMISRTPEVTCVVVDVSHEDPEVKFNWYVDGVEVHNAKTKPREEQYNNASRVVSVLTVLHQDWLNGKEYKCKVSNKALPAPIEKTISKAKGQPREPQVYTLPPSRDELTKNQVSLTCLVKGFYPSDIAVEWESNGQPENNYKTTPPVLDSDGSFFLYSKLTVDKSRWQQGNVFSCSVMHEALHNHYTQKSLSLSPGGGGSGSAHPIPDSSPLLQFGGQVRQRYLYTDDACQTEAHLEIREDGTVGGAADQSPESLLQLKALKPGVIQILGVKTSRFLCQRPDGALYGSLHFDPEACSFRELLLEDGYNVYQSEAHGLPLHLCGNKSPHRDPAPRGPARFLPLPGLPPAPPEPPGILAPQPPDVGSSDPLSMVGSQGRSPSYAS

SEQ ID NO: 2594 - protein, 472 aa, Artificial Sequence
  Fusion Protein
HGEGTFTSDKSQLLEKRLAHLFIEWLIAGGHSSGRLSPKGGGGGGGSGGGGSGGGGSADKTHTCPPCPAPELLGGPSVFLFPPKPKDTLMISRTPEVTCVVVDVSHEDPEVKFNWYVDGVEVHNAKTKPREEQYNNASRVVSVLTVLHQDWLNGKEYKCKVSNKALPAPIEKTISKAKGQPREPQVYTLPPSRDELTKNQVSLTCLVKGFYPSDIAVEWESNGQPENNYKTTPPVLDSDGSFFLYSKLTVDKSRWQQGNVFSCSVMHEALHNHYTQKSLSLSPGGGGSGSAHPIPDSSPLLQFGGQVRQRYLYTDDACQTEAHLEIREDGTVGGAADQSPESLLQLKALKPGVIQILGVKTSRFLCQRPDGALYGSLHFDPEACSFRELLLEDGYNVYQSEAHGLPLHLCGNKSPHRDPAPRGPARFLPLPGLPPAPPEPPGILAPQPPDVGSSDPLSMVYPSQGRSPSYAS

SEQ ID NO: 2595 - protein, 474 aa, Artificial Sequence
  Fusion Protein
HGEGTFTSDKSQLLEKRLAHLFIEWLIAGGHSSGRLSPKGGGGGGGSGGGGSGGGGSAESKYGPPCPPCPAPEFEGGPSVFLFPPKPKDTLMISRTPEVTCVVVDVSQEDPEVQFNWYVDGVEVHNAKTKPREEQFNSTYRVVSVLTVLHQDWLNGKEYKCKVSNKGLPSSIEKTISKAKGQPREPQVYTLPPSQEEMTKNQVSLTCLVKGFYPSDIAVEWESNGQPENNYKTTPPVLDSDGSFFLYSRLTVDKSRWQEGNVFSCSVMHEALHNHYTQKSLSLSLGGGGSGSAHPIPDSSPLLQFGGQVRQRYLYTDDACQTEAHLEIREDGTVGGAADQSPESLLQLKALKPGVIQILGVKTSRFLCQRPDGALYGSLHFDPEACSFRELLLEDGYNVYQSEAHGLPLHLPGCKSPHRDPAPRGPARFLPLPGLPPAPPEPPGILAPQPPDVGSSDPLSMVYPSQGRSPSYAS

SEQ ID NO: 2596 - protein, 473 aa, Artificial Sequence
  Fusion Protein
HGEGTFTSDKSQLLEKRLAHLFIEWLIAGGHSSGRLSPKGGGGGGGSGGGGSGGGGSAESKYGPPCPPCPAPEFEGGPSVFLFPPKPKDTLMISRTPEVTCVVVDVSQEDPEVQFNWYVDGVEVHNAKTKPREEQFNSTYRVVSVLTVLHQDWLNGKEYKCKVSNKGLPSSIEKTISKAKGQPREPQVYTLPPSQEEMTKNQVSLTCLVKGFYPSDIAVEWESNGQPENNYKTTPPVLDSDGSFFLYSRLTVDKSRWQEGNVFSCSVMHEALHNHYTQKSLSLSLGGGGSGSAHPIPDSSPLLQFGGQVRQRYLYTDDACQTEAHLEIREDGTVGGAADQSPESLLQLKALKPGVIQILGVKTSRFLCQRPDGALYGSLHFDPEACSFRELLLEDGYNVYQSEAHGLPLHLCGNKSPHRDPAPRGPARFLPLPGLPPAPPEPPGILAPQPPDVGSSDPLSMVGSQGRSPSYAS

SEQ ID NO: 2597 - protein, 474 aa, Artificial Sequence
  Fusion Protein
HGEGTFTSDKSQLLEKRLAHLFIEWLIAGGHSSGRLSPKGGGGGGGSGGGGSGGGGSAESKYGPPCPPCPAPEFEGGPSVFLFPPKPKDTLMISRTPEVTCVVVDVSQEDPEVQFNWYVDGVEVHNAKTKPREEQFNSTYRVVSVLTVLHQDWLNGKEYKCKVSNKGLPSSIEKTISKAKGQPREPQVYTLPPSQEEMTKNQVSLTCLVKGFYPSDIAVEWESNGQPENNYKTTPPVLDSDGSFFLYSRLTVDKSRWQEGNVFSCSVMHEALHNHYTQKSLSLSLGGGGSGSAHPIPDSSPLLQFGGQVRQRYLYTDDACQTEAHLEIREDGTVGGAADQSPESLLQLKALKPGVIQILGVKTSRFLCQRPDGALYGSLHFDPEACSFRELLLEDGYNVYQSEAHGLPLHLCGNKSPHRDPAPRGPARFLPLPGLPPAPPEPPGILAPQPPDVGSSDPLSMVYPSQGRSPSYAS

SEQ ID NO: 2598 - protein, 471 aa, Artificial Sequence
  Fusion Protein
HGEGTFTSDKSQLLEKRLAHLFIEWLIAGGPSKGRPPPKGGGGGGGSGGGGSGGGGSADKTHTCPPCPAPEAAGGPSVFLFPPKPKDTLMISRTPEVTCVVVDVSHEDPEVKFNWYVDGVEVHNAKTKPREEQYNSTYRVVSVLTVLHQDWLNGKEYKCKVSNKALPAPIEKTISKAKGQPREPQVYTLPPSRDELTKNQVSLTCLVKGFYPSDIAVEWESNGQPENNYKTTPPVLDSDGSFFLYSKLTVDKSRWQQGNVFSCSVMHEALHNHYTQKSLSLSPGGGGSGSAHPIPDSSPLLQFGGQVRQRYLYTDDACQTEAHLEIREDGTVGGAADQSPESLLQLKALKPGVIQILGVKTSRFLCQRPDGALYGSLHFDPEACSFRELLLEDGYNVYQSEAHGLPLHLPGCKSPHRDPAPRGPARFLPLPGLPPAPPEPPGILAPQPPDVGSSDPLSMVGSQGRSPSYAS

SEQ ID NO: 2599 - protein, 472 aa, Artificial Sequence
  Fusion Protein
HGEGTFTSDKSQLLEKRLAHLFIEWLIAGGPSKGRPPPKGGGGGGGSGGGGSGGGGSADKTHTCPPCPAPEAAGGPSVFLFPPKPKDTLMISRTPEVTCVVVDVSHEDPEVKFNWYVDGVEVHNAKTKPREEQYNSTYRVVSVLTVLHQDWLNGKEYKCKVSNKALPAPIEKTISKAKGQPREPQVYTLPPSRDELTKNQVSLTCLVKGFYPSDIAVEWESNGQPENNYKTTPPVLDSDGSFFLYSKLTVDKSRWQQGNVFSCSVMHEALHNHYTQKSLSLSPGGGGSGSAHPIPDSSPLLQFGGQVRQRYLYTDDACQTEAHLEIREDGTVGGAADQSPESLLQLKALKPGVIQILGVKTSRFLCQRPDGALYGSLHFDPEACSFRELLLEDGYNVYQSEAHGLPLHLPGCKSPHRDPAPRGPARFLPLPGLPPAPPEPPGILAPQPPDVGSSDPLSMVYPSQGRSPSYAS

SEQ ID NO: 2600 - protein, 471 aa, Artificial Sequence
  Fusion Protein
HGEGTFTSDKSQLLEKRLAHLFIEWLIAGGPSKGRPPPKGGGGGGGSGGGGSGGGGSADKTHTCPPCPAPEAAGGPSVFLFPPKPKDTLMISRTPEVTCVVVDVSHEDPEVKFNWYVDGVEVHNAKTKPREEQYNSTYRVVSVLTVLHQDWLNGKEYKCKVSNKALPAPIEKTISKAKGQPREPQVYTLPPSRDELTKNQVSLTCLVKGFYPSDIAVEWESNGQPENNYKTTPPVLDSDGSFFLYSKLTVDKSRWQQGNVFSCSVMHEALHNHYTQKSLSLSPGGGGSGSAHPIPDSSPLLQFGGQVRQRYLYTDDACQTEAHLEIREDGTVGGAADQSPESLLQLKALKPGVIQILGVKTSRFLCQRPDGALYGSLHFDPEACSFRELLLEDGYNVYQSEAHGLPLHLCGNKSPHRDPAPRGPARFLPLPGLPPAPPEPPGILAPQPPDVGSSDPLSMVGSQGRSPSYAS

SEQ ID NO: 2601 - protein, 472 aa, Artificial Sequence
  Fusion Protein
HGEGTFTSDKSQLLEKRLAHLFIEWLIAGGPSKGRPPPKGGGGGGGSGGGGSGGGGSADKTHTCPPCPAPEAAGGPSVFLFPPKPKDTLMISRTPEVTCVVVDVSHEDPEVKFNWYVDGVEVHNAKTKPREEQYNSTYRVVSVLTVLHQDWLNGKEYKCKVSNKALPAPIEKTISKAKGQPREPQVYTLPPSRDELTKNQVSLTCLVKGFYPSDIAVEWESNGQPENNYKTTPPVLDSDGSFFLYSKLTVDKSRWQQGNVFSCSVMHEALHNHYTQKSLSLSPGGGGSGSAHPIPDSSPLLQFGGQVRQRYLYTDDACQTEAHLEIREDGTVGGAADQSPESLLQLKALKPGVIQILGVKTSRFLCQRPDGALYGSLHFDPEACSFRELLLEDGYNVYQSEAHGLPLHLCGNKSPHRDPAPRGPARFLPLPGLPPAPPEPPGILAPQPPDVGSSDPLSMVYPSQGRSPSYAS

SEQ ID NO: 2602 - protein, 471 aa, Artificial Sequence
  Fusion Protein
HGEGTFTSDKSQLLEKRLAHLFIEWLIAGGPSKGRPPPKGGGGGGGSGGGGSGGGGSADKTHTCPPCPAPELLGGPSVFLFPPKPKDTLMISRTPEVTCVVVDVSHEDPEVKFNWYVDGVEVHNAKTKPREEQYNNASRVVSVLTVLHQDWLNGKEYKCKVSNKALPAPIEKTISKAKGQPREPQVYTLPPSRDELTKNQVSLTCLVKGFYPSDIAVEWESNGQPENNYKTTPPVLDSDGSFFLYSKLTVDKSRWQQGNVFSCSVMHEALHNHYTQKSLSLSPGGGGSGSAHPIPDSSPLLQFGGQVRQRYLYTDDACQTEAHLEIREDGTVGGAADQSPESLLQLKALKPGVIQILGVKTSRFLCQRPDGALYGSLHFDPEACSFRELLLEDGYNVYQSEAHGLPLHLPGCKSPHRDPAPRGPARFLPLPGLPPAPPEPPGILAPQPPDVGSSDPLSMVGSQGRSPSYAS

SEQ ID NO: 2603 - protein, 472 aa, Artificial Sequence
  Fusion Protein
HGEGTFTSDKSQLLEKRLAHLFIEWLIAGGPSKGRPPPKGGGGGGGSGGGGSGGGGSADKTHTCPPCPAPELLGGPSVFLFPPKPKDTLMISRTPEVTCVVVDVSHEDPEVKFNWYVDGVEVHNAKTKPREEQYNNASRVVSVLTVLHQDWLNGKEYKCKVSNKALPAPIEKTISKAKGQPREPQVYTLPPSRDELTKNQVSLTCLVKGFYPSDIAVEWESNGQPENNYKTTPPVLDSDGSFFLYSKLTVDKSRWQQGNVFSCSVMHEALHNHYTQKSLSLSPGGGGSGSAHPIPDSSPLLQFGGQVRQRYLYTDDACQTEAHLEIREDGTVGGAADQSPESLLQLKALKPGVIQILGVKTSRFLCQRPDGALYGSLHFDPEACSFRELLLEDGYNVYQSEAHGLPLHLPGCKSPHRDPAPRGPARFLPLPGLPPAPPEPPGILAPQPPDVGSSDPLSMVYPSQGRSPSYAS

SEQ ID NO: 2604 - protein, 471 aa, Artificial Sequence
  Fusion Protein
HGEGTFTSDKSQLLEKRLAHLFIEWLIAGGPSKGRPPPKGGGGGGGSGGGGSGGGGSADKTHTCPPCPAPELLGGPSVFLFPPKPKDTLMISRTPEVTCVVVDVSHEDPEVKFNWYVDGVEVHNAKTKPREEQYNNASRVVSVLTVLHQDWLNGKEYKCKVSNKALPAPIEKTISKAKGQPREPQVYTLPPSRDELTKNQVSLTCLVKGFYPSDIAVEWESNGQPENNYKTTPPVLDSDGSFFLYSKLTVDKSRWQQGNVFSCSVMHEALHNHYTQKSLSLSPGGGGSGSAHPIPDSSPLLQFGGQVRQRYLYTDDACQTEAHLEIREDGTVGGAADQSPESLLQLKALKPGVIQILGVKTSRFLCQRPDGALYGSLHFDPEACSFRELLLEDGYNVYQSEAHGLPLHLCGNKSPHRDPAPRGPARFLPLPGLPPAPPEPPGILAPQPPDVGSSDPLSMVGSQGRSPSYAS

SEQ ID NO: 2605 - protein, 472 aa, Artificial Sequence
  Fusion Protein
HGEGTFTSDKSQLLEKRLAHLFIEWLIAGGPSKGRPPPKGGGGGGGSGGGGSGGGGSADKTHTCPPCPAPELLGGPSVFLFPPKPKDTLMISRTPEVTCVVVDVSHEDPEVKFNWYVDGVEVHNAKTKPREEQYNNASRVVSVLTVLHQDWLNGKEYKCKVSNKALPAPIEKTISKAKGQPREPQVYTLPPSRDELTKNQVSLTCLVKGFYPSDIAVEWESNGQPENNYKTTPPVLDSDGSFFLYSKLTVDKSRWQQGNVFSCSVMHEALHNHYTQKSLSLSPGGGGSGSAHPIPDSSPLLQFGGQVRQRYLYTDDACQTEAHLEIREDGTVGGAADQSPESLLQLKALKPGVIQILGVKTSRFLCQRPDGALYGSLHFDPEACSFRELLLEDGYNVYQSEAHGLPLHLCGNKSPHRDPAPRGPARFLPLPGLPPAPPEPPGILAPQPPDVGSSDPLSMVYPSQGRSPSYAS

SEQ ID NO: 2606 - protein, 474 aa, Artificial Sequence
  Fusion Protein
HGEGTFTSDKSQLLEKRLAHLFIEWLIAGGPSKGRPPPKGGGGGGGSGGGGSGGGGSAESKYGPPCPPCPAPEFEGGPSVFLFPPKPKDTLMISRTPEVTCVVVDVSQEDPEVQFNWYVDGVEVHNAKTKPREEQFNSTYRVVSVLTVLHQDWLNGKEYKCKVSNKGLPSSIEKTISKAKGQPREPQVYTLPPSQEEMTKNQVSLTCLVKGFYPSDIAVEWESNGQPENNYKTTPPVLDSDGSFFLYSRLTVDKSRWQEGNVFSCSVMHEALHNHYTQKSLSLSLGGGGSGSAHPIPDSSPLLQFGGQVRQRYLYTDDACQTEAHLEIREDGTVGGAADQSPESLLQLKALKPGVIQILGVKTSRFLCQRPDGALYGSLHFDPEACSFRELLLEDGYNVYQSEAHGLPLHLPGCKSPHRDPAPRGPARFLPLPGLPPAPPEPPGILAPQPPDVGSSDPLSMVYPSQGRSPSYAS

SEQ ID NO: 2607 - protein, 473 aa, Artificial Sequence
  Fusion Protein
HGEGTFTSDKSQLLEKRLAHLFIEWLIAGGPSKGRPPPKGGGGGGGSGGGGSGGGGSAESKYGPPCPPCPAPEFEGGPSVFLFPPKPKDTLMISRTPEVTCVVVDVSQEDPEVQFNWYVDGVEVHNAKTKPREEQFNSTYRVVSVLTVLHQDWLNGKEYKCKVSNKGLPSSIEKTISKAKGQPREPQVYTLPPSQEEMTKNQVSLTCLVKGFYPSDIAVEWESNGQPENNYKTTPPVLDSDGSFFLYSRLTVDKSRWQEGNVFSCSVMHEALHNHYTQKSLSLSLGGGGSGSAHPIPDSSPLLQFGGQVRQRYLYTDDACQTEAHLEIREDGTVGGAADQSPESLLQLKALKPGVIQILGVKTSRFLCQRPDGALYGSLHFDPEACSFRELLLEDGYNVYQSEAHGLPLHLCGNKSPHRDPAPRGPARFLPLPGLPPAPPEPPGILAPQPPDVGSSDPLSMVGSQGRSPSYAS

SEQ ID NO: 2608 - protein, 474 aa, Artificial Sequence
  Fusion Protein
HGEGTFTSDKSQLLEKRLAHLFIEWLIAGGPSKGRPPPKGGGGGGGSGGGGSGGGGSAESKYGPPCPPCPAPEFEGGPSVFLFPPKPKDTLMISRTPEVTCVVVDVSQEDPEVQFNWYVDGVEVHNAKTKPREEQFNSTYRVVSVLTVLHQDWLNGKEYKCKVSNKGLPSSIEKTISKAKGQPREPQVYTLPPSQEEMTKNQVSLTCLVKGFYPSDIAVEWESNGQPENNYKTTPPVLDSDGSFFLYSRLTVDKSRWQEGNVFSCSVMHEALHNHYTQKSLSLSLGGGGSGSAHPIPDSSPLLQFGGQVRQRYLYTDDACQTEAHLEIREDGTVGGAADQSPESLLQLKALKPGVIQILGVKTSRFLCQRPDGALYGSLHFDPEACSFRELLLEDGYNVYQSEAHGLPLHLCGNKSPHRDPAPRGPARFLPLPGLPPAPPEPPGILAPQPPDVGSSDPLSMVYPSQGRSPSYAS

SEQ ID NO: 2609 - protein, 471 aa, Artificial Sequence
  Fusion Protein
HGEGTFTSDKSQLLEKRLAHLFIEWLIKGGHSKGRPPPKGGGGGGGSGGGGSGGGGSADKTHTCPPCPAPEAAGGPSVFLFPPKPKDTLMISRTPEVTCVVVDVSHEDPEVKFNWYVDGVEVHNAKTKPREEQYNSTYRVVSVLTVLHQDWLNGKEYKCKVSNKALPAPIEKTISKAKGQPREPQVYTLPPSRDELTKNQVSLTCLVKGFYPSDIAVEWESNGQPENNYKTTPPVLDSDGSFFLYSKLTVDKSRWQQGNVFSCSVMHEALHNHYTQKSLSLSPGGGGSGSAHPIPDSSPLLQFGGQVRQRYLYTDDACQTEAHLEIREDGTVGGAADQSPESLLQLKALKPGVIQILGVKTSRFLCQRPDGALYGSLHFDPEACSFRELLLEDGYNVYQSEAHGLPLHLPGCKSPHRDPAPRGPARFLPLPGLPPAPPEPPGILAPQPPDVGSSDPLSMVGSQGRSPSYAS

SEQ ID NO: 2610 - protein, 472 aa, Artificial Sequence
  Fusion Protein
HGEGTFTSDKSQLLEKRLAHLFIEWLIKGGHSKGRPPPKGGGGGGGSGGGGSGGGGSADKTHTCPPCPAPEAAGGPSVFLFPPKPKDTLMISRTPEVTCVVVDVSHEDPEVKFNWYVDGVEVHNAKTKPREEQYNSTYRVVSVLTVLHQDWLNGKEYKCKVSNKALPAPIEKTISKAKGQPREPQVYTLPPSRDELTKNQVSLTCLVKGFYPSDIAVEWESNGQPENNYKTTPPVLDSDGSFFLYSKLTVDKSRWQQGNVFSCSVMHEALHNHYTQKSLSLSPGGGGSGSAHPIPDSSPLLQFGGQVRQRYLYTDDACQTEAHLEIREDGTVGGAADQSPESLLQLKALKPGVIQILGVKTSRFLCQRPDGALYGSLHFDPEACSFRELLLEDGYNVYQSEAHGLPLHLPGCKSPHRDPAPRGPARFLPLPGLPPAPPEPPGILAPQPPDVGSSDPLSMVYPSQGRSPSYAS

SEQ ID NO: 2611 - protein, 471 aa, Artificial Sequence
  Fusion Protein
HGEGTFTSDKSQLLEKRLAHLFIEWLIKGGHSKGRPPPKGGGGGGGSGGGGSGGGGSADKTHTCPPCPAPEAAGGPSVFLFPPKPKDTLMISRTPEVTCVVVDVSHEDPEVKFNWYVDGVEVHNAKTKPREEQYNSTYRVVSVLTVLHQDWLNGKEYKCKVSNKALPAPIEKTISKAKGQPREPQVYTLPPSRDELTKNQVSLTCLVKGFYPSDIAVEWESNGQPENNYKTTPPVLDSDGSFFLYSKLTVDKSRWQQGNVFSCSVMHEALHNHYTQKSLSLSPGGGGSGSAHPIPDSSPLLQFGGQVRQRYLYTDDACQTEAHLEIREDGTVGGAADQSPESLLQLKALKPGVIQILGVKTSRFLCQRPDGALYGSLHFDPEACSFRELLLEDGYNVYQSEAHGLPLHLCGNKSPHRDPAPRGPARFLPLPGLPPAPPEPPGILAPQPPDVGSSDPLSMVGSQGRSPSYAS

SEQ ID NO: 2612 - protein, 472 aa, Artificial Sequence
  Fusion Protein
HGEGTFTSDKSQLLEKRLAHLFIEWLIKGGHSKGRPPPKGGGGGGGSGGGGSGGGGSADKTHTCPPCPAPEAAGGPSVFLFPPKPKDTLMISRTPEVTCVVVDVSHEDPEVKFNWYVDGVEVHNAKTKPREEQYNSTYRVVSVLTVLHQDWLNGKEYKCKVSNKALPAPIEKTISKAKGQPREPQVYTLPPSRDELTKNQVSLTCLVKGFYPSDIAVEWESNGQPENNYKTTPPVLDSDGSFFLYSKLTVDKSRWQQGNVFSCSVMHEALHNHYTQKSLSLSPGGGGSGSAHPIPDSSPLLQFGGQVRQRYLYTDDACQTEAHLEIREDGTVGGAADQSPESLLQLKALKPGVIQILGVKTSRFLCQRPDGALYGSLHFDPEACSFRELLLEDGYNVYQSEAHGLPLHLCGNKSPHRDPAPRGPARFLPLPGLPPAPPEPPGILAPQPPDVGSSDPLSMVYPSQGRSPSYAS

SEQ ID NO: 2613 - protein, 471 aa, Artificial Sequence
  Fusion Protein
HGEGTFTSDKSQLLEKRLAHLFIEWLIKGGHSKGRPPPKGGGGGGGSGGGGSGGGGSADKTHTCPPCPAPELLGGPSVFLFPPKPKDTLMISRTPEVTCVVVDVSHEDPEVKFNWYVDGVEVHNAKTKPREEQYNNASRVVSVLTVLHQDWLNGKEYKCKVSNKALPAPIEKTISKAKGQPREPQVYTLPPSRDELTKNQVSLTCLVKGFYPSDIAVEWESNGQPENNYKTTPPVLDSDGSFFLYSKLTVDKSRWQQGNVFSCSVMHEALHNHYTQKSLSLSPGGGGSGSAHPIPDSSPLLQFGGQVRQRYLYTDDACQTEAHLEIREDGTVGGAADQSPESLLQLKALKPGVIQILGVKTSRFLCQRPDGALYGSLHFDPEACSFRELLLEDGYNVYQSEAHGLPLHLPGCKSPHRDPAPRGPARFLPLPGLPPAPPEPPGILAPQPPDVGSSDPLSMVGSQGRSPSYAS

SEQ ID NO: 2614 - protein, 472 aa, Artificial Sequence
  Fusion Protein
HGEGTFTSDKSQLLEKRLAHLFIEWLIKGGHSKGRPPPKGGGGGGGSGGGGSGGGGSADKTHTCPPCPAPELLGGPSVFLFPPKPKDTLMISRTPEVTCVVVDVSHEDPEVKFNWYVDGVEVHNAKTKPREEQYNNASRVVSVLTVLHQDWLNGKEYKCKVSNKALPAPIEKTISKAKGQPREPQVYTLPPSRDELTKNQVSLTCLVKGFYPSDIAVEWESNGQPENNYKTTPPVLDSDGSFFLYSKLTVDKSRWQQGNVFSCSVMHEALHNHYTQKSLSLSPGGGGSGSAHPIPDSSPLLQFGGQVRQRYLYTDDACQTEAHLEIREDGTVGGAADQSPESLLQLKALKPGVIQILGVKTSRFLCQRPDGALYGSLHFDPEACSFRELLLEDGYNVYQSEAHGLPLHLPGCKSPHRDPAPRGPARFLPLPGLPPAPPEPPGILAPQPPDVGSSDPLSMVYPSQGRSPSYAS

SEQ ID NO: 2615 - protein, 471 aa, Artificial Sequence
  Fusion Protein
HGEGTFTSDKSQLLEKRLAHLFIEWLIKGGHSKGRPPPKGGGGGGGSGGGGSGGGGSADKTHTCPPCPAPELLGGPSVFLFPPKPKDTLMISRTPEVTCVVVDVSHEDPEVKFNWYVDGVEVHNAKTKPREEQYNNASRVVSVLTVLHQDWLNGKEYKCKVSNKALPAPIEKTISKAKGQPREPQVYTLPPSRDELTKNQVSLTCLVKGFYPSDIAVEWESNGQPENNYKTTPPVLDSDGSFFLYSKLTVDKSRWQQGNVFSCSVMHEALHNHYTQKSLSLSPGGGGSGSAHPIPDSSPLLQFGGQVRQRYLYTDDACQTEAHLEIREDGTVGGAADQSPESLLQLKALKPGVIQILGVKTSRFLCQRPDGALYGSLHFDPEACSFRELLLEDGYNVYQSEAHGLPLHLCGNKSPHRDPAPRGPARFLPLPGLPPAPPEPPGILAPQPPDVGSSDPLSMVGSQGRSPSYAS

SEQ ID NO: 2616 - protein, 472 aa, Artificial Sequence
  Fusion Protein
HGEGTFTSDKSQLLEKRLAHLFIEWLIKGGHSKGRPPPKGGGGGGGSGGGGSGGGGSADKTHTCPPCPAPELLGGPSVFLFPPKPKDTLMISRTPEVTCVVVDVSHEDPEVKFNWYVDGVEVHNAKTKPREEQYNNASRVVSVLTVLHQDWLNGKEYKCKVSNKALPAPIEKTISKAKGQPREPQVYTLPPSRDELTKNQVSLTCLVKGFYPSDIAVEWESNGQPENNYKTTPPVLDSDGSFFLYSKLTVDKSRWQQGNVFSCSVMHEALHNHYTQKSLSLSPGGGGSGSAHPIPDSSPLLQFGGQVRQRYLYTDDACQTEAHLEIREDGTVGGAADQSPESLLQLKALKPGVIQILGVKTSRFLCQRPDGALYGSLHFDPEACSFRELLLEDGYNVYQSEAHGLPLHLCGNKSPHRDPAPRGPARFLPLPGLPPAPPEPPGILAPQPPDVGSSDPLSMVYPSQGRSPSYAS

SEQ ID NO: 2617 - protein, 474 aa, Artificial Sequence
  Fusion Protein
HGEGTFTSDKSQLLEKRLAHLFIEWLIKGGHSKGRPPPKGGGGGGGSGGGGSGGGGSAESKYGPPCPPCPAPEFEGGPSVFLFPPKPKDTLMISRTPEVTCVVVDVSQEDPEVQFNWYVDGVEVHNAKTKPREEQFNSTYRVVSVLTVLHQDWLNGKEYKCKVSNKGLPSSIEKTISKAKGQPREPQVYTLPPSQEEMTKNQVSLTCLVKGFYPSDIAVEWESNGQPENNYKTTPPVLDSDGSFFLYSRLTVDKSRWQEGNVFSCSVMHEALHNHYTQKSLSLSLGGGGSGSAHPIPDSSPLLQFGGQVRQRYLYTDDACQTEAHLEIREDGTVGGAADQSPESLLQLKALKPGVIQILGVKTSRFLCQRPDGALYGSLHFDPEACSFRELLLEDGYNVYQSEAHGLPLHLPGCKSPHRDPAPRGPARFLPLPGLPPAPPEPPGILAPQPPDVGSSDPLSMVYPSQGRSPSYAS

SEQ ID NO: 2618 - protein, 473 aa, Artificial Sequence
  Fusion Protein
HGEGTFTSDKSQLLEKRLAHLFIEWLIKGGHSKGRPPPKGGGGGGGSGGGGSGGGGSAESKYGPPCPPCPAPEFEGGPSVFLFPPKPKDTLMISRTPEVTCVVVDVSQEDPEVQFNWYVDGVEVHNAKTKPREEQFNSTYRVVSVLTVLHQDWLNGKEYKCKVSNKGLPSSIEKTISKAKGQPREPQVYTLPPSQEEMTKNQVSLTCLVKGFYPSDIAVEWESNGQPENNYKTTPPVLDSDGSFFLYSRLTVDKSRWQEGNVFSCSVMHEALHNHYTQKSLSLSLGGGGSGSAHPIPDSSPLLQFGGQVRQRYLYTDDACQTEAHLEIREDGTVGGAADQSPESLLQLKALKPGVIQILGVKTSRFLCQRPDGALYGSLHFDPEACSFRELLLEDGYNVYQSEAHGLPLHLCGNKSPHRDPAPRGPARFLPLPGLPPAPPEPPGILAPQPPDVGSSDPLSMVGSQGRSPSYAS

SEQ ID NO: 2619 - protein, 474 aa, Artificial Sequence
  Fusion Protein
HGEGTFTSDKSQLLEKRLAHLFIEWLIKGGHSKGRPPPKGGGGGGGSGGGGSGGGGSAESKYGPPCPPCPAPEFEGGPSVFLFPPKPKDTLMISRTPEVTCVVVDVSQEDPEVQFNWYVDGVEVHNAKTKPREEQFNSTYRVVSVLTVLHQDWLNGKEYKCKVSNKGLPSSIEKTISKAKGQPREPQVYTLPPSQEEMTKNQVSLTCLVKGFYPSDIAVEWESNGQPENNYKTTPPVLDSDGSFFLYSRLTVDKSRWQEGNVFSCSVMHEALHNHYTQKSLSLSLGGGGSGSAHPIPDSSPLLQFGGQVRQRYLYTDDACQTEAHLEIREDGTVGGAADQSPESLLQLKALKPGVIQILGVKTSRFLCQRPDGALYGSLHFDPEACSFRELLLEDGYNVYQSEAHGLPLHLCGNKSPHRDPAPRGPARFLPLPGLPPAPPEPPGILAPQPPDVGSSDPLSMVYPSQGRSPSYAS

SEQ ID NO: 2620 - protein, 471 aa, Artificial Sequence
  Fusion Protein
HGEGTFTSDKSQLLEKRAAHLFIEWLIAGGHKKGKPPPKGGGGGGGSGGGGSGGGGSADKTHTCPPCPAPEAAGGPSVFLFPPKPKDTLMISRTPEVTCVVVDVSHEDPEVKFNWYVDGVEVHNAKTKPREEQYNSTYRVVSVLTVLHQDWLNGKEYKCKVSNKALPAPIEKTISKAKGQPREPQVYTLPPSRDELTKNQVSLTCLVKGFYPSDIAVEWESNGQPENNYKTTPPVLDSDGSFFLYSKLTVDKSRWQQGNVFSCSVMHEALHNHYTQKSLSLSPGGGGSGSAHPIPDSSPLLQFGGQVRQRYLYTDDACQTEAHLEIREDGTVGGAADQSPESLLQLKALKPGVIQILGVKTSRFLCQRPDGALYGSLHFDPEACSFRELLLEDGYNVYQSEAHGLPLHLPGCKSPHRDPAPRGPARFLPLPGLPPAPPEPPGILAPQPPDVGSSDPLSMVGSQGRSPSYAS

SEQ ID NO: 2621 - protein, 472 aa, Artificial Sequence
  Fusion Protein
HGEGTFTSDKSQLLEKRAAHLFIEWLIAGGHKKGKPPPKGGGGGGGSGGGGSGGGGSADKTHTCPPCPAPEAAGGPSVFLFPPKPKDTLMISRTPEVTCVVVDVSHEDPEVKFNWYVDGVEVHNAKTKPREEQYNSTYRVVSVLTVLHQDWLNGKEYKCKVSNKALPAPIEKTISKAKGQPREPQVYTLPPSRDELTKNQVSLTCLVKGFYPSDIAVEWESNGQPENNYKTTPPVLDSDGSFFLYSKLTVDKSRWQQGNVFSCSVMHEALHNHYTQKSLSLSPGGGGSGSAHPIPDSSPLLQFGGQVRQRYLYTDDACQTEAHLEIREDGTVGGAADQSPESLLQLKALKPGVIQILGVKTSRFLCQRPDGALYGSLHFDPEACSFRELLLEDGYNVYQSEAHGLPLHLPGCKSPHRDPAPRGPARFLPLPGLPPAPPEPPGILAPQPPDVGSSDPLSMVYPSQGRSPSYAS

SEQ ID NO: 2622 - protein, 471 aa, Artificial Sequence
  Fusion Protein
HGEGTFTSDKSQLLEKRAAHLFIEWLIAGGHKKGKPPPKGGGGGGGSGGGGSGGGGSADKTHTCPPCPAPEAAGGPSVFLFPPKPKDTLMISRTPEVTCVVVDVSHEDPEVKFNWYVDGVEVHNAKTKPREEQYNSTYRVVSVLTVLHQDWLNGKEYKCKVSNKALPAPIEKTISKAKGQPREPQVYTLPPSRDELTKNQVSLTCLVKGFYPSDIAVEWESNGQPENNYKTTPPVLDSDGSFFLYSKLTVDKSRWQQGNVFSCSVMHEALHNHYTQKSLSLSPGGGGSGSAHPIPDSSPLLQFGGQVRQRYLYTDDACQTEAHLEIREDGTVGGAADQSPESLLQLKALKPGVIQILGVKTSRFLCQRPDGALYGSLHFDPEACSFRELLLEDGYNVYQSEAHGLPLHLCGNKSPHRDPAPRGPARFLPLPGLPPAPPEPPGILAPQPPDVGSSDPLSMVGSQGRSPSYAS

SEQ ID NO: 2623 - protein, 472 aa, Artificial Sequence
  Fusion Protein
HGEGTFTSDKSQLLEKRAAHLFIEWLIAGGHKKGKPPPKGGGGGGGSGGGGSGGGGSADKTHTCPPCPAPEAAGGPSVFLFPPKPKDTLMISRTPEVTCVVVDVSHEDPEVKFNWYVDGVEVHNAKTKPREEQYNSTYRVVSVLTVLHQDWLNGKEYKCKVSNKALPAPIEKTISKAKGQPREPQVYTLPPSRDELTKNQVSLTCLVKGFYPSDIAVEWESNGQPENNYKTTPPVLDSDGSFFLYSKLTVDKSRWQQGNVFSCSVMHEALHNHYTQKSLSLSPGGGGSGSAHPIPDSSPLLQFGGQVRQRYLYTDDACQTEAHLEIREDGTVGGAADQSPESLLQLKALKPGVIQILGVKTSRFLCQRPDGALYGSLHFDPEACSFRELLLEDGYNVYQSEAHGLPLHLCGNKSPHRDPAPRGPARFLPLPGLPPAPPEPPGILAPQPPDVGSSDPLSMVYPSQGRSPSYAS

SEQ ID NO: 2624 - protein, 471 aa, Artificial Sequence
  Fusion Protein
HGEGTFTSDKSQLLEKRAAHLFIEWLIAGGHKKGKPPPKGGGGGGGSGGGGSGGGGSADKTHTCPPCPAPELLGGPSVFLFPPKPKDTLMISRTPEVTCVVVDVSHEDPEVKFNWYVDGVEVHNAKTKPREEQYNNASRVVSVLTVLHQDWLNGKEYKCKVSNKALPAPIEKTISKAKGQPREPQVYTLPPSRDELTKNQVSLTCLVKGFYPSDIAVEWESNGQPENNYKTTPPVLDSDGSFFLYSKLTVDKSRWQQGNVFSCSVMHEALHNHYTQKSLSLSPGGGGSGSAHPIPDSSPLLQFGGQVRQRYLYTDDACQTEAHLEIREDGTVGGAADQSPESLLQLKALKPGVIQILGVKTSRFLCQRPDGALYGSLHFDPEACSFRELLLEDGYNVYQSEAHGLPLHLPGCKSPHRDPAPRGPARFLPLPGLPPAPPEPPGILAPQPPDVGSSDPLSMVGSQGRSPSYAS

SEQ ID NO: 2625 - protein, 472 aa, Artificial Sequence
  Fusion Protein
HGEGTFTSDKSQLLEKRAAHLFIEWLIAGGHKKGKPPPKGGGGGGGSGGGGSGGGGSADKTHTCPPCPAPELLGGPSVFLFPPKPKDTLMISRTPEVTCVVVDVSHEDPEVKFNWYVDGVEVHNAKTKPREEQYNNASRVVSVLTVLHQDWLNGKEYKCKVSNKALPAPIEKTISKAKGQPREPQVYTLPPSRDELTKNQVSLTCLVKGFYPSDIAVEWESNGQPENNYKTTPPVLDSDGSFFLYSKLTVDKSRWQQGNVFSCSVMHEALHNHYTQKSLSLSPGGGGSGSAHPIPDSSPLLQFGGQVRQRYLYTDDACQTEAHLEIREDGTVGGAADQSPESLLQLKALKPGVIQILGVKTSRFLCQRPDGALYGSLHFDPEACSFRELLLEDGYNVYQSEAHGLPLHLPGCKSPHRDPAPRGPARFLPLPGLPPAPPEPPGILAPQPPDVGSSDPLSMVYPSQGRSPSYAS

SEQ ID NO: 2626 - protein, 471 aa, Artificial Sequence
  Fusion Protein
HGEGTFTSDKSQLLEKRAAHLFIEWLIAGGHKKGKPPPKGGGGGGGSGGGGSGGGGSADKTHTCPPCPAPELLGGPSVFLFPPKPKDTLMISRTPEVTCVVVDVSHEDPEVKFNWYVDGVEVHNAKTKPREEQYNNASRVVSVLTVLHQDWLNGKEYKCKVSNKALPAPIEKTISKAKGQPREPQVYTLPPSRDELTKNQVSLTCLVKGFYPSDIAVEWESNGQPENNYKTTPPVLDSDGSFFLYSKLTVDKSRWQQGNVFSCSVMHEALHNHYTQKSLSLSPGGGGSGSAHPIPDSSPLLQFGGQVRQRYLYTDDACQTEAHLEIREDGTVGGAADQSPESLLQLKALKPGVIQILGVKTSRFLCQRPDGALYGSLHFDPEACSFRELLLEDGYNVYQSEAHGLPLHLCGNKSPHRDPAPRGPARFLPLPGLPPAPPEPPGILAPQPPDVGSSDPLSMVGSQGRSPSYAS

SEQ ID NO: 2627 - protein, 472 aa, Artificial Sequence
  Fusion Protein
HGEGTFTSDKSQLLEKRAAHLFIEWLIAGGHKKGKPPPKGGGGGGGSGGGGSGGGGSADKTHTCPPCPAPELLGGPSVFLFPPKPKDTLMISRTPEVTCVVVDVSHEDPEVKFNWYVDGVEVHNAKTKPREEQYNNASRVVSVLTVLHQDWLNGKEYKCKVSNKALPAPIEKTISKAKGQPREPQVYTLPPSRDELTKNQVSLTCLVKGFYPSDIAVEWESNGQPENNYKTTPPVLDSDGSFFLYSKLTVDKSRWQQGNVFSCSVMHEALHNHYTQKSLSLSPGGGGSGSAHPIPDSSPLLQFGGQVRQRYLYTDDACQTEAHLEIREDGTVGGAADQSPESLLQLKALKPGVIQILGVKTSRFLCQRPDGALYGSLHFDPEACSFRELLLEDGYNVYQSEAHGLPLHLCGNKSPHRDPAPRGPARFLPLPGLPPAPPEPPGILAPQPPDVGSSDPLSMVYPSQGRSPSYAS

SEQ ID NO: 2628 - protein, 474 aa, Artificial Sequence
  Fusion Protein
HGEGTFTSDKSQLLEKRAAHLFIEWLIAGGHKKGKPPPKGGGGGGGSGGGGSGGGGSAESKYGPPCPPCPAPEFEGGPSVFLFPPKPKDTLMISRTPEVTCVVVDVSQEDPEVQFNWYVDGVEVHNAKTKPREEQFNSTYRVVSVLTVLHQDWLNGKEYKCKVSNKGLPSSIEKTISKAKGQPREPQVYTLPPSQEEMTKNQVSLTCLVKGFYPSDIAVEWESNGQPENNYKTTPPVLDSDGSFFLYSRLTVDKSRWQEGNVFSCSVMHEALHNHYTQKSLSLSLGGGGSGSAHPIPDSSPLLQFGGQVRQRYLYTDDACQTEAHLEIREDGTVGGAADQSPESLLQLKALKPGVIQILGVKTSRFLCQRPDGALYGSLHFDPEACSFRELLLEDGYNVYQSEAHGLPLHLPGCKSPHRDPAPRGPARFLPLPGLPPAPPEPPGILAPQPPDVGSSDPLSMVYPSQGRSPSYAS

SEQ ID NO: 2629 - protein, 473 aa, Artificial Sequence
  Fusion Protein
HGEGTFTSDKSQLLEKRAAHLFIEWLIAGGHKKGKPPPKGGGGGGGSGGGGSGGGGSAESKYGPPCPPCPAPEFEGGPSVFLFPPKPKDTLMISRTPEVTCVVVDVSQEDPEVQFNWYVDGVEVHNAKTKPREEQFNSTYRVVSVLTVLHQDWLNGKEYKCKVSNKGLPSSIEKTISKAKGQPREPQVYTLPPSQEEMTKNQVSLTCLVKGFYPSDIAVEWESNGQPENNYKTTPPVLDSDGSFFLYSRLTVDKSRWQEGNVFSCSVMHEALHNHYTQKSLSLSLGGGGSGSAHPIPDSSPLLQFGGQVRQRYLYTDDACQTEAHLEIREDGTVGGAADQSPESLLQLKALKPGVIQILGVKTSRFLCQRPDGALYGSLHFDPEACSFRELLLEDGYNVYQSEAHGLPLHLCGNKSPHRDPAPRGPARFLPLPGLPPAPPEPPGILAPQPPDVGSSDPLSMVGSQGRSPSYAS

SEQ ID NO: 2630 - protein, 474 aa, Artificial Sequence
  Fusion Protein
HGEGTFTSDKSQLLEKRAAHLFIEWLIAGGHKKGKPPPKGGGGGGGSGGGGSGGGGSAESKYGPPCPPCPAPEFEGGPSVFLFPPKPKDTLMISRTPEVTCVVVDVSQEDPEVQFNWYVDGVEVHNAKTKPREEQFNSTYRVVSVLTVLHQDWLNGKEYKCKVSNKGLPSSIEKTISKAKGQPREPQVYTLPPSQEEMTKNQVSLTCLVKGFYPSDIAVEWESNGQPENNYKTTPPVLDSDGSFFLYSRLTVDKSRWQEGNVFSCSVMHEALHNHYTQKSLSLSLGGGGSGSAHPIPDSSPLLQFGGQVRQRYLYTDDACQTEAHLEIREDGTVGGAADQSPESLLQLKALKPGVIQILGVKTSRFLCQRPDGALYGSLHFDPEACSFRELLLEDGYNVYQSEAHGLPLHLCGNKSPHRDPAPRGPARFLPLPGLPPAPPEPPGILAPQPPDVGSSDPLSMVYPSQGRSPSYAS

SEQ ID NO: 2631 - protein, 471 aa, Artificial Sequence
  Fusion Protein
HGEGTFTSDKSQLLEKRAAHLFIEWLIAGGHSSGRYPPKGGGGGGGSGGGGSGGGGSADKTHTCPPCPAPEAAGGPSVFLFPPKPKDTLMISRTPEVTCVVVDVSHEDPEVKFNWYVDGVEVHNAKTKPREEQYNSTYRVVSVLTVLHQDWLNGKEYKCKVSNKALPAPIEKTISKAKGQPREPQVYTLPPSRDELTKNQVSLTCLVKGFYPSDIAVEWESNGQPENNYKTTPPVLDSDGSFFLYSKLTVDKSRWQQGNVFSCSVMHEALHNHYTQKSLSLSPGGGGSGSAHPIPDSSPLLQFGGQVRQRYLYTDDACQTEAHLEIREDGTVGGAADQSPESLLQLKALKPGVIQILGVKTSRFLCQRPDGALYGSLHFDPEACSFRELLLEDGYNVYQSEAHGLPLHLPGCKSPHRDPAPRGPARFLPLPGLPPAPPEPPGILAPQPPDVGSSDPLSMVGSQGRSPSYAS

SEQ ID NO: 2632 - protein, 472 aa, Artificial Sequence
  Fusion Protein
HGEGTFTSDKSQLLEKRAAHLFIEWLIAGGHSSGRYPPKGGGGGGGSGGGGSGGGGSADKTHTCPPCPAPEAAGGPSVFLFPPKPKDTLMISRTPEVTCVVVDVSHEDPEVKFNWYVDGVEVHNAKTKPREEQYNSTYRVVSVLTVLHQDWLNGKEYKCKVSNKALPAPIEKTISKAKGQPREPQVYTLPPSRDELTKNQVSLTCLVKGFYPSDIAVEWESNGQPENNYKTTPPVLDSDGSFFLYSKLTVDKSRWQQGNVFSCSVMHEALHNHYTQKSLSLSPGGGGSGSAHPIPDSSPLLQFGGQVRQRYLYTDDACQTEAHLEIREDGTVGGAADQSPESLLQLKALKPGVIQILGVKTSRFLCQRPDGALYGSLHFDPEACSFRELLLEDGYNVYQSEAHGLPLHLPGCKSPHRDPAPRGPARFLPLPGLPPAPPEPPGILAPQPPDVGSSDPLSMVYPSQGRSPSYAS

SEQ ID NO: 2633 - protein, 471 aa, Artificial Sequence
  Fusion Protein
HGEGTFTSDKSQLLEKRAAHLFIEWLIAGGHSSGRYPPKGGGGGGGSGGGGSGGGGSADKTHTCPPCPAPEAAGGPSVFLFPPKPKDTLMISRTPEVTCVVVDVSHEDPEVKFNWYVDGVEVHNAKTKPREEQYNSTYRVVSVLTVLHQDWLNGKEYKCKVSNKALPAPIEKTISKAKGQPREPQVYTLPPSRDELTKNQVSLTCLVKGFYPSDIAVEWESNGQPENNYKTTPPVLDSDGSFFLYSKLTVDKSRWQQGNVFSCSVMHEALHNHYTQKSLSLSPGGGGSGSAHPIPDSSPLLQFGGQVRQRYLYTDDACQTEAHLEIREDGTVGGAADQSPESLLQLKALKPGVIQILGVKTSRFLCQRPDGALYGSLHFDPEACSFRELLLEDGYNVYQSEAHGLPLHLCGNKSPHRDPAPRGPARFLPLPGLPPAPPEPPGILAPQPPDVGSSDPLSMVGSQGRSPSYAS

SEQ ID NO: 2634 - protein, 472 aa, Artificial Sequence
  Fusion Protein
HGEGTFTSDKSQLLEKRAAHLFIEWLIAGGHSSGRYPPKGGGGGGGSGGGGSGGGGSADKTHTCPPCPAPEAAGGPSVFLFPPKPKDTLMISRTPEVTCVVVDVSHEDPEVKFNWYVDGVEVHNAKTKPREEQYNSTYRVVSVLTVLHQDWLNGKEYKCKVSNKALPAPIEKTISKAKGQPREPQVYTLPPSRDELTKNQVSLTCLVKGFYPSDIAVEWESNGQPENNYKTTPPVLDSDGSFFLYSKLTVDKSRWQQGNVFSCSVMHEALHNHYTQKSLSLSPGGGGSGSAHPIPDSSPLLQFGGQVRQRYLYTDDACQTEAHLEIREDGTVGGAADQSPESLLQLKALKPGVIQILGVKTSRFLCQRPDGALYGSLHFDPEACSFRELLLEDGYNVYQSEAHGLPLHLCGNKSPHRDPAPRGPARFLPLPGLPPAPPEPPGILAPQPPDVGSSDPLSMVYPSQGRSPSYAS

SEQ ID NO: 2635 - protein, 471 aa, Artificial Sequence
  Fusion Protein
HGEGTFTSDKSQLLEKRAAHLFIEWLIAGGHSSGRYPPKGGGGGGGSGGGGSGGGGSADKTHTCPPCPAPELLGGPSVFLFPPKPKDTLMISRTPEVTCVVVDVSHEDPEVKFNWYVDGVEVHNAKTKPREEQYNNASRVVSVLTVLHQDWLNGKEYKCKVSNKALPAPIEKTISKAKGQPREPQVYTLPPSRDELTKNQVSLTCLVKGFYPSDIAVEWESNGQPENNYKTTPPVLDSDGSFFLYSKLTVDKSRWQQGNVFSCSVMHEALHNHYTQKSLSLSPGGGGSGSAHPIPDSSPLLQFGGQVRQRYLYTDDACQTEAHLEIREDGTVGGAADQSPESLLQLKALKPGVIQILGVKTSRFLCQRPDGALYGSLHFDPEACSFRELLLEDGYNVYQSEAHGLPLHLPGCKSPHRDPAPRGPARFLPLPGLPPAPPEPPGILAPQPPDVGSSDPLSMVGSQGRSPSYAS

SEQ ID NO: 2636 - protein, 472 aa, Artificial Sequence
  Fusion Protein
HGEGTFTSDKSQLLEKRAAHLFIEWLIAGGHSSGRYPPKGGGGGGGSGGGGSGGGGSADKTHTCPPCPAPELLGGPSVFLFPPKPKDTLMISRTPEVTCVVVDVSHEDPEVKFNWYVDGVEVHNAKTKPREEQYNNASRVVSVLTVLHQDWLNGKEYKCKVSNKALPAPIEKTISKAKGQPREPQVYTLPPSRDELTKNQVSLTCLVKGFYPSDIAVEWESNGQPENNYKTTPPVLDSDGSFFLYSKLTVDKSRWQQGNVFSCSVMHEALHNHYTQKSLSLSPGGGGSGSAHPIPDSSPLLQFGGQVRQRYLYTDDACQTEAHLEIREDGTVGGAADQSPESLLQLKALKPGVIQILGVKTSRFLCQRPDGALYGSLHFDPEACSFRELLLEDGYNVYQSEAHGLPLHLPGCKSPHRDPAPRGPARFLPLPGLPPAPPEPPGILAPQPPDVGSSDPLSMVYPSQGRSPSYAS

SEQ ID NO: 2637 - protein, 471 aa, Artificial Sequence
  Fusion Protein
HGEGTFTSDKSQLLEKRAAHLFIEWLIAGGHSSGRYPPKGGGGGGGSGGGGSGGGGSADKTHTCPPCPAPELLGGPSVFLFPPKPKDTLMISRTPEVTCVVVDVSHEDPEVKFNWYVDGVEVHNAKTKPREEQYNNASRVVSVLTVLHQDWLNGKEYKCKVSNKALPAPIEKTISKAKGQPREPQVYTLPPSRDELTKNQVSLTCLVKGFYPSDIAVEWESNGQPENNYKTTPPVLDSDGSFFLYSKLTVDKSRWQQGNVFSCSVMHEALHNHYTQKSLSLSPGGGGSGSAHPIPDSSPLLQFGGQVRQRYLYTDDACQTEAHLEIREDGTVGGAADQSPESLLQLKALKPGVIQILGVKTSRFLCQRPDGALYGSLHFDPEACSFRELLLEDGYNVYQSEAHGLPLHLCGNKSPHRDPAPRGPARFLPLPGLPPAPPEPPGILAPQPPDVGSSDPLSMVGSQGRSPSYAS

SEQ ID NO: 2638 - protein, 472 aa, Artificial Sequence
  Fusion Protein
HGEGTFTSDKSQLLEKRAAHLFIEWLIAGGHSSGRYPPKGGGGGGGSGGGGSGGGGSADKTHTCPPCPAPELLGGPSVFLFPPKPKDTLMISRTPEVTCVVVDVSHEDPEVKFNWYVDGVEVHNAKTKPREEQYNNASRVVSVLTVLHQDWLNGKEYKCKVSNKALPAPIEKTISKAKGQPREPQVYTLPPSRDELTKNQVSLTCLVKGFYPSDIAVEWESNGQPENNYKTTPPVLDSDGSFFLYSKLTVDKSRWQQGNVFSCSVMHEALHNHYTQKSLSLSPGGGGSGSAHPIPDSSPLLQFGGQVRQRYLYTDDACQTEAHLEIREDGTVGGAADQSPESLLQLKALKPGVIQILGVKTSRFLCQRPDGALYGSLHFDPEACSFRELLLEDGYNVYQSEAHGLPLHLCGNKSPHRDPAPRGPARFLPLPGLPPAPPEPPGILAPQPPDVGSSDPLSMVYPSQGRSPSYAS

SEQ ID NO: 2639 - protein, 474 aa, Artificial Sequence
  Fusion Protein
HGEGTFTSDKSQLLEKRAAHLFIEWLIAGGHSSGRYPPKGGGGGGGSGGGGSGGGGSAESKYGPPCPPCPAPEFEGGPSVFLFPPKPKDTLMISRTPEVTCVVVDVSQEDPEVQFNWYVDGVEVHNAKTKPREEQFNSTYRVVSVLTVLHQDWLNGKEYKCKVSNKGLPSSIEKTISKAKGQPREPQVYTLPPSQEEMTKNQVSLTCLVKGFYPSDIAVEWESNGQPENNYKTTPPVLDSDGSFFLYSRLTVDKSRWQEGNVFSCSVMHEALHNHYTQKSLSLSLGGGGSGSAHPIPDSSPLLQFGGQVRQRYLYTDDACQTEAHLEIREDGTVGGAADQSPESLLQLKALKPGVIQILGVKTSRFLCQRPDGALYGSLHFDPEACSFRELLLEDGYNVYQSEAHGLPLHLPGCKSPHRDPAPRGPARFLPLPGLPPAPPEPPGILAPQPPDVGSSDPLSMVYPSQGRSPSYAS

SEQ ID NO: 2640 - protein, 473 aa, Artificial Sequence
  Fusion Protein
HGEGTFTSDKSQLLEKRAAHLFIEWLIAGGHSSGRYPPKGGGGGGGSGGGGSGGGGSAESKYGPPCPPCPAPEFEGGPSVFLFPPKPKDTLMISRTPEVTCVVVDVSQEDPEVQFNWYVDGVEVHNAKTKPREEQFNSTYRVVSVLTVLHQDWLNGKEYKCKVSNKGLPSSIEKTISKAKGQPREPQVYTLPPSQEEMTKNQVSLTCLVKGFYPSDIAVEWESNGQPENNYKTTPPVLDSDGSFFLYSRLTVDKSRWQEGNVFSCSVMHEALHNHYTQKSLSLSLGGGGSGSAHPIPDSSPLLQFGGQVRQRYLYTDDACQTEAHLEIREDGTVGGAADQSPESLLQLKALKPGVIQILGVKTSRFLCQRPDGALYGSLHFDPEACSFRELLLEDGYNVYQSEAHGLPLHLCGNKSPHRDPAPRGPARFLPLPGLPPAPPEPPGILAPQPPDVGSSDPLSMVGSQGRSPSYAS

SEQ ID NO: 2641 - protein, 474 aa, Artificial Sequence
  Fusion Protein
HGEGTFTSDKSQLLEKRAAHLFIEWLIAGGHSSGRYPPKGGGGGGGSGGGGSGGGGSAESKYGPPCPPCPAPEFEGGPSVFLFPPKPKDTLMISRTPEVTCVVVDVSQEDPEVQFNWYVDGVEVHNAKTKPREEQFNSTYRVVSVLTVLHQDWLNGKEYKCKVSNKGLPSSIEKTISKAKGQPREPQVYTLPPSQEEMTKNQVSLTCLVKGFYPSDIAVEWESNGQPENNYKTTPPVLDSDGSFFLYSRLTVDKSRWQEGNVFSCSVMHEALHNHYTQKSLSLSLGGGGSGSAHPIPDSSPLLQFGGQVRQRYLYTDDACQTEAHLEIREDGTVGGAADQSPESLLQLKALKPGVIQILGVKTSRFLCQRPDGALYGSLHFDPEACSFRELLLEDGYNVYQSEAHGLPLHLCGNKSPHRDPAPRGPARFLPLPGLPPAPPEPPGILAPQPPDVGSSDPLSMVYPSQGRSPSYAS

SEQ ID NO: 2642 - protein, 471 aa, Artificial Sequence
  Fusion Protein
HGEGTFTSDKSKLLEKRLAHLFIEWLIKGGHSKGKPPPKGGGGGGGSGGGGSGGGGSADKTHTCPPCPAPEAAGGPSVFLFPPKPKDTLMISRTPEVTCVVVDVSHEDPEVKFNWYVDGVEVHNAKTKPREEQYNSTYRVVSVLTVLHQDWLNGKEYKCKVSNKALPAPIEKTISKAKGQPREPQVYTLPPSRDELTKNQVSLTCLVKGFYPSDIAVEWESNGQPENNYKTTPPVLDSDGSFFLYSKLTVDKSRWQQGNVFSCSVMHEALHNHYTQKSLSLSPGGGGSGSAHPIPDSSPLLQFGGQVRQRYLYTDDACQTEAHLEIREDGTVGGAADQSPESLLQLKALKPGVIQILGVKTSRFLCQRPDGALYGSLHFDPEACSFRELLLEDGYNVYQSEAHGLPLHLPGCKSPHRDPAPRGPARFLPLPGLPPAPPEPPGILAPQPPDVGSSDPLSMVGSQGRSPSYAS

SEQ ID NO: 2643 - protein, 472 aa, Artificial Sequence
  Fusion Protein
HGEGTFTSDKSKLLEKRLAHLFIEWLIKGGHSKGKPPPKGGGGGGGSGGGGSGGGGSADKTHTCPPCPAPEAAGGPSVFLFPPKPKDTLMISRTPEVTCVVVDVSHEDPEVKFNWYVDGVEVHNAKTKPREEQYNSTYRVVSVLTVLHQDWLNGKEYKCKVSNKALPAPIEKTISKAKGQPREPQVYTLPPSRDELTKNQVSLTCLVKGFYPSDIAVEWESNGQPENNYKTTPPVLDSDGSFFLYSKLTVDKSRWQQGNVFSCSVMHEALHNHYTQKSLSLSPGGGGSGSAHPIPDSSPLLQFGGQVRQRYLYTDDACQTEAHLEIREDGTVGGAADQSPESLLQLKALKPGVIQILGVKTSRFLCQRPDGALYGSLHFDPEACSFRELLLEDGYNVYQSEAHGLPLHLPGCKSPHRDPAPRGPARFLPLPGLPPAPPEPPGILAPQPPDVGSSDPLSMVYPSQGRSPSYAS

SEQ ID NO: 2644 - protein, 471 aa, Artificial Sequence
  Fusion Protein
HGEGTFTSDKSKLLEKRLAHLFIEWLIKGGHSKGKPPPKGGGGGGGSGGGGSGGGGSADKTHTCPPCPAPEAAGGPSVFLFPPKPKDTLMISRTPEVTCVVVDVSHEDPEVKFNWYVDGVEVHNAKTKPREEQYNSTYRVVSVLTVLHQDWLNGKEYKCKVSNKALPAPIEKTISKAKGQPREPQVYTLPPSRDELTKNQVSLTCLVKGFYPSDIAVEWESNGQPENNYKTTPPVLDSDGSFFLYSKLTVDKSRWQQGNVFSCSVMHEALHNHYTQKSLSLSPGGGGSGSAHPIPDSSPLLQFGGQVRQRYLYTDDACQTEAHLEIREDGTVGGAADQSPESLLQLKALKPGVIQILGVKTSRFLCQRPDGALYGSLHFDPEACSFRELLLEDGYNVYQSEAHGLPLHLCGNKSPHRDPAPRGPARFLPLPGLPPAPPEPPGILAPQPPDVGSSDPLSMVGSQGRSPSYAS

SEQ ID NO: 2645 - protein, 472 aa, Artificial Sequence
  Fusion Protein
HGEGTFTSDKSKLLEKRLAHLFIEWLIKGGHSKGKPPPKGGGGGGGSGGGGSGGGGSADKTHTCPPCPAPEAAGGPSVFLFPPKPKDTLMISRTPEVTCVVVDVSHEDPEVKFNWYVDGVEVHNAKTKPREEQYNSTYRVVSVLTVLHQDWLNGKEYKCKVSNKALPAPIEKTISKAKGQPREPQVYTLPPSRDELTKNQVSLTCLVKGFYPSDIAVEWESNGQPENNYKTTPPVLDSDGSFFLYSKLTVDKSRWQQGNVFSCSVMHEALHNHYTQKSLSLSPGGGGSGSAHPIPDSSPLLQFGGQVRQRYLYTDDACQTEAHLEIREDGTVGGAADQSPESLLQLKALKPGVIQILGVKTSRFLCQRPDGALYGSLHFDPEACSFRELLLEDGYNVYQSEAHGLPLHLCGNKSPHRDPAPRGPARFLPLPGLPPAPPEPPGILAPQPPDVGSSDPLSMVYPSQGRSPSYAS

SEQ ID NO: 2646 - protein, 471 aa, Artificial Sequence
  Fusion Protein
HGEGTFTSDKSKLLEKRLAHLFIEWLIKGGHSKGKPPPKGGGGGGGSGGGGSGGGGSADKTHTCPPCPAPELLGGPSVFLFPPKPKDTLMISRTPEVTCVVVDVSHEDPEVKFNWYVDGVEVHNAKTKPREEQYNNASRVVSVLTVLHQDWLNGKEYKCKVSNKALPAPIEKTISKAKGQPREPQVYTLPPSRDELTKNQVSLTCLVKGFYPSDIAVEWESNGQPENNYKTTPPVLDSDGSFFLYSKLTVDKSRWQQGNVFSCSVMHEALHNHYTQKSLSLSPGGGGSGSAHPIPDSSPLLQFGGQVRQRYLYTDDACQTEAHLEIREDGTVGGAADQSPESLLQLKALKPGVIQILGVKTSRFLCQRPDGALYGSLHFDPEACSFRELLLEDGYNVYQSEAHGLPLHLPGCKSPHRDPAPRGPARFLPLPGLPPAPPEPPGILAPQPPDVGSSDPLSMVGSQGRSPSYAS

SEQ ID NO: 2647 - protein, 472 aa, Artificial Sequence
  Fusion Protein
HGEGTFTSDKSKLLEKRLAHLFIEWLIKGGHSKGKPPPKGGGGGGGSGGGGSGGGGSADKTHTCPPCPAPELLGGPSVFLFPPKPKDTLMISRTPEVTCVVVDVSHEDPEVKFNWYVDGVEVHNAKTKPREEQYNNASRVVSVLTVLHQDWLNGKEYKCKVSNKALPAPIEKTISKAKGQPREPQVYTLPPSRDELTKNQVSLTCLVKGFYPSDIAVEWESNGQPENNYKTTPPVLDSDGSFFLYSKLTVDKSRWQQGNVFSCSVMHEALHNHYTQKSLSLSPGGGGSGSAHPIPDSSPLLQFGGQVRQRYLYTDDACQTEAHLEIREDGTVGGAADQSPESLLQLKALKPGVIQILGVKTSRFLCQRPDGALYGSLHFDPEACSFRELLLEDGYNVYQSEAHGLPLHLPGCKSPHRDPAPRGPARFLPLPGLPPAPPEPPGILAPQPPDVGSSDPLSMVYPSQGRSPSYAS

SEQ ID NO: 2648 - protein, 471 aa, Artificial Sequence
  Fusion Protein
HGEGTFTSDKSKLLEKRLAHLFIEWLIKGGHSKGKPPPKGGGGGGGSGGGGSGGGGSADKTHTCPPCPAPELLGGPSVFLFPPKPKDTLMISRTPEVTCVVVDVSHEDPEVKFNWYVDGVEVHNAKTKPREEQYNNASRVVSVLTVLHQDWLNGKEYKCKVSNKALPAPIEKTISKAKGQPREPQVYTLPPSRDELTKNQVSLTCLVKGFYPSDIAVEWESNGQPENNYKTTPPVLDSDGSFFLYSKLTVDKSRWQQGNVFSCSVMHEALHNHYTQKSLSLSPGGGGSGSAHPIPDSSPLLQFGGQVRQRYLYTDDACQTEAHLEIREDGTVGGAADQSPESLLQLKALKPGVIQILGVKTSRFLCQRPDGALYGSLHFDPEACSFRELLLEDGYNVYQSEAHGLPLHLCGNKSPHRDPAPRGPARFLPLPGLPPAPPEPPGILAPQPPDVGSSDPLSMVGSQGRSPSYAS

SEQ ID NO: 2649 - protein, 472 aa, Artificial Sequence
  Fusion Protein
HGEGTFTSDKSKLLEKRLAHLFIEWLIKGGHSKGKPPPKGGGGGGGSGGGGSGGGGSADKTHTCPPCPAPELLGGPSVFLFPPKPKDTLMISRTPEVTCVVVDVSHEDPEVKFNWYVDGVEVHNAKTKPREEQYNNASRVVSVLTVLHQDWLNGKEYKCKVSNKALPAPIEKTISKAKGQPREPQVYTLPPSRDELTKNQVSLTCLVKGFYPSDIAVEWESNGQPENNYKTTPPVLDSDGSFFLYSKLTVDKSRWQQGNVFSCSVMHEALHNHYTQKSLSLSPGGGGSGSAHPIPDSSPLLQFGGQVRQRYLYTDDACQTEAHLEIREDGTVGGAADQSPESLLQLKALKPGVIQILGVKTSRFLCQRPDGALYGSLHFDPEACSFRELLLEDGYNVYQSEAHGLPLHLCGNKSPHRDPAPRGPARFLPLPGLPPAPPEPPGILAPQPPDVGSSDPLSMVYPSQGRSPSYAS

SEQ ID NO: 2650 - protein, 473 aa, Artificial Sequence
  Fusion Protein
HGEGTFTSDKSKLLEKRLAHLFIEWLIKGGHSKGKPPPKGGGGGGGSGGGGSGGGGSAESKYGPPCPPCPAPEFEGGPSVFLFPPKPKDTLMISRTPEVTCVVVDVSQEDPEVQFNWYVDGVEVHNAKTKPREEQFNSTYRVVSVLTVLHQDWLNGKEYKCKVSNKGLPSSIEKTISKAKGQPREPQVYTLPPSQEEMTKNQVSLTCLVKGFYPSDIAVEWESNGQPENNYKTTPPVLDSDGSFFLYSRLTVDKSRWQEGNVFSCSVMHEALHNHYTQKSLSLSLGGGGSGSAHPIPDSSPLLQFGGQVRQRYLYTDDACQTEAHLEIREDGTVGGAADQSPESLLQLKALKPGVIQILGVKTSRFLCQRPDGALYGSLHFDPEACSFRELLLEDGYNVYQSEAHGLPLHLPGCKSPHRDPAPRGPARFLPLPGLPPAPPEPPGILAPQPPDVGSSDPLSMVGSQGRSPSYAS

SEQ ID NO: 2651 - protein, 474 aa, Artificial Sequence
  Fusion Protein
HGEGTFTSDKSKLLEKRLAHLFIEWLIKGGHSKGKPPPKGGGGGGGSGGGGSGGGGSAESKYGPPCPPCPAPEFEGGPSVFLFPPKPKDTLMISRTPEVTCVVVDVSQEDPEVQFNWYVDGVEVHNAKTKPREEQFNSTYRVVSVLTVLHQDWLNGKEYKCKVSNKGLPSSIEKTISKAKGQPREPQVYTLPPSQEEMTKNQVSLTCLVKGFYPSDIAVEWESNGQPENNYKTTPPVLDSDGSFFLYSRLTVDKSRWQEGNVFSCSVMHEALHNHYTQKSLSLSLGGGGSGSAHPIPDSSPLLQFGGQVRQRYLYTDDACQTEAHLEIREDGTVGGAADQSPESLLQLKALKPGVIQILGVKTSRFLCQRPDGALYGSLHFDPEACSFRELLLEDGYNVYQSEAHGLPLHLPGCKSPHRDPAPRGPARFLPLPGLPPAPPEPPGILAPQPPDVGSSDPLSMVYPSQGRSPSYAS

SEQ ID NO: 2652 - protein, 473 aa, Artificial Sequence
  Fusion Protein
HGEGTFTSDKSKLLEKRLAHLFIEWLIKGGHSKGKPPPKGGGGGGGSGGGGSGGGGSAESKYGPPCPPCPAPEFEGGPSVFLFPPKPKDTLMISRTPEVTCVVVDVSQEDPEVQFNWYVDGVEVHNAKTKPREEQFNSTYRVVSVLTVLHQDWLNGKEYKCKVSNKGLPSSIEKTISKAKGQPREPQVYTLPPSQEEMTKNQVSLTCLVKGFYPSDIAVEWESNGQPENNYKTTPPVLDSDGSFFLYSRLTVDKSRWQEGNVFSCSVMHEALHNHYTQKSLSLSLGGGGSGSAHPIPDSSPLLQFGGQVRQRYLYTDDACQTEAHLEIREDGTVGGAADQSPESLLQLKALKPGVIQILGVKTSRFLCQRPDGALYGSLHFDPEACSFRELLLEDGYNVYQSEAHGLPLHLCGNKSPHRDPAPRGPARFLPLPGLPPAPPEPPGILAPQPPDVGSSDPLSMVGSQGRSPSYAS

SEQ ID NO: 2653 - protein, 474 aa, Artificial Sequence
  Fusion Protein
HGEGTFTSDKSKLLEKRLAHLFIEWLIKGGHSKGKPPPKGGGGGGGSGGGGSGGGGSAESKYGPPCPPCPAPEFEGGPSVFLFPPKPKDTLMISRTPEVTCVVVDVSQEDPEVQFNWYVDGVEVHNAKTKPREEQFNSTYRVVSVLTVLHQDWLNGKEYKCKVSNKGLPSSIEKTISKAKGQPREPQVYTLPPSQEEMTKNQVSLTCLVKGFYPSDIAVEWESNGQPENNYKTTPPVLDSDGSFFLYSRLTVDKSRWQEGNVFSCSVMHEALHNHYTQKSLSLSLGGGGSGSAHPIPDSSPLLQFGGQVRQRYLYTDDACQTEAHLEIREDGTVGGAADQSPESLLQLKALKPGVIQILGVKTSRFLCQRPDGALYGSLHFDPEACSFRELLLEDGYNVYQSEAHGLPLHLCGNKSPHRDPAPRGPARFLPLPGLPPAPPEPPGILAPQPPDVGSSDPLSMVYPSQGRSPSYAS

SEQ ID NO: 2654 - protein, 469 aa, Artificial Sequence
  Fusion Protein
HGEGTFTSDKSKQLAEEAVQLFIEWLLAGGPKKIRYSGGGGGGGSGGGGSGGGGSADKTHTCPPCPAPEAAGGPSVFLFPPKPKDTLMISRTPEVTCVVVDVSHEDPEVKFNWYVDGVEVHNAKTKPREEQYNSTYRVVSVLTVLHQDWLNGKEYKCKVSNKALPAPIEKTISKAKGQPREPQVYTLPPSRDELTKNQVSLTCLVKGFYPSDIAVEWESNGQPENNYKTTPPVLDSDGSFFLYSKLTVDKSRWQQGNVFSCSVMHEALHNHYTQKSLSLSPGGGGSGSAHPIPDSSPLLQFGGQVRQRYLYTDDACQTEAHLEIREDGTVGGAADQSPESLLQLKALKPGVIQILGVKTSRFLCQRPDGALYGSLHFDPEACSFRELLLEDGYNVYQSEAHGLPLHLPGCKSPHRDPAPRGPARFLPLPGLPPAPPEPPGILAPQPPDVGSSDPLSMVGSQGRSPSYAS

SEQ ID NO: 2655 - protein, 470 aa, Artificial Sequence
  Fusion Protein
HGEGTFTSDKSKQLAEEAVQLFIEWLLAGGPKKIRYSGGGGGGGSGGGGSGGGGSADKTHTCPPCPAPEAAGGPSVFLFPPKPKDTLMISRTPEVTCVVVDVSHEDPEVKFNWYVDGVEVHNAKTKPREEQYNSTYRVVSVLTVLHQDWLNGKEYKCKVSNKALPAPIEKTISKAKGQPREPQVYTLPPSRDELTKNQVSLTCLVKGFYPSDIAVEWESNGQPENNYKTTPPVLDSDGSFFLYSKLTVDKSRWQQGNVFSCSVMHEALHNHYTQKSLSLSPGGGGSGSAHPIPDSSPLLQFGGQVRQRYLYTDDACQTEAHLEIREDGTVGGAADQSPESLLQLKALKPGVIQILGVKTSRFLCQRPDGALYGSLHFDPEACSFRELLLEDGYNVYQSEAHGLPLHLPGCKSPHRDPAPRGPARFLPLPGLPPAPPEPPGILAPQPPDVGSSDPLSMVYPSQGRSPSYAS

SEQ ID NO: 2656 - protein, 469 aa, Artificial Sequence
  Fusion Protein
HGEGTFTSDKSKQLAEEAVQLFIEWLLAGGPKKIRYSGGGGGGGSGGGGSGGGGSADKTHTCPPCPAPEAAGGPSVFLFPPKPKDTLMISRTPEVTCVVVDVSHEDPEVKFNWYVDGVEVHNAKTKPREEQYNSTYRVVSVLTVLHQDWLNGKEYKCKVSNKALPAPIEKTISKAKGQPREPQVYTLPPSRDELTKNQVSLTCLVKGFYPSDIAVEWESNGQPENNYKTTPPVLDSDGSFFLYSKLTVDKSRWQQGNVFSCSVMHEALHNHYTQKSLSLSPGGGGSGSAHPIPDSSPLLQFGGQVRQRYLYTDDACQTEAHLEIREDGTVGGAADQSPESLLQLKALKPGVIQILGVKTSRFLCQRPDGALYGSLHFDPEACSFRELLLEDGYNVYQSEAHGLPLHLCGNKSPHRDPAPRGPARFLPLPGLPPAPPEPPGILAPQPPDVGSSDPLSMVGSQGRSPSYAS

SEQ ID NO: 2657 - protein, 470 aa, Artificial Sequence
  Fusion Protein
HGEGTFTSDKSKQLAEEAVQLFIEWLLAGGPKKIRYSGGGGGGGSGGGGSGGGGSADKTHTCPPCPAPEAAGGPSVFLFPPKPKDTLMISRTPEVTCVVVDVSHEDPEVKFNWYVDGVEVHNAKTKPREEQYNSTYRVVSVLTVLHQDWLNGKEYKCKVSNKALPAPIEKTISKAKGQPREPQVYTLPPSRDELTKNQVSLTCLVKGFYPSDIAVEWESNGQPENNYKTTPPVLDSDGSFFLYSKLTVDKSRWQQGNVFSCSVMHEALHNHYTQKSLSLSPGGGGSGSAHPIPDSSPLLQFGGQVRQRYLYTDDACQTEAHLEIREDGTVGGAADQSPESLLQLKALKPGVIQILGVKTSRFLCQRPDGALYGSLHFDPEACSFRELLLEDGYNVYQSEAHGLPLHLCGNKSPHRDPAPRGPARFLPLPGLPPAPPEPPGILAPQPPDVGSSDPLSMVYPSQGRSPSYAS

SEQ ID NO: 2658 - protein, 469 aa, Artificial Sequence
  Fusion Protein
HGEGTFTSDKSKQLAEEAVQLFIEWLLAGGPKKIRYSGGGGGGGSGGGGSGGGGSADKTHTCPPCPAPELLGGPSVFLFPPKPKDTLMISRTPEVTCVVVDVSHEDPEVKFNWYVDGVEVHNAKTKPREEQYNNASRVVSVLTVLHQDWLNGKEYKCKVSNKALPAPIEKTISKAKGQPREPQVYTLPPSRDELTKNQVSLTCLVKGFYPSDIAVEWESNGQPENNYKTTPPVLDSDGSFFLYSKLTVDKSRWQQGNVFSCSVMHEALHNHYTQKSLSLSPGGGGSGSAHPIPDSSPLLQFGGQVRQRYLYTDDACQTEAHLEIREDGTVGGAADQSPESLLQLKALKPGVIQILGVKTSRFLCQRPDGALYGSLHFDPEACSFRELLLEDGYNVYQSEAHGLPLHLPGCKSPHRDPAPRGPARFLPLPGLPPAPPEPPGILAPQPPDVGSSDPLSMVGSQGRSPSYAS

SEQ ID NO: 2659 - protein, 470 aa, Artificial Sequence
  Fusion Protein
HGEGTFTSDKSKQLAEEAVQLFIEWLLAGGPKKIRYSGGGGGGGSGGGGSGGGGSADKTHTCPPCPAPELLGGPSVFLFPPKPKDTLMISRTPEVTCVVVDVSHEDPEVKFNWYVDGVEVHNAKTKPREEQYNNASRVVSVLTVLHQDWLNGKEYKCKVSNKALPAPIEKTISKAKGQPREPQVYTLPPSRDELTKNQVSLTCLVKGFYPSDIAVEWESNGQPENNYKTTPPVLDSDGSFFLYSKLTVDKSRWQQGNVFSCSVMHEALHNHYTQKSLSLSPGGGGSGSAHPIPDSSPLLQFGGQVRQRYLYTDDACQTEAHLEIREDGTVGGAADQSPESLLQLKALKPGVIQILGVKTSRFLCQRPDGALYGSLHFDPEACSFRELLLEDGYNVYQSEAHGLPLHLPGCKSPHRDPAPRGPARFLPLPGLPPAPPEPPGILAPQPPDVGSSDPLSMVYPSQGRSPSYAS

SEQ ID NO: 2660 - protein, 469 aa, Artificial Sequence
  Fusion Protein
HGEGTFTSDKSKQLAEEAVQLFIEWLLAGGPKKIRYSGGGGGGGSGGGGSGGGGSADKTHTCPPCPAPELLGGPSVFLFPPKPKDTLMISRTPEVTCVVVDVSHEDPEVKFNWYVDGVEVHNAKTKPREEQYNNASRVVSVLTVLHQDWLNGKEYKCKVSNKALPAPIEKTISKAKGQPREPQVYTLPPSRDELTKNQVSLTCLVKGFYPSDIAVEWESNGQPENNYKTTPPVLDSDGSFFLYSKLTVDKSRWQQGNVFSCSVMHEALHNHYTQKSLSLSPGGGGSGSAHPIPDSSPLLQFGGQVRQRYLYTDDACQTEAHLEIREDGTVGGAADQSPESLLQLKALKPGVIQILGVKTSRFLCQRPDGALYGSLHFDPEACSFRELLLEDGYNVYQSEAHGLPLHLCGNKSPHRDPAPRGPARFLPLPGLPPAPPEPPGILAPQPPDVGSSDPLSMVGSQGRSPSYAS

SEQ ID NO: 2661 - protein, 470 aa, Artificial Sequence
  Fusion Protein
HGEGTFTSDKSKQLAEEAVQLFIEWLLAGGPKKIRYSGGGGGGGSGGGGSGGGGSADKTHTCPPCPAPELLGGPSVFLFPPKPKDTLMISRTPEVTCVVVDVSHEDPEVKFNWYVDGVEVHNAKTKPREEQYNNASRVVSVLTVLHQDWLNGKEYKCKVSNKALPAPIEKTISKAKGQPREPQVYTLPPSRDELTKNQVSLTCLVKGFYPSDIAVEWESNGQPENNYKTTPPVLDSDGSFFLYSKLTVDKSRWQQGNVFSCSVMHEALHNHYTQKSLSLSPGGGGSGSAHPIPDSSPLLQFGGQVRQRYLYTDDACQTEAHLEIREDGTVGGAADQSPESLLQLKALKPGVIQILGVKTSRFLCQRPDGALYGSLHFDPEACSFRELLLEDGYNVYQSEAHGLPLHLCGNKSPHRDPAPRGPARFLPLPGLPPAPPEPPGILAPQPPDVGSSDPLSMVYPSQGRSPSYAS

SEQ ID NO: 2662 - protein, 471 aa, Artificial Sequence
  Fusion Protein
HGEGTFTSDKSKQLAEEAVQLFIEWLLAGGPKKIRYSGGGGGGGSGGGGSGGGGSAESKYGPPCPPCPAPEFEGGPSVFLFPPKPKDTLMISRTPEVTCVVVDVSQEDPEVQFNWYVDGVEVHNAKTKPREEQFNSTYRVVSVLTVLHQDWLNGKEYKCKVSNKGLPSSIEKTISKAKGQPREPQVYTLPPSQEEMTKNQVSLTCLVKGFYPSDIAVEWESNGQPENNYKTTPPVLDSDGSFFLYSRLTVDKSRWQEGNVFSCSVMHEALHNHYTQKSLSLSLGGGGSGSAHPIPDSSPLLQFGGQVRQRYLYTDDACQTEAHLEIREDGTVGGAADQSPESLLQLKALKPGVIQILGVKTSRFLCQRPDGALYGSLHFDPEACSFRELLLEDGYNVYQSEAHGLPLHLPGCKSPHRDPAPRGPARFLPLPGLPPAPPEPPGILAPQPPDVGSSDPLSMVGSQGRSPSYAS

SEQ ID NO: 2663 - protein, 472 aa, Artificial Sequence
  Fusion Protein
HGEGTFTSDKSKQLAEEAVQLFIEWLLAGGPKKIRYSGGGGGGGSGGGGSGGGGSAESKYGPPCPPCPAPEFEGGPSVFLFPPKPKDTLMISRTPEVTCVVVDVSQEDPEVQFNWYVDGVEVHNAKTKPREEQFNSTYRVVSVLTVLHQDWLNGKEYKCKVSNKGLPSSIEKTISKAKGQPREPQVYTLPPSQEEMTKNQVSLTCLVKGFYPSDIAVEWESNGQPENNYKTTPPVLDSDGSFFLYSRLTVDKSRWQEGNVFSCSVMHEALHNHYTQKSLSLSLGGGGSGSAHPIPDSSPLLQFGGQVRQRYLYTDDACQTEAHLEIREDGTVGGAADQSPESLLQLKALKPGVIQILGVKTSRFLCQRPDGALYGSLHFDPEACSFRELLLEDGYNVYQSEAHGLPLHLPGCKSPHRDPAPRGPARFLPLPGLPPAPPEPPGILAPQPPDVGSSDPLSMVYPSQGRSPSYAS

SEQ ID NO: 2664 - protein, 471 aa, Artificial Sequence
  Fusion Protein
HGEGTFTSDKSKQLAEEAVQLFIEWLLAGGPKKIRYSGGGGGGGSGGGGSGGGGSAESKYGPPCPPCPAPEFEGGPSVFLFPPKPKDTLMISRTPEVTCVVVDVSQEDPEVQFNWYVDGVEVHNAKTKPREEQFNSTYRVVSVLTVLHQDWLNGKEYKCKVSNKGLPSSIEKTISKAKGQPREPQVYTLPPSQEEMTKNQVSLTCLVKGFYPSDIAVEWESNGQPENNYKTTPPVLDSDGSFFLYSRLTVDKSRWQEGNVFSCSVMHEALHNHYTQKSLSLSLGGGGSGSAHPIPDSSPLLQFGGQVRQRYLYTDDACQTEAHLEIREDGTVGGAADQSPESLLQLKALKPGVIQILGVKTSRFLCQRPDGALYGSLHFDPEACSFRELLLEDGYNVYQSEAHGLPLHLCGNKSPHRDPAPRGPARFLPLPGLPPAPPEPPGILAPQPPDVGSSDPLSMVGSQGRSPSYAS

SEQ ID NO: 2665 - protein, 472 aa, Artificial Sequence
  Fusion Protein
HGEGTFTSDKSKQLAEEAVQLFIEWLLAGGPKKIRYSGGGGGGGSGGGGSGGGGSAESKYGPPCPPCPAPEFEGGPSVFLFPPKPKDTLMISRTPEVTCVVVDVSQEDPEVQFNWYVDGVEVHNAKTKPREEQFNSTYRVVSVLTVLHQDWLNGKEYKCKVSNKGLPSSIEKTISKAKGQPREPQVYTLPPSQEEMTKNQVSLTCLVKGFYPSDIAVEWESNGQPENNYKTTPPVLDSDGSFFLYSRLTVDKSRWQEGNVFSCSVMHEALHNHYTQKSLSLSLGGGGSGSAHPIPDSSPLLQFGGQVRQRYLYTDDACQTEAHLEIREDGTVGGAADQSPESLLQLKALKPGVIQILGVKTSRFLCQRPDGALYGSLHFDPEACSFRELLLEDGYNVYQSEAHGLPLHLCGNKSPHRDPAPRGPARFLPLPGLPPAPPEPPGILAPQPPDVGSSDPLSMVYPSQGRSPSYAS

SEQ ID NO: 2666 - protein, 471 aa, Artificial Sequence
  Fusion Protein
HGEGTFTSDKSILLAKRLVRLFIEWLIAGGHSSGKPPPKGGGGGGGSGGGGSGGGGSADKTHTCPPCPAPEAAGGPSVFLFPPKPKDTLMISRTPEVTCVVVDVSHEDPEVKFNWYVDGVEVHNAKTKPREEQYNSTYRVVSVLTVLHQDWLNGKEYKCKVSNKALPAPIEKTISKAKGQPREPQVYTLPPSRDELTKNQVSLTCLVKGFYPSDIAVEWESNGQPENNYKTTPPVLDSDGSFFLYSKLTVDKSRWQQGNVFSCSVMHEALHNHYTQKSLSLSPGGGGSGSAHPIPDSSPLLQFGGQVRQRYLYTDDACQTEAHLEIREDGTVGGAADQSPESLLQLKALKPGVIQILGVKTSRFLCQRPDGALYGSLHFDPEACSFRELLLEDGYNVYQSEAHGLPLHLPGCKSPHRDPAPRGPARFLPLPGLPPAPPEPPGILAPQPPDVGSSDPLSMVGSQGRSPSYAS

SEQ ID NO: 2667 - protein, 472 aa, Artificial Sequence
  Fusion Protein
HGEGTFTSDKSILLAKRLVRLFIEWLIAGGHSSGKPPPKGGGGGGGSGGGGSGGGGSADKTHTCPPCPAPEAAGGPSVFLFPPKPKDTLMISRTPEVTCVVVDVSHEDPEVKFNWYVDGVEVHNAKTKPREEQYNSTYRVVSVLTVLHQDWLNGKEYKCKVSNKALPAPIEKTISKAKGQPREPQVYTLPPSRDELTKNQVSLTCLVKGFYPSDIAVEWESNGQPENNYKTTPPVLDSDGSFFLYSKLTVDKSRWQQGNVFSCSVMHEALHNHYTQKSLSLSPGGGGSGSAHPIPDSSPLLQFGGQVRQRYLYTDDACQTEAHLEIREDGTVGGAADQSPESLLQLKALKPGVIQILGVKTSRFLCQRPDGALYGSLHFDPEACSFRELLLEDGYNVYQSEAHGLPLHLPGCKSPHRDPAPRGPARFLPLPGLPPAPPEPPGILAPQPPDVGSSDPLSMVYPSQGRSPSYAS

SEQ ID NO: 2668 - protein, 471 aa, Artificial Sequence
  Fusion Protein
HGEGTFTSDKSILLAKRLVRLFIEWLIAGGHSSGKPPPKGGGGGGGSGGGGSGGGGSADKTHTCPPCPAPEAAGGPSVFLFPPKPKDTLMISRTPEVTCVVVDVSHEDPEVKFNWYVDGVEVHNAKTKPREEQYNSTYRVVSVLTVLHQDWLNGKEYKCKVSNKALPAPIEKTISKAKGQPREPQVYTLPPSRDELTKNQVSLTCLVKGFYPSDIAVEWESNGQPENNYKTTPPVLDSDGSFFLYSKLTVDKSRWQQGNVFSCSVMHEALHNHYTQKSLSLSPGGGGSGSAHPIPDSSPLLQFGGQVRQRYLYTDDACQTEAHLEIREDGTVGGAADQSPESLLQLKALKPGVIQILGVKTSRFLCQRPDGALYGSLHFDPEACSFRELLLEDGYNVYQSEAHGLPLHLCGNKSPHRDPAPRGPARFLPLPGLPPAPPEPPGILAPQPPDVGSSDPLSMVGSQGRSPSYAS

SEQ ID NO: 2669 - protein, 472 aa, Artificial Sequence
  Fusion Protein
HGEGTFTSDKSILLAKRLVRLFIEWLIAGGHSSGKPPPKGGGGGGGSGGGGSGGGGSADKTHTCPPCPAPEAAGGPSVFLFPPKPKDTLMISRTPEVTCVVVDVSHEDPEVKFNWYVDGVEVHNAKTKPREEQYNSTYRVVSVLTVLHQDWLNGKEYKCKVSNKALPAPIEKTISKAKGQPREPQVYTLPPSRDELTKNQVSLTCLVKGFYPSDIAVEWESNGQPENNYKTTPPVLDSDGSFFLYSKLTVDKSRWQQGNVFSCSVMHEALHNHYTQKSLSLSPGGGGSGSAHPIPDSSPLLQFGGQVRQRYLYTDDACQTEAHLEIREDGTVGGAADQSPESLLQLKALKPGVIQILGVKTSRFLCQRPDGALYGSLHFDPEACSFRELLLEDGYNVYQSEAHGLPLHLCGNKSPHRDPAPRGPARFLPLPGLPPAPPEPPGILAPQPPDVGSSDPLSMVYPSQGRSPSYAS

SEQ ID NO: 2670 - protein, 471 aa, Artificial Sequence
  Fusion Protein
HGEGTFTSDKSILLAKRLVRLFIEWLIAGGHSSGKPPPKGGGGGGGSGGGGSGGGGSADKTHTCPPCPAPELLGGPSVFLFPPKPKDTLMISRTPEVTCVVVDVSHEDPEVKFNWYVDGVEVHNAKTKPREEQYNNASRVVSVLTVLHQDWLNGKEYKCKVSNKALPAPIEKTISKAKGQPREPQVYTLPPSRDELTKNQVSLTCLVKGFYPSDIAVEWESNGQPENNYKTTPPVLDSDGSFFLYSKLTVDKSRWQQGNVFSCSVMHEALHNHYTQKSLSLSPGGGGSGSAHPIPDSSPLLQFGGQVRQRYLYTDDACQTEAHLEIREDGTVGGAADQSPESLLQLKALKPGVIQILGVKTSRFLCQRPDGALYGSLHFDPEACSFRELLLEDGYNVYQSEAHGLPLHLPGCKSPHRDPAPRGPARFLPLPGLPPAPPEPPGILAPQPPDVGSSDPLSMVGSQGRSPSYAS

SEQ ID NO: 2671 - protein, 472 aa, Artificial Sequence
  Fusion Protein
HGEGTFTSDKSILLAKRLVRLFIEWLIAGGHSSGKPPPKGGGGGGGSGGGGSGGGGSADKTHTCPPCPAPELLGGPSVFLFPPKPKDTLMISRTPEVTCVVVDVSHEDPEVKFNWYVDGVEVHNAKTKPREEQYNNASRVVSVLTVLHQDWLNGKEYKCKVSNKALPAPIEKTISKAKGQPREPQVYTLPPSRDELTKNQVSLTCLVKGFYPSDIAVEWESNGQPENNYKTTPPVLDSDGSFFLYSKLTVDKSRWQQGNVFSCSVMHEALHNHYTQKSLSLSPGGGGSGSAHPIPDSSPLLQFGGQVRQRYLYTDDACQTEAHLEIREDGTVGGAADQSPESLLQLKALKPGVIQILGVKTSRFLCQRPDGALYGSLHFDPEACSFRELLLEDGYNVYQSEAHGLPLHLPGCKSPHRDPAPRGPARFLPLPGLPPAPPEPPGILAPQPPDVGSSDPLSMVYPSQGRSPSYAS

SEQ ID NO: 2672 - protein, 471 aa, Artificial Sequence
  Fusion Protein
HGEGTFTSDKSILLAKRLVRLFIEWLIAGGHSSGKPPPKGGGGGGGSGGGGSGGGGSADKTHTCPPCPAPELLGGPSVFLFPPKPKDTLMISRTPEVTCVVVDVSHEDPEVKFNWYVDGVEVHNAKTKPREEQYNNASRVVSVLTVLHQDWLNGKEYKCKVSNKALPAPIEKTISKAKGQPREPQVYTLPPSRDELTKNQVSLTCLVKGFYPSDIAVEWESNGQPENNYKTTPPVLDSDGSFFLYSKLTVDKSRWQQGNVFSCSVMHEALHNHYTQKSLSLSPGGGGSGSAHPIPDSSPLLQFGGQVRQRYLYTDDACQTEAHLEIREDGTVGGAADQSPESLLQLKALKPGVIQILGVKTSRFLCQRPDGALYGSLHFDPEACSFRELLLEDGYNVYQSEAHGLPLHLCGNKSPHRDPAPRGPARFLPLPGLPPAPPEPPGILAPQPPDVGSSDPLSMVGSQGRSPSYAS

SEQ ID NO: 2673 - protein, 472 aa, Artificial Sequence
  Fusion Protein
HGEGTFTSDKSILLAKRLVRLFIEWLIAGGHSSGKPPPKGGGGGGGSGGGGSGGGGSADKTHTCPPCPAPELLGGPSVFLFPPKPKDTLMISRTPEVTCVVVDVSHEDPEVKFNWYVDGVEVHNAKTKPREEQYNNASRVVSVLTVLHQDWLNGKEYKCKVSNKALPAPIEKTISKAKGQPREPQVYTLPPSRDELTKNQVSLTCLVKGFYPSDIAVEWESNGQPENNYKTTPPVLDSDGSFFLYSKLTVDKSRWQQGNVFSCSVMHEALHNHYTQKSLSLSPGGGGSGSAHPIPDSSPLLQFGGQVRQRYLYTDDACQTEAHLEIREDGTVGGAADQSPESLLQLKALKPGVIQILGVKTSRFLCQRPDGALYGSLHFDPEACSFRELLLEDGYNVYQSEAHGLPLHLCGNKSPHRDPAPRGPARFLPLPGLPPAPPEPPGILAPQPPDVGSSDPLSMVYPSQGRSPSYAS

SEQ ID NO: 2674 - protein, 473 aa, Artificial Sequence
  Fusion Protein
HGEGTFTSDKSILLAKRLVRLFIEWLIAGGHSSGKPPPKGGGGGGGSGGGGSGGGGSAESKYGPPCPPCPAPEFEGGPSVFLFPPKPKDTLMISRTPEVTCVVVDVSQEDPEVQFNWYVDGVEVHNAKTKPREEQFNSTYRVVSVLTVLHQDWLNGKEYKCKVSNKGLPSSIEKTISKAKGQPREPQVYTLPPSQEEMTKNQVSLTCLVKGFYPSDIAVEWESNGQPENNYKTTPPVLDSDGSFFLYSRLTVDKSRWQEGNVFSCSVMHEALHNHYTQKSLSLSLGGGGSGSAHPIPDSSPLLQFGGQVRQRYLYTDDACQTEAHLEIREDGTVGGAADQSPESLLQLKALKPGVIQILGVKTSRFLCQRPDGALYGSLHFDPEACSFRELLLEDGYNVYQSEAHGLPLHLPGCKSPHRDPAPRGPARFLPLPGLPPAPPEPPGILAPQPPDVGSSDPLSMVGSQGRSPSYAS

SEQ ID NO: 2675 - protein, 474 aa, Artificial Sequence
  Fusion Protein
HGEGTFTSDKSILLAKRLVRLFIEWLIAGGHSSGKPPPKGGGGGGGSGGGGSGGGGSAESKYGPPCPPCPAPEFEGGPSVFLFPPKPKDTLMISRTPEVTCVVVDVSQEDPEVQFNWYVDGVEVHNAKTKPREEQFNSTYRVVSVLTVLHQDWLNGKEYKCKVSNKGLPSSIEKTISKAKGQPREPQVYTLPPSQEEMTKNQVSLTCLVKGFYPSDIAVEWESNGQPENNYKTTPPVLDSDGSFFLYSRLTVDKSRWQEGNVFSCSVMHEALHNHYTQKSLSLSLGGGGSGSAHPIPDSSPLLQFGGQVRQRYLYTDDACQTEAHLEIREDGTVGGAADQSPESLLQLKALKPGVIQILGVKTSRFLCQRPDGALYGSLHFDPEACSFRELLLEDGYNVYQSEAHGLPLHLPGCKSPHRDPAPRGPARFLPLPGLPPAPPEPPGILAPQPPDVGSSDPLSMVYPSQGRSPSYAS

SEQ ID NO: 2676 - protein, 473 aa, Artificial Sequence
  Fusion Protein
HGEGTFTSDKSILLAKRLVRLFIEWLIAGGHSSGKPPPKGGGGGGGSGGGGSGGGGSAESKYGPPCPPCPAPEFEGGPSVFLFPPKPKDTLMISRTPEVTCVVVDVSQEDPEVQFNWYVDGVEVHNAKTKPREEQFNSTYRVVSVLTVLHQDWLNGKEYKCKVSNKGLPSSIEKTISKAKGQPREPQVYTLPPSQEEMTKNQVSLTCLVKGFYPSDIAVEWESNGQPENNYKTTPPVLDSDGSFFLYSRLTVDKSRWQEGNVFSCSVMHEALHNHYTQKSLSLSLGGGGSGSAHPIPDSSPLLQFGGQVRQRYLYTDDACQTEAHLEIREDGTVGGAADQSPESLLQLKALKPGVIQILGVKTSRFLCQRPDGALYGSLHFDPEACSFRELLLEDGYNVYQSEAHGLPLHLCGNKSPHRDPAPRGPARFLPLPGLPPAPPEPPGILAPQPPDVGSSDPLSMVGSQGRSPSYAS

SEQ ID NO: 2677 - protein, 474 aa, Artificial Sequence
  Fusion Protein
HGEGTFTSDKSILLAKRLVRLFIEWLIAGGHSSGKPPPKGGGGGGGSGGGGSGGGGSAESKYGPPCPPCPAPEFEGGPSVFLFPPKPKDTLMISRTPEVTCVVVDVSQEDPEVQFNWYVDGVEVHNAKTKPREEQFNSTYRVVSVLTVLHQDWLNGKEYKCKVSNKGLPSSIEKTISKAKGQPREPQVYTLPPSQEEMTKNQVSLTCLVKGFYPSDIAVEWESNGQPENNYKTTPPVLDSDGSFFLYSRLTVDKSRWQEGNVFSCSVMHEALHNHYTQKSLSLSLGGGGSGSAHPIPDSSPLLQFGGQVRQRYLYTDDACQTEAHLEIREDGTVGGAADQSPESLLQLKALKPGVIQILGVKTSRFLCQRPDGALYGSLHFDPEACSFRELLLEDGYNVYQSEAHGLPLHLCGNKSPHRDPAPRGPARFLPLPGLPPAPPEPPGILAPQPPDVGSSDPLSMVYPSQGRSPSYAS

SEQ ID NO: 2678 - protein, 471 aa, Artificial Sequence
  Fusion Protein
HGEGTFTSDKSKQLAKRLVRLFIEWLIAGGHSSGKPPPKGGGGGGGSGGGGSGGGGSADKTHTCPPCPAPEAAGGPSVFLFPPKPKDTLMISRTPEVTCVVVDVSHEDPEVKFNWYVDGVEVHNAKTKPREEQYNSTYRVVSVLTVLHQDWLNGKEYKCKVSNKALPAPIEKTISKAKGQPREPQVYTLPPSRDELTKNQVSLTCLVKGFYPSDIAVEWESNGQPENNYKTTPPVLDSDGSFFLYSKLTVDKSRWQQGNVFSCSVMHEALHNHYTQKSLSLSPGGGGSGSAHPIPDSSPLLQFGGQVRQRYLYTDDACQTEAHLEIREDGTVGGAADQSPESLLQLKALKPGVIQILGVKTSRFLCQRPDGALYGSLHFDPEACSFRELLLEDGYNVYQSEAHGLPLHLPGCKSPHRDPAPRGPARFLPLPGLPPAPPEPPGILAPQPPDVGSSDPLSMVGSQGRSPSYAS

SEQ ID NO: 2679 - protein, 472 aa, Artificial Sequence
  Fusion Protein
HGEGTFTSDKSKQLAKRLVRLFIEWLIAGGHSSGKPPPKGGGGGGGSGGGGSGGGGSADKTHTCPPCPAPEAAGGPSVFLFPPKPKDTLMISRTPEVTCVVVDVSHEDPEVKFNWYVDGVEVHNAKTKPREEQYNSTYRVVSVLTVLHQDWLNGKEYKCKVSNKALPAPIEKTISKAKGQPREPQVYTLPPSRDELTKNQVSLTCLVKGFYPSDIAVEWESNGQPENNYKTTPPVLDSDGSFFLYSKLTVDKSRWQQGNVFSCSVMHEALHNHYTQKSLSLSPGGGGSGSAHPIPDSSPLLQFGGQVRQRYLYTDDACQTEAHLEIREDGTVGGAADQSPESLLQLKALKPGVIQILGVKTSRFLCQRPDGALYGSLHFDPEACSFRELLLEDGYNVYQSEAHGLPLHLPGCKSPHRDPAPRGPARFLPLPGLPPAPPEPPGILAPQPPDVGSSDPLSMVYPSQGRSPSYAS

SEQ ID NO: 2680 - protein, 471 aa, Artificial Sequence
  Fusion Protein
HGEGTFTSDKSKQLAKRLVRLFIEWLIAGGHSSGKPPPKGGGGGGGSGGGGSGGGGSADKTHTCPPCPAPEAAGGPSVFLFPPKPKDTLMISRTPEVTCVVVDVSHEDPEVKFNWYVDGVEVHNAKTKPREEQYNSTYRVVSVLTVLHQDWLNGKEYKCKVSNKALPAPIEKTISKAKGQPREPQVYTLPPSRDELTKNQVSLTCLVKGFYPSDIAVEWESNGQPENNYKTTPPVLDSDGSFFLYSKLTVDKSRWQQGNVFSCSVMHEALHNHYTQKSLSLSPGGGGSGSAHPIPDSSPLLQFGGQVRQRYLYTDDACQTEAHLEIREDGTVGGAADQSPESLLQLKALKPGVIQILGVKTSRFLCQRPDGALYGSLHFDPEACSFRELLLEDGYNVYQSEAHGLPLHLCGNKSPHRDPAPRGPARFLPLPGLPPAPPEPPGILAPQPPDVGSSDPLSMVGSQGRSPSYAS

SEQ ID NO: 2681 - protein, 472 aa, Artificial Sequence
  Fusion Protein
HGEGTFTSDKSKQLAKRLVRLFIEWLIAGGHSSGKPPPKGGGGGGGSGGGGSGGGGSADKTHTCPPCPAPEAAGGPSVFLFPPKPKDTLMISRTPEVTCVVVDVSHEDPEVKFNWYVDGVEVHNAKTKPREEQYNSTYRVVSVLTVLHQDWLNGKEYKCKVSNKALPAPIEKTISKAKGQPREPQVYTLPPSRDELTKNQVSLTCLVKGFYPSDIAVEWESNGQPENNYKTTPPVLDSDGSFFLYSKLTVDKSRWQQGNVFSCSVMHEALHNHYTQKSLSLSPGGGGSGSAHPIPDSSPLLQFGGQVRQRYLYTDDACQTEAHLEIREDGTVGGAADQSPESLLQLKALKPGVIQILGVKTSRFLCQRPDGALYGSLHFDPEACSFRELLLEDGYNVYQSEAHGLPLHLCGNKSPHRDPAPRGPARFLPLPGLPPAPPEPPGILAPQPPDVGSSDPLSMVYPSQGRSPSYAS

SEQ ID NO: 2682 - protein, 471 aa, Artificial Sequence
  Fusion Protein
HGEGTFTSDKSKQLAKRLVRLFIEWLIAGGHSSGKPPPKGGGGGGGSGGGGSGGGGSADKTHTCPPCPAPELLGGPSVFLFPPKPKDTLMISRTPEVTCVVVDVSHEDPEVKFNWYVDGVEVHNAKTKPREEQYNNASRVVSVLTVLHQDWLNGKEYKCKVSNKALPAPIEKTISKAKGQPREPQVYTLPPSRDELTKNQVSLTCLVKGFYPSDIAVEWESNGQPENNYKTTPPVLDSDGSFFLYSKLTVDKSRWQQGNVFSCSVMHEALHNHYTQKSLSLSPGGGGSGSAHPIPDSSPLLQFGGQVRQRYLYTDDACQTEAHLEIREDGTVGGAADQSPESLLQLKALKPGVIQILGVKTSRFLCQRPDGALYGSLHFDPEACSFRELLLEDGYNVYQSEAHGLPLHLPGCKSPHRDPAPRGPARFLPLPGLPPAPPEPPGILAPQPPDVGSSDPLSMVGSQGRSPSYAS

SEQ ID NO: 2683 - protein, 472 aa, Artificial Sequence
  Fusion Protein
HGEGTFTSDKSKQLAKRLVRLFIEWLIAGGHSSGKPPPKGGGGGGGSGGGGSGGGGSADKTHTCPPCPAPELLGGPSVFLFPPKPKDTLMISRTPEVTCVVVDVSHEDPEVKFNWYVDGVEVHNAKTKPREEQYNNASRVVSVLTVLHQDWLNGKEYKCKVSNKALPAPIEKTISKAKGQPREPQVYTLPPSRDELTKNQVSLTCLVKGFYPSDIAVEWESNGQPENNYKTTPPVLDSDGSFFLYSKLTVDKSRWQQGNVFSCSVMHEALHNHYTQKSLSLSPGGGGSGSAHPIPDSSPLLQFGGQVRQRYLYTDDACQTEAHLEIREDGTVGGAADQSPESLLQLKALKPGVIQILGVKTSRFLCQRPDGALYGSLHFDPEACSFRELLLEDGYNVYQSEAHGLPLHLPGCKSPHRDPAPRGPARFLPLPGLPPAPPEPPGILAPQPPDVGSSDPLSMVYPSQGRSPSYAS

SEQ ID NO: 2684 - protein, 471 aa, Artificial Sequence
  Fusion Protein
HGEGTFTSDKSKQLAKRLVRLFIEWLIAGGHSSGKPPPKGGGGGGGSGGGGSGGGGSADKTHTCPPCPAPELLGGPSVFLFPPKPKDTLMISRTPEVTCVVVDVSHEDPEVKFNWYVDGVEVHNAKTKPREEQYNNASRVVSVLTVLHQDWLNGKEYKCKVSNKALPAPIEKTISKAKGQPREPQVYTLPPSRDELTKNQVSLTCLVKGFYPSDIAVEWESNGQPENNYKTTPPVLDSDGSFFLYSKLTVDKSRWQQGNVFSCSVMHEALHNHYTQKSLSLSPGGGGSGSAHPIPDSSPLLQFGGQVRQRYLYTDDACQTEAHLEIREDGTVGGAADQSPESLLQLKALKPGVIQILGVKTSRFLCQRPDGALYGSLHFDPEACSFRELLLEDGYNVYQSEAHGLPLHLCGNKSPHRDPAPRGPARFLPLPGLPPAPPEPPGILAPQPPDVGSSDPLSMVGSQGRSPSYAS

SEQ ID NO: 2685 - protein, 472 aa, Artificial Sequence
  Fusion Protein
HGEGTFTSDKSKQLAKRLVRLFIEWLIAGGHSSGKPPPKGGGGGGGSGGGGSGGGGSADKTHTCPPCPAPELLGGPSVFLFPPKPKDTLMISRTPEVTCVVVDVSHEDPEVKFNWYVDGVEVHNAKTKPREEQYNNASRVVSVLTVLHQDWLNGKEYKCKVSNKALPAPIEKTISKAKGQPREPQVYTLPPSRDELTKNQVSLTCLVKGFYPSDIAVEWESNGQPENNYKTTPPVLDSDGSFFLYSKLTVDKSRWQQGNVFSCSVMHEALHNHYTQKSLSLSPGGGGSGSAHPIPDSSPLLQFGGQVRQRYLYTDDACQTEAHLEIREDGTVGGAADQSPESLLQLKALKPGVIQILGVKTSRFLCQRPDGALYGSLHFDPEACSFRELLLEDGYNVYQSEAHGLPLHLCGNKSPHRDPAPRGPARFLPLPGLPPAPPEPPGILAPQPPDVGSSDPLSMVYPSQGRSPSYAS

SEQ ID NO: 2686 - protein, 474 aa, Artificial Sequence
  Fusion Protein
HGEGTFTSDKSKQLAKRLVRLFIEWLIAGGHSSGKPPPKGGGGGGGSGGGGSGGGGSAESKYGPPCPPCPAPEFEGGPSVFLFPPKPKDTLMISRTPEVTCVVVDVSQEDPEVQFNWYVDGVEVHNAKTKPREEQFNSTYRVVSVLTVLHQDWLNGKEYKCKVSNKGLPSSIEKTISKAKGQPREPQVYTLPPSQEEMTKNQVSLTCLVKGFYPSDIAVEWESNGQPENNYKTTPPVLDSDGSFFLYSRLTVDKSRWQEGNVFSCSVMHEALHNHYTQKSLSLSLGGGGSGSAHPIPDSSPLLQFGGQVRQRYLYTDDACQTEAHLEIREDGTVGGAADQSPESLLQLKALKPGVIQILGVKTSRFLCQRPDGALYGSLHFDPEACSFRELLLEDGYNVYQSEAHGLPLHLPGCKSPHRDPAPRGPARFLPLPGLPPAPPEPPGILAPQPPDVGSSDPLSMVYPSQGRSPSYAS

SEQ ID NO: 2687 - protein, 473 aa, Artificial Sequence
  Fusion Protein
HGEGTFTSDKSKQLAKRLVRLFIEWLIAGGHSSGKPPPKGGGGGGGSGGGGSGGGGSAESKYGPPCPPCPAPEFEGGPSVFLFPPKPKDTLMISRTPEVTCVVVDVSQEDPEVQFNWYVDGVEVHNAKTKPREEQFNSTYRVVSVLTVLHQDWLNGKEYKCKVSNKGLPSSIEKTISKAKGQPREPQVYTLPPSQEEMTKNQVSLTCLVKGFYPSDIAVEWESNGQPENNYKTTPPVLDSDGSFFLYSRLTVDKSRWQEGNVFSCSVMHEALHNHYTQKSLSLSLGGGGSGSAHPIPDSSPLLQFGGQVRQRYLYTDDACQTEAHLEIREDGTVGGAADQSPESLLQLKALKPGVIQILGVKTSRFLCQRPDGALYGSLHFDPEACSFRELLLEDGYNVYQSEAHGLPLHLCGNKSPHRDPAPRGPARFLPLPGLPPAPPEPPGILAPQPPDVGSSDPLSMVGSQGRSPSYAS

SEQ ID NO: 2688 - protein, 474 aa, Artificial Sequence
  Fusion Protein
HGEGTFTSDKSKQLAKRLVRLFIEWLIAGGHSSGKPPPKGGGGGGGSGGGGSGGGGSAESKYGPPCPPCPAPEFEGGPSVFLFPPKPKDTLMISRTPEVTCVVVDVSQEDPEVQFNWYVDGVEVHNAKTKPREEQFNSTYRVVSVLTVLHQDWLNGKEYKCKVSNKGLPSSIEKTISKAKGQPREPQVYTLPPSQEEMTKNQVSLTCLVKGFYPSDIAVEWESNGQPENNYKTTPPVLDSDGSFFLYSRLTVDKSRWQEGNVFSCSVMHEALHNHYTQKSLSLSLGGGGSGSAHPIPDSSPLLQFGGQVRQRYLYTDDACQTEAHLEIREDGTVGGAADQSPESLLQLKALKPGVIQILGVKTSRFLCQRPDGALYGSLHFDPEACSFRELLLEDGYNVYQSEAHGLPLHLCGNKSPHRDPAPRGPARFLPLPGLPPAPPEPPGILAPQPPDVGSSDPLSMVYPSQGRSPSYAS

SEQ ID NO: 2689 - protein, 471 aa, Artificial Sequence
  Fusion Protein
HGEGTFTSDKSKQLAKRLAHLFIEWLIAGGHSSGKPPPKGGGGGGGSGGGGSGGGGSADKTHTCPPCPAPEAAGGPSVFLFPPKPKDTLMISRTPEVTCVVVDVSHEDPEVKFNWYVDGVEVHNAKTKPREEQYNSTYRVVSVLTVLHQDWLNGKEYKCKVSNKALPAPIEKTISKAKGQPREPQVYTLPPSRDELTKNQVSLTCLVKGFYPSDIAVEWESNGQPENNYKTTPPVLDSDGSFFLYSKLTVDKSRWQQGNVFSCSVMHEALHNHYTQKSLSLSPGGGGSGSAHPIPDSSPLLQFGGQVRQRYLYTDDACQTEAHLEIREDGTVGGAADQSPESLLQLKALKPGVIQILGVKTSRFLCQRPDGALYGSLHFDPEACSFRELLLEDGYNVYQSEAHGLPLHLPGCKSPHRDPAPRGPARFLPLPGLPPAPPEPPGILAPQPPDVGSSDPLSMVGSQGRSPSYAS

SEQ ID NO: 2690 - protein, 472 aa, Artificial Sequence
  Fusion Protein
HGEGTFTSDKSKQLAKRLAHLFIEWLIAGGHSSGKPPPKGGGGGGGSGGGGSGGGGSADKTHTCPPCPAPEAAGGPSVFLFPPKPKDTLMISRTPEVTCVVVDVSHEDPEVKFNWYVDGVEVHNAKTKPREEQYNSTYRVVSVLTVLHQDWLNGKEYKCKVSNKALPAPIEKTISKAKGQPREPQVYTLPPSRDELTKNQVSLTCLVKGFYPSDIAVEWESNGQPENNYKTTPPVLDSDGSFFLYSKLTVDKSRWQQGNVFSCSVMHEALHNHYTQKSLSLSPGGGGSGSAHPIPDSSPLLQFGGQVRQRYLYTDDACQTEAHLEIREDGTVGGAADQSPESLLQLKALKPGVIQILGVKTSRFLCQRPDGALYGSLHFDPEACSFRELLLEDGYNVYQSEAHGLPLHLPGCKSPHRDPAPRGPARFLPLPGLPPAPPEPPGILAPQPPDVGSSDPLSMVYPSQGRSPSYAS

SEQ ID NO: 2691 - protein, 471 aa, Artificial Sequence
  Fusion Protein
HGEGTFTSDKSKQLAKRLAHLFIEWLIAGGHSSGKPPPKGGGGGGGSGGGGSGGGGSADKTHTCPPCPAPEAAGGPSVFLFPPKPKDTLMISRTPEVTCVVVDVSHEDPEVKFNWYVDGVEVHNAKTKPREEQYNSTYRVVSVLTVLHQDWLNGKEYKCKVSNKALPAPIEKTISKAKGQPREPQVYTLPPSRDELTKNQVSLTCLVKGFYPSDIAVEWESNGQPENNYKTTPPVLDSDGSFFLYSKLTVDKSRWQQGNVFSCSVMHEALHNHYTQKSLSLSPGGGGSGSAHPIPDSSPLLQFGGQVRQRYLYTDDACQTEAHLEIREDGTVGGAADQSPESLLQLKALKPGVIQILGVKTSRFLCQRPDGALYGSLHFDPEACSFRELLLEDGYNVYQSEAHGLPLHLCGNKSPHRDPAPRGPARFLPLPGLPPAPPEPPGILAPQPPDVGSSDPLSMVGSQGRSPSYAS

SEQ ID NO: 2692 - protein, 472 aa, Artificial Sequence
  Fusion Protein
HGEGTFTSDKSKQLAKRLAHLFIEWLIAGGHSSGKPPPKGGGGGGGSGGGGSGGGGSADKTHTCPPCPAPEAAGGPSVFLFPPKPKDTLMISRTPEVTCVVVDVSHEDPEVKFNWYVDGVEVHNAKTKPREEQYNSTYRVVSVLTVLHQDWLNGKEYKCKVSNKALPAPIEKTISKAKGQPREPQVYTLPPSRDELTKNQVSLTCLVKGFYPSDIAVEWESNGQPENNYKTTPPVLDSDGSFFLYSKLTVDKSRWQQGNVFSCSVMHEALHNHYTQKSLSLSPGGGGSGSAHPIPDSSPLLQFGGQVRQRYLYTDDACQTEAHLEIREDGTVGGAADQSPESLLQLKALKPGVIQILGVKTSRFLCQRPDGALYGSLHFDPEACSFRELLLEDGYNVYQSEAHGLPLHLCGNKSPHRDPAPRGPARFLPLPGLPPAPPEPPGILAPQPPDVGSSDPLSMVYPSQGRSPSYAS

SEQ ID NO: 2693 - protein, 471 aa, Artificial Sequence
  Fusion Protein
HGEGTFTSDKSKQLAKRLAHLFIEWLIAGGHSSGKPPPKGGGGGGGSGGGGSGGGGSADKTHTCPPCPAPELLGGPSVFLFPPKPKDTLMISRTPEVTCVVVDVSHEDPEVKFNWYVDGVEVHNAKTKPREEQYNNASRVVSVLTVLHQDWLNGKEYKCKVSNKALPAPIEKTISKAKGQPREPQVYTLPPSRDELTKNQVSLTCLVKGFYPSDIAVEWESNGQPENNYKTTPPVLDSDGSFFLYSKLTVDKSRWQQGNVFSCSVMHEALHNHYTQKSLSLSPGGGGSGSAHPIPDSSPLLQFGGQVRQRYLYTDDACQTEAHLEIREDGTVGGAADQSPESLLQLKALKPGVIQILGVKTSRFLCQRPDGALYGSLHFDPEACSFRELLLEDGYNVYQSEAHGLPLHLPGCKSPHRDPAPRGPARFLPLPGLPPAPPEPPGILAPQPPDVGSSDPLSMVGSQGRSPSYAS

SEQ ID NO: 2694 - protein, 472 aa, Artificial Sequence
  Fusion Protein
HGEGTFTSDKSKQLAKRLAHLFIEWLIAGGHSSGKPPPKGGGGGGGSGGGGSGGGGSADKTHTCPPCPAPELLGGPSVFLFPPKPKDTLMISRTPEVTCVVVDVSHEDPEVKFNWYVDGVEVHNAKTKPREEQYNNASRVVSVLTVLHQDWLNGKEYKCKVSNKALPAPIEKTISKAKGQPREPQVYTLPPSRDELTKNQVSLTCLVKGFYPSDIAVEWESNGQPENNYKTTPPVLDSDGSFFLYSKLTVDKSRWQQGNVFSCSVMHEALHNHYTQKSLSLSPGGGGSGSAHPIPDSSPLLQFGGQVRQRYLYTDDACQTEAHLEIREDGTVGGAADQSPESLLQLKALKPGVIQILGVKTSRFLCQRPDGALYGSLHFDPEACSFRELLLEDGYNVYQSEAHGLPLHLPGCKSPHRDPAPRGPARFLPLPGLPPAPPEPPGILAPQPPDVGSSDPLSMVYPSQGRSPSYAS

SEQ ID NO: 2695 - protein, 471 aa, Artificial Sequence
  Fusion Protein
HGEGTFTSDKSKQLAKRLAHLFIEWLIAGGHSSGKPPPKGGGGGGGSGGGGSGGGGSADKTHTCPPCPAPELLGGPSVFLFPPKPKDTLMISRTPEVTCVVVDVSHEDPEVKFNWYVDGVEVHNAKTKPREEQYNNASRVVSVLTVLHQDWLNGKEYKCKVSNKALPAPIEKTISKAKGQPREPQVYTLPPSRDELTKNQVSLTCLVKGFYPSDIAVEWESNGQPENNYKTTPPVLDSDGSFFLYSKLTVDKSRWQQGNVFSCSVMHEALHNHYTQKSLSLSPGGGGSGSAHPIPDSSPLLQFGGQVRQRYLYTDDACQTEAHLEIREDGTVGGAADQSPESLLQLKALKPGVIQILGVKTSRFLCQRPDGALYGSLHFDPEACSFRELLLEDGYNVYQSEAHGLPLHLCGNKSPHRDPAPRGPARFLPLPGLPPAPPEPPGILAPQPPDVGSSDPLSMVGSQGRSPSYAS

SEQ ID NO: 2696 - protein, 472 aa, Artificial Sequence
  Fusion Protein
HGEGTFTSDKSKQLAKRLAHLFIEWLIAGGHSSGKPPPKGGGGGGGSGGGGSGGGGSADKTHTCPPCPAPELLGGPSVFLFPPKPKDTLMISRTPEVTCVVVDVSHEDPEVKFNWYVDGVEVHNAKTKPREEQYNNASRVVSVLTVLHQDWLNGKEYKCKVSNKALPAPIEKTISKAKGQPREPQVYTLPPSRDELTKNQVSLTCLVKGFYPSDIAVEWESNGQPENNYKTTPPVLDSDGSFFLYSKLTVDKSRWQQGNVFSCSVMHEALHNHYTQKSLSLSPGGGGSGSAHPIPDSSPLLQFGGQVRQRYLYTDDACQTEAHLEIREDGTVGGAADQSPESLLQLKALKPGVIQILGVKTSRFLCQRPDGALYGSLHFDPEACSFRELLLEDGYNVYQSEAHGLPLHLCGNKSPHRDPAPRGPARFLPLPGLPPAPPEPPGILAPQPPDVGSSDPLSMVYPSQGRSPSYAS

SEQ ID NO: 2697 - protein, 474 aa, Artificial Sequence
  Fusion Protein
HGEGTFTSDKSKQLAKRLAHLFIEWLIAGGHSSGKPPPKGGGGGGGSGGGGSGGGGSAESKYGPPCPPCPAPEFEGGPSVFLFPPKPKDTLMISRTPEVTCVVVDVSQEDPEVQFNWYVDGVEVHNAKTKPREEQFNSTYRVVSVLTVLHQDWLNGKEYKCKVSNKGLPSSIEKTISKAKGQPREPQVYTLPPSQEEMTKNQVSLTCLVKGFYPSDIAVEWESNGQPENNYKTTPPVLDSDGSFFLYSRLTVDKSRWQEGNVFSCSVMHEALHNHYTQKSLSLSLGGGGSGSAHPIPDSSPLLQFGGQVRQRYLYTDDACQTEAHLEIREDGTVGGAADQSPESLLQLKALKPGVIQILGVKTSRFLCQRPDGALYGSLHFDPEACSFRELLLEDGYNVYQSEAHGLPLHLPGCKSPHRDPAPRGPARFLPLPGLPPAPPEPPGILAPQPPDVGSSDPLSMVYPSQGRSPSYAS

SEQ ID NO: 2698 - protein, 473 aa, Artificial Sequence
  Fusion Protein
HGEGTFTSDKSKQLAKRLAHLFIEWLIAGGHSSGKPPPKGGGGGGGSGGGGSGGGGSAESKYGPPCPPCPAPEFEGGPSVFLFPPKPKDTLMISRTPEVTCVVVDVSQEDPEVQFNWYVDGVEVHNAKTKPREEQFNSTYRVVSVLTVLHQDWLNGKEYKCKVSNKGLPSSIEKTISKAKGQPREPQVYTLPPSQEEMTKNQVSLTCLVKGFYPSDIAVEWESNGQPENNYKTTPPVLDSDGSFFLYSRLTVDKSRWQEGNVFSCSVMHEALHNHYTQKSLSLSLGGGGSGSAHPIPDSSPLLQFGGQVRQRYLYTDDACQTEAHLEIREDGTVGGAADQSPESLLQLKALKPGVIQILGVKTSRFLCQRPDGALYGSLHFDPEACSFRELLLEDGYNVYQSEAHGLPLHLCGNKSPHRDPAPRGPARFLPLPGLPPAPPEPPGILAPQPPDVGSSDPLSMVGSQGRSPSYAS

SEQ ID NO: 2699 - protein, 474 aa, Artificial Sequence
  Fusion Protein
HGEGTFTSDKSKQLAKRLAHLFIEWLIAGGHSSGKPPPKGGGGGGGSGGGGSGGGGSAESKYGPPCPPCPAPEFEGGPSVFLFPPKPKDTLMISRTPEVTCVVVDVSQEDPEVQFNWYVDGVEVHNAKTKPREEQFNSTYRVVSVLTVLHQDWLNGKEYKCKVSNKGLPSSIEKTISKAKGQPREPQVYTLPPSQEEMTKNQVSLTCLVKGFYPSDIAVEWESNGQPENNYKTTPPVLDSDGSFFLYSRLTVDKSRWQEGNVFSCSVMHEALHNHYTQKSLSLSLGGGGSGSAHPIPDSSPLLQFGGQVRQRYLYTDDACQTEAHLEIREDGTVGGAADQSPESLLQLKALKPGVIQILGVKTSRFLCQRPDGALYGSLHFDPEACSFRELLLEDGYNVYQSEAHGLPLHLCGNKSPHRDPAPRGPARFLPLPGLPPAPPEPPGILAPQPPDVGSSDPLSMVYPSQGRSPSYAS

SEQ ID NO: 2700 - protein, 469 aa, Artificial Sequence
  Fusion Protein
HGEGTFTSDKSKQLAEEAVQLFIEWLLAGGPSKEIISGGGGGGGSGGGGSGGGGSADKTHTCPPCPAPEAAGGPSVFLFPPKPKDTLMISRTPEVTCVVVDVSHEDPEVKFNWYVDGVEVHNAKTKPREEQYNSTYRVVSVLTVLHQDWLNGKEYKCKVSNKALPAPIEKTISKAKGQPREPQVYTLPPSRDELTKNQVSLTCLVKGFYPSDIAVEWESNGQPENNYKTTPPVLDSDGSFFLYSKLTVDKSRWQQGNVFSCSVMHEALHNHYTQKSLSLSPGGGGSGSAHPIPDSSPLLQFGGQVRQRYLYTDDACQTEAHLEIREDGTVGGAADQSPESLLQLKALKPGVIQILGVKTSRFLCQRPDGALYGSLHFDPEACSFRELLLEDGYNVYQSEAHGLPLHLPGCKSPHRDPAPRGPARFLPLPGLPPAPPEPPGILAPQPPDVGSSDPLSMVGSQGRSPSYAS

SEQ ID NO: 2701 - protein, 470 aa, Artificial Sequence
  Fusion Protein
HGEGTFTSDKSKQLAEEAVQLFIEWLLAGGPSKEIISGGGGGGGSGGGGSGGGGSADKTHTCPPCPAPEAAGGPSVFLFPPKPKDTLMISRTPEVTCVVVDVSHEDPEVKFNWYVDGVEVHNAKTKPREEQYNSTYRVVSVLTVLHQDWLNGKEYKCKVSNKALPAPIEKTISKAKGQPREPQVYTLPPSRDELTKNQVSLTCLVKGFYPSDIAVEWESNGQPENNYKTTPPVLDSDGSFFLYSKLTVDKSRWQQGNVFSCSVMHEALHNHYTQKSLSLSPGGGGSGSAHPIPDSSPLLQFGGQVRQRYLYTDDACQTEAHLEIREDGTVGGAADQSPESLLQLKALKPGVIQILGVKTSRFLCQRPDGALYGSLHFDPEACSFRELLLEDGYNVYQSEAHGLPLHLPGCKSPHRDPAPRGPARFLPLPGLPPAPPEPPGILAPQPPDVGSSDPLSMVYPSQGRSPSYAS

SEQ ID NO: 2702 - protein, 469 aa, Artificial Sequence
  Fusion Protein
HGEGTFTSDKSKQLAEEAVQLFIEWLLAGGPSKEIISGGGGGGGSGGGGSGGGGSADKTHTCPPCPAPEAAGGPSVFLFPPKPKDTLMISRTPEVTCVVVDVSHEDPEVKFNWYVDGVEVHNAKTKPREEQYNSTYRVVSVLTVLHQDWLNGKEYKCKVSNKALPAPIEKTISKAKGQPREPQVYTLPPSRDELTKNQVSLTCLVKGFYPSDIAVEWESNGQPENNYKTTPPVLDSDGSFFLYSKLTVDKSRWQQGNVFSCSVMHEALHNHYTQKSLSLSPGGGGSGSAHPIPDSSPLLQFGGQVRQRYLYTDDACQTEAHLEIREDGTVGGAADQSPESLLQLKALKPGVIQILGVKTSRFLCQRPDGALYGSLHFDPEACSFRELLLEDGYNVYQSEAHGLPLHLCGNKSPHRDPAPRGPARFLPLPGLPPAPPEPPGILAPQPPDVGSSDPLSMVGSQGRSPSYAS

SEQ ID NO: 2703 - protein, 470 aa, Artificial Sequence
  Fusion Protein
HGEGTFTSDKSKQLAEEAVQLFIEWLLAGGPSKEIISGGGGGGGSGGGGSGGGGSADKTHTCPPCPAPEAAGGPSVFLFPPKPKDTLMISRTPEVTCVVVDVSHEDPEVKFNWYVDGVEVHNAKTKPREEQYNSTYRVVSVLTVLHQDWLNGKEYKCKVSNKALPAPIEKTISKAKGQPREPQVYTLPPSRDELTKNQVSLTCLVKGFYPSDIAVEWESNGQPENNYKTTPPVLDSDGSFFLYSKLTVDKSRWQQGNVFSCSVMHEALHNHYTQKSLSLSPGGGGSGSAHPIPDSSPLLQFGGQVRQRYLYTDDACQTEAHLEIREDGTVGGAADQSPESLLQLKALKPGVIQILGVKTSRFLCQRPDGALYGSLHFDPEACSFRELLLEDGYNVYQSEAHGLPLHLCGNKSPHRDPAPRGPARFLPLPGLPPAPPEPPGILAPQPPDVGSSDPLSMVYPSQGRSPSYAS

SEQ ID NO: 2704 - protein, 469 aa, Artificial Sequence
  Fusion Protein
HGEGTFTSDKSKQLAEEAVQLFIEWLLAGGPSKEIISGGGGGGGSGGGGSGGGGSADKTHTCPPCPAPELLGGPSVFLFPPKPKDTLMISRTPEVTCVVVDVSHEDPEVKFNWYVDGVEVHNAKTKPREEQYNNASRVVSVLTVLHQDWLNGKEYKCKVSNKALPAPIEKTISKAKGQPREPQVYTLPPSRDELTKNQVSLTCLVKGFYPSDIAVEWESNGQPENNYKTTPPVLDSDGSFFLYSKLTVDKSRWQQGNVFSCSVMHEALHNHYTQKSLSLSPGGGGSGSAHPIPDSSPLLQFGGQVRQRYLYTDDACQTEAHLEIREDGTVGGAADQSPESLLQLKALKPGVIQILGVKTSRFLCQRPDGALYGSLHFDPEACSFRELLLEDGYNVYQSEAHGLPLHLPGCKSPHRDPAPRGPARFLPLPGLPPAPPEPPGILAPQPPDVGSSDPLSMVGSQGRSPSYAS

SEQ ID NO: 2705 - protein, 470 aa, Artificial Sequence
  Fusion Protein
HGEGTFTSDKSKQLAEEAVQLFIEWLLAGGPSKEIISGGGGGGGSGGGGSGGGGSADKTHTCPPCPAPELLGGPSVFLFPPKPKDTLMISRTPEVTCVVVDVSHEDPEVKFNWYVDGVEVHNAKTKPREEQYNNASRVVSVLTVLHQDWLNGKEYKCKVSNKALPAPIEKTISKAKGQPREPQVYTLPPSRDELTKNQVSLTCLVKGFYPSDIAVEWESNGQPENNYKTTPPVLDSDGSFFLYSKLTVDKSRWQQGNVFSCSVMHEALHNHYTQKSLSLSPGGGGSGSAHPIPDSSPLLQFGGQVRQRYLYTDDACQTEAHLEIREDGTVGGAADQSPESLLQLKALKPGVIQILGVKTSRFLCQRPDGALYGSLHFDPEACSFRELLLEDGYNVYQSEAHGLPLHLPGCKSPHRDPAPRGPARFLPLPGLPPAPPEPPGILAPQPPDVGSSDPLSMVYPSQGRSPSYAS

SEQ ID NO: 2706 - protein, 469 aa, Artificial Sequence
  Fusion Protein
HGEGTFTSDKSKQLAEEAVQLFIEWLLAGGPSKEIISGGGGGGGSGGGGSGGGGSADKTHTCPPCPAPELLGGPSVFLFPPKPKDTLMISRTPEVTCVVVDVSHEDPEVKFNWYVDGVEVHNAKTKPREEQYNNASRVVSVLTVLHQDWLNGKEYKCKVSNKALPAPIEKTISKAKGQPREPQVYTLPPSRDELTKNQVSLTCLVKGFYPSDIAVEWESNGQPENNYKTTPPVLDSDGSFFLYSKLTVDKSRWQQGNVFSCSVMHEALHNHYTQKSLSLSPGGGGSGSAHPIPDSSPLLQFGGQVRQRYLYTDDACQTEAHLEIREDGTVGGAADQSPESLLQLKALKPGVIQILGVKTSRFLCQRPDGALYGSLHFDPEACSFRELLLEDGYNVYQSEAHGLPLHLCGNKSPHRDPAPRGPARFLPLPGLPPAPPEPPGILAPQPPDVGSSDPLSMVGSQGRSPSYAS

SEQ ID NO: 2707 - protein, 470 aa, Artificial Sequence
  Fusion Protein
HGEGTFTSDKSKQLAEEAVQLFIEWLLAGGPSKEIISGGGGGGGSGGGGSGGGGSADKTHTCPPCPAPELLGGPSVFLFPPKPKDTLMISRTPEVTCVVVDVSHEDPEVKFNWYVDGVEVHNAKTKPREEQYNNASRVVSVLTVLHQDWLNGKEYKCKVSNKALPAPIEKTISKAKGQPREPQVYTLPPSRDELTKNQVSLTCLVKGFYPSDIAVEWESNGQPENNYKTTPPVLDSDGSFFLYSKLTVDKSRWQQGNVFSCSVMHEALHNHYTQKSLSLSPGGGGSGSAHPIPDSSPLLQFGGQVRQRYLYTDDACQTEAHLEIREDGTVGGAADQSPESLLQLKALKPGVIQILGVKTSRFLCQRPDGALYGSLHFDPEACSFRELLLEDGYNVYQSEAHGLPLHLCGNKSPHRDPAPRGPARFLPLPGLPPAPPEPPGILAPQPPDVGSSDPLSMVYPSQGRSPSYAS

SEQ ID NO: 2708 - protein, 472 aa, Artificial Sequence
  Fusion Protein
HGEGTFTSDKSKQLAEEAVQLFIEWLLAGGPSKEIISGGGGGGGSGGGGSGGGGSAESKYGPPCPPCPAPEFEGGPSVFLFPPKPKDTLMISRTPEVTCVVVDVSQEDPEVQFNWYVDGVEVHNAKTKPREEQFNSTYRVVSVLTVLHQDWLNGKEYKCKVSNKGLPSSIEKTISKAKGQPREPQVYTLPPSQEEMTKNQVSLTCLVKGFYPSDIAVEWESNGQPENNYKTTPPVLDSDGSFFLYSRLTVDKSRWQEGNVFSCSVMHEALHNHYTQKSLSLSLGGGGSGSAHPIPDSSPLLQFGGQVRQRYLYTDDACQTEAHLEIREDGTVGGAADQSPESLLQLKALKPGVIQILGVKTSRFLCQRPDGALYGSLHFDPEACSFRELLLEDGYNVYQSEAHGLPLHLPGCKSPHRDPAPRGPARFLPLPGLPPAPPEPPGILAPQPPDVGSSDPLSMVYPSQGRSPSYAS

SEQ ID NO: 2709 - protein, 471 aa, Artificial Sequence
  Fusion Protein
HGEGTFTSDKSKQLAEEAVQLFIEWLLAGGPSKEIISGGGGGGGSGGGGSGGGGSAESKYGPPCPPCPAPEFEGGPSVFLFPPKPKDTLMISRTPEVTCVVVDVSQEDPEVQFNWYVDGVEVHNAKTKPREEQFNSTYRVVSVLTVLHQDWLNGKEYKCKVSNKGLPSSIEKTISKAKGQPREPQVYTLPPSQEEMTKNQVSLTCLVKGFYPSDIAVEWESNGQPENNYKTTPPVLDSDGSFFLYSRLTVDKSRWQEGNVFSCSVMHEALHNHYTQKSLSLSLGGGGSGSAHPIPDSSPLLQFGGQVRQRYLYTDDACQTEAHLEIREDGTVGGAADQSPESLLQLKALKPGVIQILGVKTSRFLCQRPDGALYGSLHFDPEACSFRELLLEDGYNVYQSEAHGLPLHLCGNKSPHRDPAPRGPARFLPLPGLPPAPPEPPGILAPQPPDVGSSDPLSMVGSQGRSPSYAS

SEQ ID NO: 2710 - protein, 472 aa, Artificial Sequence
  Fusion Protein
HGEGTFTSDKSKQLAEEAVQLFIEWLLAGGPSKEIISGGGGGGGSGGGGSGGGGSAESKYGPPCPPCPAPEFEGGPSVFLFPPKPKDTLMISRTPEVTCVVVDVSQEDPEVQFNWYVDGVEVHNAKTKPREEQFNSTYRVVSVLTVLHQDWLNGKEYKCKVSNKGLPSSIEKTISKAKGQPREPQVYTLPPSQEEMTKNQVSLTCLVKGFYPSDIAVEWESNGQPENNYKTTPPVLDSDGSFFLYSRLTVDKSRWQEGNVFSCSVMHEALHNHYTQKSLSLSLGGGGSGSAHPIPDSSPLLQFGGQVRQRYLYTDDACQTEAHLEIREDGTVGGAADQSPESLLQLKALKPGVIQILGVKTSRFLCQRPDGALYGSLHFDPEACSFRELLLEDGYNVYQSEAHGLPLHLCGNKSPHRDPAPRGPARFLPLPGLPPAPPEPPGILAPQPPDVGSSDPLSMVYPSQGRSPSYAS

SEQ ID NO: 2711 - protein, 471 aa, Artificial Sequence
  Fusion Protein
HSEGTFTSDKSKQLAKRLVRLFIEWLIKGGHSSGKPPPKGGGGGGGSGGGGSGGGGSADKTHTCPPCPAPEAAGGPSVFLFPPKPKDTLMISRTPEVTCVVVDVSHEDPEVKFNWYVDGVEVHNAKTKPREEQYNSTYRVVSVLTVLHQDWLNGKEYKCKVSNKALPAPIEKTISKAKGQPREPQVYTLPPSRDELTKNQVSLTCLVKGFYPSDIAVEWESNGQPENNYKTTPPVLDSDGSFFLYSKLTVDKSRWQQGNVFSCSVMHEALHNHYTQKSLSLSPGGGGSGSAHPIPDSSPLLQFGGQVRQRYLYTDDACQTEAHLEIREDGTVGGAADQSPESLLQLKALKPGVIQILGVKTSRFLCQRPDGALYGSLHFDPEACSFRELLLEDGYNVYQSEAHGLPLHLPGCKSPHRDPAPRGPARFLPLPGLPPAPPEPPGILAPQPPDVGSSDPLSMVGSQGRSPSYAS

SEQ ID NO: 2712 - protein, 472 aa, Artificial Sequence
  Fusion Protein
HSEGTFTSDKSKQLAKRLVRLFIEWLIKGGHSSGKPPPKGGGGGGGSGGGGSGGGGSADKTHTCPPCPAPEAAGGPSVFLFPPKPKDTLMISRTPEVTCVVVDVSHEDPEVKFNWYVDGVEVHNAKTKPREEQYNSTYRVVSVLTVLHQDWLNGKEYKCKVSNKALPAPIEKTISKAKGQPREPQVYTLPPSRDELTKNQVSLTCLVKGFYPSDIAVEWESNGQPENNYKTTPPVLDSDGSFFLYSKLTVDKSRWQQGNVFSCSVMHEALHNHYTQKSLSLSPGGGGSGSAHPIPDSSPLLQFGGQVRQRYLYTDDACQTEAHLEIREDGTVGGAADQSPESLLQLKALKPGVIQILGVKTSRFLCQRPDGALYGSLHFDPEACSFRELLLEDGYNVYQSEAHGLPLHLPGCKSPHRDPAPRGPARFLPLPGLPPAPPEPPGILAPQPPDVGSSDPLSMVYPSQGRSPSYAS

SEQ ID NO: 2713 - protein, 471 aa, Artificial Sequence
  Fusion Protein
HSEGTFTSDKSKQLAKRLVRLFIEWLIKGGHSSGKPPPKGGGGGGGSGGGGSGGGGSADKTHTCPPCPAPEAAGGPSVFLFPPKPKDTLMISRTPEVTCVVVDVSHEDPEVKFNWYVDGVEVHNAKTKPREEQYNSTYRVVSVLTVLHQDWLNGKEYKCKVSNKALPAPIEKTISKAKGQPREPQVYTLPPSRDELTKNQVSLTCLVKGFYPSDIAVEWESNGQPENNYKTTPPVLDSDGSFFLYSKLTVDKSRWQQGNVFSCSVMHEALHNHYTQKSLSLSPGGGGSGSAHPIPDSSPLLQFGGQVRQRYLYTDDACQTEAHLEIREDGTVGGAADQSPESLLQLKALKPGVIQILGVKTSRFLCQRPDGALYGSLHFDPEACSFRELLLEDGYNVYQSEAHGLPLHLCGNKSPHRDPAPRGPARFLPLPGLPPAPPEPPGILAPQPPDVGSSDPLSMVGSQGRSPSYAS

SEQ ID NO: 2714 - protein, 472 aa, Artificial Sequence
  Fusion Protein
HSEGTFTSDKSKQLAKRLVRLFIEWLIKGGHSSGKPPPKGGGGGGGSGGGGSGGGGSADKTHTCPPCPAPEAAGGPSVFLFPPKPKDTLMISRTPEVTCVVVDVSHEDPEVKFNWYVDGVEVHNAKTKPREEQYNSTYRVVSVLTVLHQDWLNGKEYKCKVSNKALPAPIEKTISKAKGQPREPQVYTLPPSRDELTKNQVSLTCLVKGFYPSDIAVEWESNGQPENNYKTTPPVLDSDGSFFLYSKLTVDKSRWQQGNVFSCSVMHEALHNHYTQKSLSLSPGGGGSGSAHPIPDSSPLLQFGGQVRQRYLYTDDACQTEAHLEIREDGTVGGAADQSPESLLQLKALKPGVIQILGVKTSRFLCQRPDGALYGSLHFDPEACSFRELLLEDGYNVYQSEAHGLPLHLCGNKSPHRDPAPRGPARFLPLPGLPPAPPEPPGILAPQPPDVGSSDPLSMVYPSQGRSPSYAS

SEQ ID NO: 2715 - protein, 471 aa, Artificial Sequence
  Fusion Protein
HSEGTFTSDKSKQLAKRLVRLFIEWLIKGGHSSGKPPPKGGGGGGGSGGGGSGGGGSADKTHTCPPCPAPELLGGPSVFLFPPKPKDTLMISRTPEVTCVVVDVSHEDPEVKFNWYVDGVEVHNAKTKPREEQYNNASRVVSVLTVLHQDWLNGKEYKCKVSNKALPAPIEKTISKAKGQPREPQVYTLPPSRDELTKNQVSLTCLVKGFYPSDIAVEWESNGQPENNYKTTPPVLDSDGSFFLYSKLTVDKSRWQQGNVFSCSVMHEALHNHYTQKSLSLSPGGGGSGSAHPIPDSSPLLQFGGQVRQRYLYTDDACQTEAHLEIREDGTVGGAADQSPESLLQLKALKPGVIQILGVKTSRFLCQRPDGALYGSLHFDPEACSFRELLLEDGYNVYQSEAHGLPLHLPGCKSPHRDPAPRGPARFLPLPGLPPAPPEPPGILAPQPPDVGSSDPLSMVGSQGRSPSYAS

SEQ ID NO: 2716 - protein, 472 aa, Artificial Sequence
  Fusion Protein
HSEGTFTSDKSKQLAKRLVRLFIEWLIKGGHSSGKPPPKGGGGGGGSGGGGSGGGGSADKTHTCPPCPAPELLGGPSVFLFPPKPKDTLMISRTPEVTCVVVDVSHEDPEVKFNWYVDGVEVHNAKTKPREEQYNNASRVVSVLTVLHQDWLNGKEYKCKVSNKALPAPIEKTISKAKGQPREPQVYTLPPSRDELTKNQVSLTCLVKGFYPSDIAVEWESNGQPENNYKTTPPVLDSDGSFFLYSKLTVDKSRWQQGNVFSCSVMHEALHNHYTQKSLSLSPGGGGSGSAHPIPDSSPLLQFGGQVRQRYLYTDDACQTEAHLEIREDGTVGGAADQSPESLLQLKALKPGVIQILGVKTSRFLCQRPDGALYGSLHFDPEACSFRELLLEDGYNVYQSEAHGLPLHLPGCKSPHRDPAPRGPARFLPLPGLPPAPPEPPGILAPQPPDVGSSDPLSMVYPSQGRSPSYAS

SEQ ID NO: 2717 - protein, 471 aa, Artificial Sequence
  Fusion Protein
HSEGTFTSDKSKQLAKRLVRLFIEWLIKGGHSSGKPPPKGGGGGGGSGGGGSGGGGSADKTHTCPPCPAPELLGGPSVFLFPPKPKDTLMISRTPEVTCVVVDVSHEDPEVKFNWYVDGVEVHNAKTKPREEQYNNASRVVSVLTVLHQDWLNGKEYKCKVSNKALPAPIEKTISKAKGQPREPQVYTLPPSRDELTKNQVSLTCLVKGFYPSDIAVEWESNGQPENNYKTTPPVLDSDGSFFLYSKLTVDKSRWQQGNVFSCSVMHEALHNHYTQKSLSLSPGGGGSGSAHPIPDSSPLLQFGGQVRQRYLYTDDACQTEAHLEIREDGTVGGAADQSPESLLQLKALKPGVIQILGVKTSRFLCQRPDGALYGSLHFDPEACSFRELLLEDGYNVYQSEAHGLPLHLCGNKSPHRDPAPRGPARFLPLPGLPPAPPEPPGILAPQPPDVGSSDPLSMVGSQGRSPSYAS

SEQ ID NO: 2718 - protein, 472 aa, Artificial Sequence
  Fusion Protein
HSEGTFTSDKSKQLAKRLVRLFIEWLIKGGHSSGKPPPKGGGGGGGSGGGGSGGGGSADKTHTCPPCPAPELLGGPSVFLFPPKPKDTLMISRTPEVTCVVVDVSHEDPEVKFNWYVDGVEVHNAKTKPREEQYNNASRVVSVLTVLHQDWLNGKEYKCKVSNKALPAPIEKTISKAKGQPREPQVYTLPPSRDELTKNQVSLTCLVKGFYPSDIAVEWESNGQPENNYKTTPPVLDSDGSFFLYSKLTVDKSRWQQGNVFSCSVMHEALHNHYTQKSLSLSPGGGGSGSAHPIPDSSPLLQFGGQVRQRYLYTDDACQTEAHLEIREDGTVGGAADQSPESLLQLKALKPGVIQILGVKTSRFLCQRPDGALYGSLHFDPEACSFRELLLEDGYNVYQSEAHGLPLHLCGNKSPHRDPAPRGPARFLPLPGLPPAPPEPPGILAPQPPDVGSSDPLSMVYPSQGRSPSYAS

SEQ ID NO: 2719 - protein, 474 aa, Artificial Sequence
  Fusion Protein
HSEGTFTSDKSKQLAKRLVRLFIEWLIKGGHSSGKPPPKGGGGGGGSGGGGSGGGGSAESKYGPPCPPCPAPEFEGGPSVFLFPPKPKDTLMISRTPEVTCVVVDVSQEDPEVQFNWYVDGVEVHNAKTKPREEQFNSTYRVVSVLTVLHQDWLNGKEYKCKVSNKGLPSSIEKTISKAKGQPREPQVYTLPPSQEEMTKNQVSLTCLVKGFYPSDIAVEWESNGQPENNYKTTPPVLDSDGSFFLYSRLTVDKSRWQEGNVFSCSVMHEALHNHYTQKSLSLSLGGGGSGSAHPIPDSSPLLQFGGQVRQRYLYTDDACQTEAHLEIREDGTVGGAADQSPESLLQLKALKPGVIQILGVKTSRFLCQRPDGALYGSLHFDPEACSFRELLLEDGYNVYQSEAHGLPLHLPGCKSPHRDPAPRGPARFLPLPGLPPAPPEPPGILAPQPPDVGSSDPLSMVYPSQGRSPSYAS

SEQ ID NO: 2720 - protein, 473 aa, Artificial Sequence
  Fusion Protein
HSEGTFTSDKSKQLAKRLVRLFIEWLIKGGHSSGKPPPKGGGGGGGSGGGGSGGGGSAESKYGPPCPPCPAPEFEGGPSVFLFPPKPKDTLMISRTPEVTCVVVDVSQEDPEVQFNWYVDGVEVHNAKTKPREEQFNSTYRVVSVLTVLHQDWLNGKEYKCKVSNKGLPSSIEKTISKAKGQPREPQVYTLPPSQEEMTKNQVSLTCLVKGFYPSDIAVEWESNGQPENNYKTTPPVLDSDGSFFLYSRLTVDKSRWQEGNVFSCSVMHEALHNHYTQKSLSLSLGGGGSGSAHPIPDSSPLLQFGGQVRQRYLYTDDACQTEAHLEIREDGTVGGAADQSPESLLQLKALKPGVIQILGVKTSRFLCQRPDGALYGSLHFDPEACSFRELLLEDGYNVYQSEAHGLPLHLCGNKSPHRDPAPRGPARFLPLPGLPPAPPEPPGILAPQPPDVGSSDPLSMVGSQGRSPSYAS

SEQ ID NO: 2721 - protein, 474 aa, Artificial Sequence
  Fusion Protein
HSEGTFTSDKSKQLAKRLVRLFIEWLIKGGHSSGKPPPKGGGGGGGSGGGGSGGGGSAESKYGPPCPPCPAPEFEGGPSVFLFPPKPKDTLMISRTPEVTCVVVDVSQEDPEVQFNWYVDGVEVHNAKTKPREEQFNSTYRVVSVLTVLHQDWLNGKEYKCKVSNKGLPSSIEKTISKAKGQPREPQVYTLPPSQEEMTKNQVSLTCLVKGFYPSDIAVEWESNGQPENNYKTTPPVLDSDGSFFLYSRLTVDKSRWQEGNVFSCSVMHEALHNHYTQKSLSLSLGGGGSGSAHPIPDSSPLLQFGGQVRQRYLYTDDACQTEAHLEIREDGTVGGAADQSPESLLQLKALKPGVIQILGVKTSRFLCQRPDGALYGSLHFDPEACSFRELLLEDGYNVYQSEAHGLPLHLCGNKSPHRDPAPRGPARFLPLPGLPPAPPEPPGILAPQPPDVGSSDPLSMVYPSQGRSPSYAS

SEQ ID NO: 2722 - protein, 471 aa, Artificial Sequence
  Fusion Protein
HGEGTFTSDLSKQLAKRLVRLFIEWLIKGGHSSGKPPPKGGGGGGGSGGGGSGGGGSADKTHTCPPCPAPEAAGGPSVFLFPPKPKDTLMISRTPEVTCVVVDVSHEDPEVKFNWYVDGVEVHNAKTKPREEQYNSTYRVVSVLTVLHQDWLNGKEYKCKVSNKALPAPIEKTISKAKGQPREPQVYTLPPSRDELTKNQVSLTCLVKGFYPSDIAVEWESNGQPENNYKTTPPVLDSDGSFFLYSKLTVDKSRWQQGNVFSCSVMHEALHNHYTQKSLSLSPGGGGSGSAHPIPDSSPLLQFGGQVRQRYLYTDDACQTEAHLEIREDGTVGGAADQSPESLLQLKALKPGVIQILGVKTSRFLCQRPDGALYGSLHFDPEACSFRELLLEDGYNVYQSEAHGLPLHLPGCKSPHRDPAPRGPARFLPLPGLPPAPPEPPGILAPQPPDVGSSDPLSMVGSQGRSPSYAS

SEQ ID NO: 2723 - protein, 472 aa, Artificial Sequence
  Fusion Protein
HGEGTFTSDLSKQLAKRLVRLFIEWLIKGGHSSGKPPPKGGGGGGGSGGGGSGGGGSADKTHTCPPCPAPEAAGGPSVFLFPPKPKDTLMISRTPEVTCVVVDVSHEDPEVKFNWYVDGVEVHNAKTKPREEQYNSTYRVVSVLTVLHQDWLNGKEYKCKVSNKALPAPIEKTISKAKGQPREPQVYTLPPSRDELTKNQVSLTCLVKGFYPSDIAVEWESNGQPENNYKTTPPVLDSDGSFFLYSKLTVDKSRWQQGNVFSCSVMHEALHNHYTQKSLSLSPGGGGSGSAHPIPDSSPLLQFGGQVRQRYLYTDDACQTEAHLEIREDGTVGGAADQSPESLLQLKALKPGVIQILGVKTSRFLCQRPDGALYGSLHFDPEACSFRELLLEDGYNVYQSEAHGLPLHLPGCKSPHRDPAPRGPARFLPLPGLPPAPPEPPGILAPQPPDVGSSDPLSMVYPSQGRSPSYAS

SEQ ID NO: 2724 - protein, 471 aa, Artificial Sequence
  Fusion Protein
HGEGTFTSDLSKQLAKRLVRLFIEWLIKGGHSSGKPPPKGGGGGGGSGGGGSGGGGSADKTHTCPPCPAPEAAGGPSVFLFPPKPKDTLMISRTPEVTCVVVDVSHEDPEVKFNWYVDGVEVHNAKTKPREEQYNSTYRVVSVLTVLHQDWLNGKEYKCKVSNKALPAPIEKTISKAKGQPREPQVYTLPPSRDELTKNQVSLTCLVKGFYPSDIAVEWESNGQPENNYKTTPPVLDSDGSFFLYSKLTVDKSRWQQGNVFSCSVMHEALHNHYTQKSLSLSPGGGGSGSAHPIPDSSPLLQFGGQVRQRYLYTDDACQTEAHLEIREDGTVGGAADQSPESLLQLKALKPGVIQILGVKTSRFLCQRPDGALYGSLHFDPEACSFRELLLEDGYNVYQSEAHGLPLHLCGNKSPHRDPAPRGPARFLPLPGLPPAPPEPPGILAPQPPDVGSSDPLSMVGSQGRSPSYAS

SEQ ID NO: 2725 - protein, 472 aa, Artificial Sequence
  Fusion Protein
HGEGTFTSDLSKQLAKRLVRLFIEWLIKGGHSSGKPPPKGGGGGGGSGGGGSGGGGSADKTHTCPPCPAPEAAGGPSVFLFPPKPKDTLMISRTPEVTCVVVDVSHEDPEVKFNWYVDGVEVHNAKTKPREEQYNSTYRVVSVLTVLHQDWLNGKEYKCKVSNKALPAPIEKTISKAKGQPREPQVYTLPPSRDELTKNQVSLTCLVKGFYPSDIAVEWESNGQPENNYKTTPPVLDSDGSFFLYSKLTVDKSRWQQGNVFSCSVMHEALHNHYTQKSLSLSPGGGGSGSAHPIPDSSPLLQFGGQVRQRYLYTDDACQTEAHLEIREDGTVGGAADQSPESLLQLKALKPGVIQILGVKTSRFLCQRPDGALYGSLHFDPEACSFRELLLEDGYNVYQSEAHGLPLHLCGNKSPHRDPAPRGPARFLPLPGLPPAPPEPPGILAPQPPDVGSSDPLSMVYPSQGRSPSYAS

SEQ ID NO: 2726 - protein, 471 aa, Artificial Sequence
  Fusion Protein
HGEGTFTSDLSKQLAKRLVRLFIEWLIKGGHSSGKPPPKGGGGGGGSGGGGSGGGGSADKTHTCPPCPAPELLGGPSVFLFPPKPKDTLMISRTPEVTCVVVDVSHEDPEVKFNWYVDGVEVHNAKTKPREEQYNNASRVVSVLTVLHQDWLNGKEYKCKVSNKALPAPIEKTISKAKGQPREPQVYTLPPSRDELTKNQVSLTCLVKGFYPSDIAVEWESNGQPENNYKTTPPVLDSDGSFFLYSKLTVDKSRWQQGNVFSCSVMHEALHNHYTQKSLSLSPGGGGSGSAHPIPDSSPLLQFGGQVRQRYLYTDDACQTEAHLEIREDGTVGGAADQSPESLLQLKALKPGVIQILGVKTSRFLCQRPDGALYGSLHFDPEACSFRELLLEDGYNVYQSEAHGLPLHLPGCKSPHRDPAPRGPARFLPLPGLPPAPPEPPGILAPQPPDVGSSDPLSMVGSQGRSPSYAS

SEQ ID NO: 2727 - protein, 472 aa, Artificial Sequence
  Fusion Protein
HGEGTFTSDLSKQLAKRLVRLFIEWLIKGGHSSGKPPPKGGGGGGGSGGGGSGGGGSADKTHTCPPCPAPELLGGPSVFLFPPKPKDTLMISRTPEVTCVVVDVSHEDPEVKFNWYVDGVEVHNAKTKPREEQYNNASRVVSVLTVLHQDWLNGKEYKCKVSNKALPAPIEKTISKAKGQPREPQVYTLPPSRDELTKNQVSLTCLVKGFYPSDIAVEWESNGQPENNYKTTPPVLDSDGSFFLYSKLTVDKSRWQQGNVFSCSVMHEALHNHYTQKSLSLSPGGGGSGSAHPIPDSSPLLQFGGQVRQRYLYTDDACQTEAHLEIREDGTVGGAADQSPESLLQLKALKPGVIQILGVKTSRFLCQRPDGALYGSLHFDPEACSFRELLLEDGYNVYQSEAHGLPLHLPGCKSPHRDPAPRGPARFLPLPGLPPAPPEPPGILAPQPPDVGSSDPLSMVYPSQGRSPSYAS

SEQ ID NO: 2728 - protein, 471 aa, Artificial Sequence
  Fusion Protein
HGEGTFTSDLSKQLAKRLVRLFIEWLIKGGHSSGKPPPKGGGGGGGSGGGGSGGGGSADKTHTCPPCPAPELLGGPSVFLFPPKPKDTLMISRTPEVTCVVVDVSHEDPEVKFNWYVDGVEVHNAKTKPREEQYNNASRVVSVLTVLHQDWLNGKEYKCKVSNKALPAPIEKTISKAKGQPREPQVYTLPPSRDELTKNQVSLTCLVKGFYPSDIAVEWESNGQPENNYKTTPPVLDSDGSFFLYSKLTVDKSRWQQGNVFSCSVMHEALHNHYTQKSLSLSPGGGGSGSAHPIPDSSPLLQFGGQVRQRYLYTDDACQTEAHLEIREDGTVGGAADQSPESLLQLKALKPGVIQILGVKTSRFLCQRPDGALYGSLHFDPEACSFRELLLEDGYNVYQSEAHGLPLHLCGNKSPHRDPAPRGPARFLPLPGLPPAPPEPPGILAPQPPDVGSSDPLSMVGSQGRSPSYAS

SEQ ID NO: 2729 - protein, 472 aa, Artificial Sequence
  Fusion Protein
HGEGTFTSDLSKQLAKRLVRLFIEWLIKGGHSSGKPPPKGGGGGGGSGGGGSGGGGSADKTHTCPPCPAPELLGGPSVFLFPPKPKDTLMISRTPEVTCVVVDVSHEDPEVKFNWYVDGVEVHNAKTKPREEQYNNASRVVSVLTVLHQDWLNGKEYKCKVSNKALPAPIEKTISKAKGQPREPQVYTLPPSRDELTKNQVSLTCLVKGFYPSDIAVEWESNGQPENNYKTTPPVLDSDGSFFLYSKLTVDKSRWQQGNVFSCSVMHEALHNHYTQKSLSLSPGGGGSGSAHPIPDSSPLLQFGGQVRQRYLYTDDACQTEAHLEIREDGTVGGAADQSPESLLQLKALKPGVIQILGVKTSRFLCQRPDGALYGSLHFDPEACSFRELLLEDGYNVYQSEAHGLPLHLCGNKSPHRDPAPRGPARFLPLPGLPPAPPEPPGILAPQPPDVGSSDPLSMVYPSQGRSPSYAS

SEQ ID NO: 2730 - protein, 474 aa, Artificial Sequence
  Fusion Protein
HGEGTFTSDLSKQLAKRLVRLFIEWLIKGGHSSGKPPPKGGGGGGGSGGGGSGGGGSAESKYGPPCPPCPAPEFEGGPSVFLFPPKPKDTLMISRTPEVTCVVVDVSQEDPEVQFNWYVDGVEVHNAKTKPREEQFNSTYRVVSVLTVLHQDWLNGKEYKCKVSNKGLPSSIEKTISKAKGQPREPQVYTLPPSQEEMTKNQVSLTCLVKGFYPSDIAVEWESNGQPENNYKTTPPVLDSDGSFFLYSRLTVDKSRWQEGNVFSCSVMHEALHNHYTQKSLSLSLGGGGSGSAHPIPDSSPLLQFGGQVRQRYLYTDDACQTEAHLEIREDGTVGGAADQSPESLLQLKALKPGVIQILGVKTSRFLCQRPDGALYGSLHFDPEACSFRELLLEDGYNVYQSEAHGLPLHLPGCKSPHRDPAPRGPARFLPLPGLPPAPPEPPGILAPQPPDVGSSDPLSMVYPSQGRSPSYAS

SEQ ID NO: 2731 - protein, 473 aa, Artificial Sequence
  Fusion Protein
HGEGTFTSDLSKQLAKRLVRLFIEWLIKGGHSSGKPPPKGGGGGGGSGGGGSGGGGSAESKYGPPCPPCPAPEFEGGPSVFLFPPKPKDTLMISRTPEVTCVVVDVSQEDPEVQFNWYVDGVEVHNAKTKPREEQFNSTYRVVSVLTVLHQDWLNGKEYKCKVSNKGLPSSIEKTISKAKGQPREPQVYTLPPSQEEMTKNQVSLTCLVKGFYPSDIAVEWESNGQPENNYKTTPPVLDSDGSFFLYSRLTVDKSRWQEGNVFSCSVMHEALHNHYTQKSLSLSLGGGGSGSAHPIPDSSPLLQFGGQVRQRYLYTDDACQTEAHLEIREDGTVGGAADQSPESLLQLKALKPGVIQILGVKTSRFLCQRPDGALYGSLHFDPEACSFRELLLEDGYNVYQSEAHGLPLHLCGNKSPHRDPAPRGPARFLPLPGLPPAPPEPPGILAPQPPDVGSSDPLSMVGSQGRSPSYAS

SEQ ID NO: 2732 - protein, 474 aa, Artificial Sequence
  Fusion Protein
HGEGTFTSDLSKQLAKRLVRLFIEWLIKGGHSSGKPPPKGGGGGGGSGGGGSGGGGSAESKYGPPCPPCPAPEFEGGPSVFLFPPKPKDTLMISRTPEVTCVVVDVSQEDPEVQFNWYVDGVEVHNAKTKPREEQFNSTYRVVSVLTVLHQDWLNGKEYKCKVSNKGLPSSIEKTISKAKGQPREPQVYTLPPSQEEMTKNQVSLTCLVKGFYPSDIAVEWESNGQPENNYKTTPPVLDSDGSFFLYSRLTVDKSRWQEGNVFSCSVMHEALHNHYTQKSLSLSLGGGGSGSAHPIPDSSPLLQFGGQVRQRYLYTDDACQTEAHLEIREDGTVGGAADQSPESLLQLKALKPGVIQILGVKTSRFLCQRPDGALYGSLHFDPEACSFRELLLEDGYNVYQSEAHGLPLHLCGNKSPHRDPAPRGPARFLPLPGLPPAPPEPPGILAPQPPDVGSSDPLSMVYPSQGRSPSYAS

SEQ ID NO: 2733 - protein, 471 aa, Artificial Sequence
  Fusion Protein
HGEGTFTSDKSKQLAKRLVREFIEWLIKGGHSSGKPPPKGGGGGGGSGGGGSGGGGSADKTHTCPPCPAPEAAGGPSVFLFPPKPKDTLMISRTPEVTCVVVDVSHEDPEVKFNWYVDGVEVHNAKTKPREEQYNSTYRVVSVLTVLHQDWLNGKEYKCKVSNKALPAPIEKTISKAKGQPREPQVYTLPPSRDELTKNQVSLTCLVKGFYPSDIAVEWESNGQPENNYKTTPPVLDSDGSFFLYSKLTVDKSRWQQGNVFSCSVMHEALHNHYTQKSLSLSPGGGGSGSAHPIPDSSPLLQFGGQVRQRYLYTDDACQTEAHLEIREDGTVGGAADQSPESLLQLKALKPGVIQILGVKTSRFLCQRPDGALYGSLHFDPEACSFRELLLEDGYNVYQSEAHGLPLHLPGCKSPHRDPAPRGPARFLPLPGLPPAPPEPPGILAPQPPDVGSSDPLSMVGSQGRSPSYAS

SEQ ID NO: 2734 - protein, 472 aa, Artificial Sequence
  Fusion Protein
HGEGTFTSDKSKQLAKRLVREFIEWLIKGGHSSGKPPPKGGGGGGGSGGGGSGGGGSADKTHTCPPCPAPEAAGGPSVFLFPPKPKDTLMISRTPEVTCVVVDVSHEDPEVKFNWYVDGVEVHNAKTKPREEQYNSTYRVVSVLTVLHQDWLNGKEYKCKVSNKALPAPIEKTISKAKGQPREPQVYTLPPSRDELTKNQVSLTCLVKGFYPSDIAVEWESNGQPENNYKTTPPVLDSDGSFFLYSKLTVDKSRWQQGNVFSCSVMHEALHNHYTQKSLSLSPGGGGSGSAHPIPDSSPLLQFGGQVRQRYLYTDDACQTEAHLEIREDGTVGGAADQSPESLLQLKALKPGVIQILGVKTSRFLCQRPDGALYGSLHFDPEACSFRELLLEDGYNVYQSEAHGLPLHLPGCKSPHRDPAPRGPARFLPLPGLPPAPPEPPGILAPQPPDVGSSDPLSMVYPSQGRSPSYAS

SEQ ID NO: 2735 - protein, 471 aa, Artificial Sequence
  Fusion Protein
HGEGTFTSDKSKQLAKRLVREFIEWLIKGGHSSGKPPPKGGGGGGGSGGGGSGGGGSADKTHTCPPCPAPEAAGGPSVFLFPPKPKDTLMISRTPEVTCVVVDVSHEDPEVKFNWYVDGVEVHNAKTKPREEQYNSTYRVVSVLTVLHQDWLNGKEYKCKVSNKALPAPIEKTISKAKGQPREPQVYTLPPSRDELTKNQVSLTCLVKGFYPSDIAVEWESNGQPENNYKTTPPVLDSDGSFFLYSKLTVDKSRWQQGNVFSCSVMHEALHNHYTQKSLSLSPGGGGSGSAHPIPDSSPLLQFGGQVRQRYLYTDDACQTEAHLEIREDGTVGGAADQSPESLLQLKALKPGVIQILGVKTSRFLCQRPDGALYGSLHFDPEACSFRELLLEDGYNVYQSEAHGLPLHLCGNKSPHRDPAPRGPARFLPLPGLPPAPPEPPGILAPQPPDVGSSDPLSMVGSQGRSPSYAS

SEQ ID NO: 2736 - protein, 472 aa, Artificial Sequence
  Fusion Protein
HGEGTFTSDKSKQLAKRLVREFIEWLIKGGHSSGKPPPKGGGGGGGSGGGGSGGGGSADKTHTCPPCPAPEAAGGPSVFLFPPKPKDTLMISRTPEVTCVVVDVSHEDPEVKFNWYVDGVEVHNAKTKPREEQYNSTYRVVSVLTVLHQDWLNGKEYKCKVSNKALPAPIEKTISKAKGQPREPQVYTLPPSRDELTKNQVSLTCLVKGFYPSDIAVEWESNGQPENNYKTTPPVLDSDGSFFLYSKLTVDKSRWQQGNVFSCSVMHEALHNHYTQKSLSLSPGGGGSGSAHPIPDSSPLLQFGGQVRQRYLYTDDACQTEAHLEIREDGTVGGAADQSPESLLQLKALKPGVIQILGVKTSRFLCQRPDGALYGSLHFDPEACSFRELLLEDGYNVYQSEAHGLPLHLCGNKSPHRDPAPRGPARFLPLPGLPPAPPEPPGILAPQPPDVGSSDPLSMVYPSQGRSPSYAS

SEQ ID NO: 2737 - protein, 471 aa, Artificial Sequence
  Fusion Protein
HGEGTFTSDKSKQLAKRLVREFIEWLIKGGHSSGKPPPKGGGGGGGSGGGGSGGGGSADKTHTCPPCPAPELLGGPSVFLFPPKPKDTLMISRTPEVTCVVVDVSHEDPEVKFNWYVDGVEVHNAKTKPREEQYNNASRVVSVLTVLHQDWLNGKEYKCKVSNKALPAPIEKTISKAKGQPREPQVYTLPPSRDELTKNQVSLTCLVKGFYPSDIAVEWESNGQPENNYKTTPPVLDSDGSFFLYSKLTVDKSRWQQGNVFSCSVMHEALHNHYTQKSLSLSPGGGGSGSAHPIPDSSPLLQFGGQVRQRYLYTDDACQTEAHLEIREDGTVGGAADQSPESLLQLKALKPGVIQILGVKTSRFLCQRPDGALYGSLHFDPEACSFRELLLEDGYNVYQSEAHGLPLHLPGCKSPHRDPAPRGPARFLPLPGLPPAPPEPPGILAPQPPDVGSSDPLSMVGSQGRSPSYAS

SEQ ID NO: 2738 - protein, 472 aa, Artificial Sequence
  Fusion Protein
HGEGTFTSDKSKQLAKRLVREFIEWLIKGGHSSGKPPPKGGGGGGGSGGGGSGGGGSADKTHTCPPCPAPELLGGPSVFLFPPKPKDTLMISRTPEVTCVVVDVSHEDPEVKFNWYVDGVEVHNAKTKPREEQYNNASRVVSVLTVLHQDWLNGKEYKCKVSNKALPAPIEKTISKAKGQPREPQVYTLPPSRDELTKNQVSLTCLVKGFYPSDIAVEWESNGQPENNYKTTPPVLDSDGSFFLYSKLTVDKSRWQQGNVFSCSVMHEALHNHYTQKSLSLSPGGGGSGSAHPIPDSSPLLQFGGQVRQRYLYTDDACQTEAHLEIREDGTVGGAADQSPESLLQLKALKPGVIQILGVKTSRFLCQRPDGALYGSLHFDPEACSFRELLLEDGYNVYQSEAHGLPLHLPGCKSPHRDPAPRGPARFLPLPGLPPAPPEPPGILAPQPPDVGSSDPLSMVYPSQGRSPSYAS

SEQ ID NO: 2739 - protein, 471 aa, Artificial Sequence
  Fusion Protein
HGEGTFTSDKSKQLAKRLVREFIEWLIKGGHSSGKPPPKGGGGGGGSGGGGSGGGGSADKTHTCPPCPAPELLGGPSVFLFPPKPKDTLMISRTPEVTCVVVDVSHEDPEVKFNWYVDGVEVHNAKTKPREEQYNNASRVVSVLTVLHQDWLNGKEYKCKVSNKALPAPIEKTISKAKGQPREPQVYTLPPSRDELTKNQVSLTCLVKGFYPSDIAVEWESNGQPENNYKTTPPVLDSDGSFFLYSKLTVDKSRWQQGNVFSCSVMHEALHNHYTQKSLSLSPGGGGSGSAHPIPDSSPLLQFGGQVRQRYLYTDDACQTEAHLEIREDGTVGGAADQSPESLLQLKALKPGVIQILGVKTSRFLCQRPDGALYGSLHFDPEACSFRELLLEDGYNVYQSEAHGLPLHLCGNKSPHRDPAPRGPARFLPLPGLPPAPPEPPGILAPQPPDVGSSDPLSMVGSQGRSPSYAS

SEQ ID NO: 2740 - protein, 472 aa, Artificial Sequence
  Fusion Protein
HGEGTFTSDKSKQLAKRLVREFIEWLIKGGHSSGKPPPKGGGGGGGSGGGGSGGGGSADKTHTCPPCPAPELLGGPSVFLFPPKPKDTLMISRTPEVTCVVVDVSHEDPEVKFNWYVDGVEVHNAKTKPREEQYNNASRVVSVLTVLHQDWLNGKEYKCKVSNKALPAPIEKTISKAKGQPREPQVYTLPPSRDELTKNQVSLTCLVKGFYPSDIAVEWESNGQPENNYKTTPPVLDSDGSFFLYSKLTVDKSRWQQGNVFSCSVMHEALHNHYTQKSLSLSPGGGGSGSAHPIPDSSPLLQFGGQVRQRYLYTDDACQTEAHLEIREDGTVGGAADQSPESLLQLKALKPGVIQILGVKTSRFLCQRPDGALYGSLHFDPEACSFRELLLEDGYNVYQSEAHGLPLHLCGNKSPHRDPAPRGPARFLPLPGLPPAPPEPPGILAPQPPDVGSSDPLSMVYPSQGRSPSYAS

SEQ ID NO: 2741 - protein, 474 aa, Artificial Sequence
  Fusion Protein
HGEGTFTSDKSKQLAKRLVREFIEWLIKGGHSSGKPPPKGGGGGGGSGGGGSGGGGSAESKYGPPCPPCPAPEFEGGPSVFLFPPKPKDTLMISRTPEVTCVVVDVSQEDPEVQFNWYVDGVEVHNAKTKPREEQFNSTYRVVSVLTVLHQDWLNGKEYKCKVSNKGLPSSIEKTISKAKGQPREPQVYTLPPSQEEMTKNQVSLTCLVKGFYPSDIAVEWESNGQPENNYKTTPPVLDSDGSFFLYSRLTVDKSRWQEGNVFSCSVMHEALHNHYTQKSLSLSLGGGGSGSAHPIPDSSPLLQFGGQVRQRYLYTDDACQTEAHLEIREDGTVGGAADQSPESLLQLKALKPGVIQILGVKTSRFLCQRPDGALYGSLHFDPEACSFRELLLEDGYNVYQSEAHGLPLHLPGCKSPHRDPAPRGPARFLPLPGLPPAPPEPPGILAPQPPDVGSSDPLSMVYPSQGRSPSYAS

SEQ ID NO: 2742 - protein, 473 aa, Artificial Sequence
  Fusion Protein
HGEGTFTSDKSKQLAKRLVREFIEWLIKGGHSSGKPPPKGGGGGGGSGGGGSGGGGSAESKYGPPCPPCPAPEFEGGPSVFLFPPKPKDTLMISRTPEVTCVVVDVSQEDPEVQFNWYVDGVEVHNAKTKPREEQFNSTYRVVSVLTVLHQDWLNGKEYKCKVSNKGLPSSIEKTISKAKGQPREPQVYTLPPSQEEMTKNQVSLTCLVKGFYPSDIAVEWESNGQPENNYKTTPPVLDSDGSFFLYSRLTVDKSRWQEGNVFSCSVMHEALHNHYTQKSLSLSLGGGGSGSAHPIPDSSPLLQFGGQVRQRYLYTDDACQTEAHLEIREDGTVGGAADQSPESLLQLKALKPGVIQILGVKTSRFLCQRPDGALYGSLHFDPEACSFRELLLEDGYNVYQSEAHGLPLHLCGNKSPHRDPAPRGPARFLPLPGLPPAPPEPPGILAPQPPDVGSSDPLSMVGSQGRSPSYAS

SEQ ID NO: 2743 - protein, 474 aa, Artificial Sequence
  Fusion Protein
HGEGTFTSDKSKQLAKRLVREFIEWLIKGGHSSGKPPPKGGGGGGGSGGGGSGGGGSAESKYGPPCPPCPAPEFEGGPSVFLFPPKPKDTLMISRTPEVTCVVVDVSQEDPEVQFNWYVDGVEVHNAKTKPREEQFNSTYRVVSVLTVLHQDWLNGKEYKCKVSNKGLPSSIEKTISKAKGQPREPQVYTLPPSQEEMTKNQVSLTCLVKGFYPSDIAVEWESNGQPENNYKTTPPVLDSDGSFFLYSRLTVDKSRWQEGNVFSCSVMHEALHNHYTQKSLSLSLGGGGSGSAHPIPDSSPLLQFGGQVRQRYLYTDDACQTEAHLEIREDGTVGGAADQSPESLLQLKALKPGVIQILGVKTSRFLCQRPDGALYGSLHFDPEACSFRELLLEDGYNVYQSEAHGLPLHLCGNKSPHRDPAPRGPARFLPLPGLPPAPPEPPGILAPQPPDVGSSDPLSMVYPSQGRSPSYAS

SEQ ID NO: 2744 - protein, 471 aa, Artificial Sequence
  Fusion Protein
HGEGTFTSDKSKQLAKRLVRHFIEWLIKGGHSSGKPPPKGGGGGGGSGGGGSGGGGSADKTHTCPPCPAPEAAGGPSVFLFPPKPKDTLMISRTPEVTCVVVDVSHEDPEVKFNWYVDGVEVHNAKTKPREEQYNSTYRVVSVLTVLHQDWLNGKEYKCKVSNKALPAPIEKTISKAKGQPREPQVYTLPPSRDELTKNQVSLTCLVKGFYPSDIAVEWESNGQPENNYKTTPPVLDSDGSFFLYSKLTVDKSRWQQGNVFSCSVMHEALHNHYTQKSLSLSPGGGGSGSAHPIPDSSPLLQFGGQVRQRYLYTDDACQTEAHLEIREDGTVGGAADQSPESLLQLKALKPGVIQILGVKTSRFLCQRPDGALYGSLHFDPEACSFRELLLEDGYNVYQSEAHGLPLHLPGCKSPHRDPAPRGPARFLPLPGLPPAPPEPPGILAPQPPDVGSSDPLSMVGSQGRSPSYAS

SEQ ID NO: 2745 - protein, 472 aa, Artificial Sequence
  Fusion Protein
HGEGTFTSDKSKQLAKRLVRHFIEWLIKGGHSSGKPPPKGGGGGGGSGGGGSGGGGSADKTHTCPPCPAPEAAGGPSVFLFPPKPKDTLMISRTPEVTCVVVDVSHEDPEVKFNWYVDGVEVHNAKTKPREEQYNSTYRVVSVLTVLHQDWLNGKEYKCKVSNKALPAPIEKTISKAKGQPREPQVYTLPPSRDELTKNQVSLTCLVKGFYPSDIAVEWESNGQPENNYKTTPPVLDSDGSFFLYSKLTVDKSRWQQGNVFSCSVMHEALHNHYTQKSLSLSPGGGGSGSAHPIPDSSPLLQFGGQVRQRYLYTDDACQTEAHLEIREDGTVGGAADQSPESLLQLKALKPGVIQILGVKTSRFLCQRPDGALYGSLHFDPEACSFRELLLEDGYNVYQSEAHGLPLHLPGCKSPHRDPAPRGPARFLPLPGLPPAPPEPPGILAPQPPDVGSSDPLSMVYPSQGRSPSYAS

SEQ ID NO: 2746 - protein, 471 aa, Artificial Sequence
  Fusion Protein
HGEGTFTSDKSKQLAKRLVRHFIEWLIKGGHSSGKPPPKGGGGGGGSGGGGSGGGGSADKTHTCPPCPAPEAAGGPSVFLFPPKPKDTLMISRTPEVTCVVVDVSHEDPEVKFNWYVDGVEVHNAKTKPREEQYNSTYRVVSVLTVLHQDWLNGKEYKCKVSNKALPAPIEKTISKAKGQPREPQVYTLPPSRDELTKNQVSLTCLVKGFYPSDIAVEWESNGQPENNYKTTPPVLDSDGSFFLYSKLTVDKSRWQQGNVFSCSVMHEALHNHYTQKSLSLSPGGGGSGSAHPIPDSSPLLQFGGQVRQRYLYTDDACQTEAHLEIREDGTVGGAADQSPESLLQLKALKPGVIQILGVKTSRFLCQRPDGALYGSLHFDPEACSFRELLLEDGYNVYQSEAHGLPLHLCGNKSPHRDPAPRGPARFLPLPGLPPAPPEPPGILAPQPPDVGSSDPLSMVGSQGRSPSYAS

SEQ ID NO: 2747 - protein, 472 aa, Artificial Sequence
  Fusion Protein
HGEGTFTSDKSKQLAKRLVRHFIEWLIKGGHSSGKPPPKGGGGGGGSGGGGSGGGGSADKTHTCPPCPAPEAAGGPSVFLFPPKPKDTLMISRTPEVTCVVVDVSHEDPEVKFNWYVDGVEVHNAKTKPREEQYNSTYRVVSVLTVLHQDWLNGKEYKCKVSNKALPAPIEKTISKAKGQPREPQVYTLPPSRDELTKNQVSLTCLVKGFYPSDIAVEWESNGQPENNYKTTPPVLDSDGSFFLYSKLTVDKSRWQQGNVFSCSVMHEALHNHYTQKSLSLSPGGGGSGSAHPIPDSSPLLQFGGQVRQRYLYTDDACQTEAHLEIREDGTVGGAADQSPESLLQLKALKPGVIQILGVKTSRFLCQRPDGALYGSLHFDPEACSFRELLLEDGYNVYQSEAHGLPLHLCGNKSPHRDPAPRGPARFLPLPGLPPAPPEPPGILAPQPPDVGSSDPLSMVYPSQGRSPSYAS

SEQ ID NO: 2748 - protein, 471 aa, Artificial Sequence
  Fusion Protein
HGEGTFTSDKSKQLAKRLVRHFIEWLIKGGHSSGKPPPKGGGGGGGSGGGGSGGGGSADKTHTCPPCPAPELLGGPSVFLFPPKPKDTLMISRTPEVTCVVVDVSHEDPEVKFNWYVDGVEVHNAKTKPREEQYNNASRVVSVLTVLHQDWLNGKEYKCKVSNKALPAPIEKTISKAKGQPREPQVYTLPPSRDELTKNQVSLTCLVKGFYPSDIAVEWESNGQPENNYKTTPPVLDSDGSFFLYSKLTVDKSRWQQGNVFSCSVMHEALHNHYTQKSLSLSPGGGGSGSAHPIPDSSPLLQFGGQVRQRYLYTDDACQTEAHLEIREDGTVGGAADQSPESLLQLKALKPGVIQILGVKTSRFLCQRPDGALYGSLHFDPEACSFRELLLEDGYNVYQSEAHGLPLHLPGCKSPHRDPAPRGPARFLPLPGLPPAPPEPPGILAPQPPDVGSSDPLSMVGSQGRSPSYAS

SEQ ID NO: 2749 - protein, 472 aa, Artificial Sequence
  Fusion Protein
HGEGTFTSDKSKQLAKRLVRHFIEWLIKGGHSSGKPPPKGGGGGGGSGGGGSGGGGSADKTHTCPPCPAPELLGGPSVFLFPPKPKDTLMISRTPEVTCVVVDVSHEDPEVKFNWYVDGVEVHNAKTKPREEQYNNASRVVSVLTVLHQDWLNGKEYKCKVSNKALPAPIEKTISKAKGQPREPQVYTLPPSRDELTKNQVSLTCLVKGFYPSDIAVEWESNGQPENNYKTTPPVLDSDGSFFLYSKLTVDKSRWQQGNVFSCSVMHEALHNHYTQKSLSLSPGGGGSGSAHPIPDSSPLLQFGGQVRQRYLYTDDACQTEAHLEIREDGTVGGAADQSPESLLQLKALKPGVIQILGVKTSRFLCQRPDGALYGSLHFDPEACSFRELLLEDGYNVYQSEAHGLPLHLPGCKSPHRDPAPRGPARFLPLPGLPPAPPEPPGILAPQPPDVGSSDPLSMVYPSQGRSPSYAS

SEQ ID NO: 2750 - protein, 471 aa, Artificial Sequence
  Fusion Protein
HGEGTFTSDKSKQLAKRLVRHFIEWLIKGGHSSGKPPPKGGGGGGGSGGGGSGGGGSADKTHTCPPCPAPELLGGPSVFLFPPKPKDTLMISRTPEVTCVVVDVSHEDPEVKFNWYVDGVEVHNAKTKPREEQYNNASRVVSVLTVLHQDWLNGKEYKCKVSNKALPAPIEKTISKAKGQPREPQVYTLPPSRDELTKNQVSLTCLVKGFYPSDIAVEWESNGQPENNYKTTPPVLDSDGSFFLYSKLTVDKSRWQQGNVFSCSVMHEALHNHYTQKSLSLSPGGGGSGSAHPIPDSSPLLQFGGQVRQRYLYTDDACQTEAHLEIREDGTVGGAADQSPESLLQLKALKPGVIQILGVKTSRFLCQRPDGALYGSLHFDPEACSFRELLLEDGYNVYQSEAHGLPLHLCGNKSPHRDPAPRGPARFLPLPGLPPAPPEPPGILAPQPPDVGSSDPLSMVGSQGRSPSYAS

SEQ ID NO: 2751 - protein, 472 aa, Artificial Sequence
  Fusion Protein
HGEGTFTSDKSKQLAKRLVRHFIEWLIKGGHSSGKPPPKGGGGGGGSGGGGSGGGGSADKTHTCPPCPAPELLGGPSVFLFPPKPKDTLMISRTPEVTCVVVDVSHEDPEVKFNWYVDGVEVHNAKTKPREEQYNNASRVVSVLTVLHQDWLNGKEYKCKVSNKALPAPIEKTISKAKGQPREPQVYTLPPSRDELTKNQVSLTCLVKGFYPSDIAVEWESNGQPENNYKTTPPVLDSDGSFFLYSKLTVDKSRWQQGNVFSCSVMHEALHNHYTQKSLSLSPGGGGSGSAHPIPDSSPLLQFGGQVRQRYLYTDDACQTEAHLEIREDGTVGGAADQSPESLLQLKALKPGVIQILGVKTSRFLCQRPDGALYGSLHFDPEACSFRELLLEDGYNVYQSEAHGLPLHLCGNKSPHRDPAPRGPARFLPLPGLPPAPPEPPGILAPQPPDVGSSDPLSMVYPSQGRSPSYAS

SEQ ID NO: 2752 - protein, 474 aa, Artificial Sequence
  Fusion Protein
HGEGTFTSDKSKQLAKRLVRHFIEWLIKGGHSSGKPPPKGGGGGGGSGGGGSGGGGSAESKYGPPCPPCPAPEFEGGPSVFLFPPKPKDTLMISRTPEVTCVVVDVSQEDPEVQFNWYVDGVEVHNAKTKPREEQFNSTYRVVSVLTVLHQDWLNGKEYKCKVSNKGLPSSIEKTISKAKGQPREPQVYTLPPSQEEMTKNQVSLTCLVKGFYPSDIAVEWESNGQPENNYKTTPPVLDSDGSFFLYSRLTVDKSRWQEGNVFSCSVMHEALHNHYTQKSLSLSLGGGGSGSAHPIPDSSPLLQFGGQVRQRYLYTDDACQTEAHLEIREDGTVGGAADQSPESLLQLKALKPGVIQILGVKTSRFLCQRPDGALYGSLHFDPEACSFRELLLEDGYNVYQSEAHGLPLHLPGCKSPHRDPAPRGPARFLPLPGLPPAPPEPPGILAPQPPDVGSSDPLSMVYPSQGRSPSYAS

SEQ ID NO: 2753 - protein, 473 aa, Artificial Sequence
  Fusion Protein
HGEGTFTSDKSKQLAKRLVRHFIEWLIKGGHSSGKPPPKGGGGGGGSGGGGSGGGGSAESKYGPPCPPCPAPEFEGGPSVFLFPPKPKDTLMISRTPEVTCVVVDVSQEDPEVQFNWYVDGVEVHNAKTKPREEQFNSTYRVVSVLTVLHQDWLNGKEYKCKVSNKGLPSSIEKTISKAKGQPREPQVYTLPPSQEEMTKNQVSLTCLVKGFYPSDIAVEWESNGQPENNYKTTPPVLDSDGSFFLYSRLTVDKSRWQEGNVFSCSVMHEALHNHYTQKSLSLSLGGGGSGSAHPIPDSSPLLQFGGQVRQRYLYTDDACQTEAHLEIREDGTVGGAADQSPESLLQLKALKPGVIQILGVKTSRFLCQRPDGALYGSLHFDPEACSFRELLLEDGYNVYQSEAHGLPLHLCGNKSPHRDPAPRGPARFLPLPGLPPAPPEPPGILAPQPPDVGSSDPLSMVGSQGRSPSYAS

SEQ ID NO: 2754 - protein, 474 aa, Artificial Sequence
  Fusion Protein
HGEGTFTSDKSKQLAKRLVRHFIEWLIKGGHSSGKPPPKGGGGGGGSGGGGSGGGGSAESKYGPPCPPCPAPEFEGGPSVFLFPPKPKDTLMISRTPEVTCVVVDVSQEDPEVQFNWYVDGVEVHNAKTKPREEQFNSTYRVVSVLTVLHQDWLNGKEYKCKVSNKGLPSSIEKTISKAKGQPREPQVYTLPPSQEEMTKNQVSLTCLVKGFYPSDIAVEWESNGQPENNYKTTPPVLDSDGSFFLYSRLTVDKSRWQEGNVFSCSVMHEALHNHYTQKSLSLSLGGGGSGSAHPIPDSSPLLQFGGQVRQRYLYTDDACQTEAHLEIREDGTVGGAADQSPESLLQLKALKPGVIQILGVKTSRFLCQRPDGALYGSLHFDPEACSFRELLLEDGYNVYQSEAHGLPLHLCGNKSPHRDPAPRGPARFLPLPGLPPAPPEPPGILAPQPPDVGSSDPLSMVYPSQGRSPSYAS

SEQ ID NO: 2755 - protein, 471 aa, Artificial Sequence
  Fusion Protein
HGEGTFTSDLSKQLAKRLVREFIEWLIKGGHSSGKPPPKGGGGGGGSGGGGSGGGGSADKTHTCPPCPAPEAAGGPSVFLFPPKPKDTLMISRTPEVTCVVVDVSHEDPEVKFNWYVDGVEVHNAKTKPREEQYNSTYRVVSVLTVLHQDWLNGKEYKCKVSNKALPAPIEKTISKAKGQPREPQVYTLPPSRDELTKNQVSLTCLVKGFYPSDIAVEWESNGQPENNYKTTPPVLDSDGSFFLYSKLTVDKSRWQQGNVFSCSVMHEALHNHYTQKSLSLSPGGGGSGSAHPIPDSSPLLQFGGQVRQRYLYTDDACQTEAHLEIREDGTVGGAADQSPESLLQLKALKPGVIQILGVKTSRFLCQRPDGALYGSLHFDPEACSFRELLLEDGYNVYQSEAHGLPLHLPGCKSPHRDPAPRGPARFLPLPGLPPAPPEPPGILAPQPPDVGSSDPLSMVGSQGRSPSYAS

SEQ ID NO: 2756 - protein, 472 aa, Artificial Sequence
  Fusion Protein
HGEGTFTSDLSKQLAKRLVREFIEWLIKGGHSSGKPPPKGGGGGGGSGGGGSGGGGSADKTHTCPPCPAPEAAGGPSVFLFPPKPKDTLMISRTPEVTCVVVDVSHEDPEVKFNWYVDGVEVHNAKTKPREEQYNSTYRVVSVLTVLHQDWLNGKEYKCKVSNKALPAPIEKTISKAKGQPREPQVYTLPPSRDELTKNQVSLTCLVKGFYPSDIAVEWESNGQPENNYKTTPPVLDSDGSFFLYSKLTVDKSRWQQGNVFSCSVMHEALHNHYTQKSLSLSPGGGGSGSAHPIPDSSPLLQFGGQVRQRYLYTDDACQTEAHLEIREDGTVGGAADQSPESLLQLKALKPGVIQILGVKTSRFLCQRPDGALYGSLHFDPEACSFRELLLEDGYNVYQSEAHGLPLHLPGCKSPHRDPAPRGPARFLPLPGLPPAPPEPPGILAPQPPDVGSSDPLSMVYPSQGRSPSYAS

SEQ ID NO: 2757 - protein, 471 aa, Artificial Sequence
  Fusion Protein
HGEGTFTSDLSKQLAKRLVREFIEWLIKGGHSSGKPPPKGGGGGGGSGGGGSGGGGSADKTHTCPPCPAPEAAGGPSVFLFPPKPKDTLMISRTPEVTCVVVDVSHEDPEVKFNWYVDGVEVHNAKTKPREEQYNSTYRVVSVLTVLHQDWLNGKEYKCKVSNKALPAPIEKTISKAKGQPREPQVYTLPPSRDELTKNQVSLTCLVKGFYPSDIAVEWESNGQPENNYKTTPPVLDSDGSFFLYSKLTVDKSRWQQGNVFSCSVMHEALHNHYTQKSLSLSPGGGGSGSAHPIPDSSPLLQFGGQVRQRYLYTDDACQTEAHLEIREDGTVGGAADQSPESLLQLKALKPGVIQILGVKTSRFLCQRPDGALYGSLHFDPEACSFRELLLEDGYNVYQSEAHGLPLHLCGNKSPHRDPAPRGPARFLPLPGLPPAPPEPPGILAPQPPDVGSSDPLSMVGSQGRSPSYAS

SEQ ID NO: 2758 - protein, 472 aa, Artificial Sequence
  Fusion Protein
HGEGTFTSDLSKQLAKRLVREFIEWLIKGGHSSGKPPPKGGGGGGGSGGGGSGGGGSADKTHTCPPCPAPEAAGGPSVFLFPPKPKDTLMISRTPEVTCVVVDVSHEDPEVKFNWYVDGVEVHNAKTKPREEQYNSTYRVVSVLTVLHQDWLNGKEYKCKVSNKALPAPIEKTISKAKGQPREPQVYTLPPSRDELTKNQVSLTCLVKGFYPSDIAVEWESNGQPENNYKTTPPVLDSDGSFFLYSKLTVDKSRWQQGNVFSCSVMHEALHNHYTQKSLSLSPGGGGSGSAHPIPDSSPLLQFGGQVRQRYLYTDDACQTEAHLEIREDGTVGGAADQSPESLLQLKALKPGVIQILGVKTSRFLCQRPDGALYGSLHFDPEACSFRELLLEDGYNVYQSEAHGLPLHLCGNKSPHRDPAPRGPARFLPLPGLPPAPPEPPGILAPQPPDVGSSDPLSMVYPSQGRSPSYAS

SEQ ID NO: 2759 - protein, 471 aa, Artificial Sequence
  Fusion Protein
HGEGTFTSDLSKQLAKRLVREFIEWLIKGGHSSGKPPPKGGGGGGGSGGGGSGGGGSADKTHTCPPCPAPELLGGPSVFLFPPKPKDTLMISRTPEVTCVVVDVSHEDPEVKFNWYVDGVEVHNAKTKPREEQYNNASRVVSVLTVLHQDWLNGKEYKCKVSNKALPAPIEKTISKAKGQPREPQVYTLPPSRDELTKNQVSLTCLVKGFYPSDIAVEWESNGQPENNYKTTPPVLDSDGSFFLYSKLTVDKSRWQQGNVFSCSVMHEALHNHYTQKSLSLSPGGGGSGSAHPIPDSSPLLQFGGQVRQRYLYTDDACQTEAHLEIREDGTVGGAADQSPESLLQLKALKPGVIQILGVKTSRFLCQRPDGALYGSLHFDPEACSFRELLLEDGYNVYQSEAHGLPLHLPGCKSPHRDPAPRGPARFLPLPGLPPAPPEPPGILAPQPPDVGSSDPLSMVGSQGRSPSYAS

SEQ ID NO: 2760 - protein, 472 aa, Artificial Sequence
  Fusion Protein
HGEGTFTSDLSKQLAKRLVREFIEWLIKGGHSSGKPPPKGGGGGGGSGGGGSGGGGSADKTHTCPPCPAPELLGGPSVFLFPPKPKDTLMISRTPEVTCVVVDVSHEDPEVKFNWYVDGVEVHNAKTKPREEQYNNASRVVSVLTVLHQDWLNGKEYKCKVSNKALPAPIEKTISKAKGQPREPQVYTLPPSRDELTKNQVSLTCLVKGFYPSDIAVEWESNGQPENNYKTTPPVLDSDGSFFLYSKLTVDKSRWQQGNVFSCSVMHEALHNHYTQKSLSLSPGGGGSGSAHPIPDSSPLLQFGGQVRQRYLYTDDACQTEAHLEIREDGTVGGAADQSPESLLQLKALKPGVIQILGVKTSRFLCQRPDGALYGSLHFDPEACSFRELLLEDGYNVYQSEAHGLPLHLPGCKSPHRDPAPRGPARFLPLPGLPPAPPEPPGILAPQPPDVGSSDPLSMVYPSQGRSPSYAS

SEQ ID NO: 2761 - protein, 471 aa, Artificial Sequence
  Fusion Protein
HGEGTFTSDLSKQLAKRLVREFIEWLIKGGHSSGKPPPKGGGGGGGSGGGGSGGGGSADKTHTCPPCPAPELLGGPSVFLFPPKPKDTLMISRTPEVTCVVVDVSHEDPEVKFNWYVDGVEVHNAKTKPREEQYNNASRVVSVLTVLHQDWLNGKEYKCKVSNKALPAPIEKTISKAKGQPREPQVYTLPPSRDELTKNQVSLTCLVKGFYPSDIAVEWESNGQPENNYKTTPPVLDSDGSFFLYSKLTVDKSRWQQGNVFSCSVMHEALHNHYTQKSLSLSPGGGGSGSAHPIPDSSPLLQFGGQVRQRYLYTDDACQTEAHLEIREDGTVGGAADQSPESLLQLKALKPGVIQILGVKTSRFLCQRPDGALYGSLHFDPEACSFRELLLEDGYNVYQSEAHGLPLHLCGNKSPHRDPAPRGPARFLPLPGLPPAPPEPPGILAPQPPDVGSSDPLSMVGSQGRSPSYAS

SEQ ID NO: 2762 - protein, 472 aa, Artificial Sequence
  Fusion Protein
HGEGTFTSDLSKQLAKRLVREFIEWLIKGGHSSGKPPPKGGGGGGGSGGGGSGGGGSADKTHTCPPCPAPELLGGPSVFLFPPKPKDTLMISRTPEVTCVVVDVSHEDPEVKFNWYVDGVEVHNAKTKPREEQYNNASRVVSVLTVLHQDWLNGKEYKCKVSNKALPAPIEKTISKAKGQPREPQVYTLPPSRDELTKNQVSLTCLVKGFYPSDIAVEWESNGQPENNYKTTPPVLDSDGSFFLYSKLTVDKSRWQQGNVFSCSVMHEALHNHYTQKSLSLSPGGGGSGSAHPIPDSSPLLQFGGQVRQRYLYTDDACQTEAHLEIREDGTVGGAADQSPESLLQLKALKPGVIQILGVKTSRFLCQRPDGALYGSLHFDPEACSFRELLLEDGYNVYQSEAHGLPLHLCGNKSPHRDPAPRGPARFLPLPGLPPAPPEPPGILAPQPPDVGSSDPLSMVYPSQGRSPSYAS

SEQ ID NO: 2763 - protein, 474 aa, Artificial Sequence
  Fusion Protein
HGEGTFTSDLSKQLAKRLVREFIEWLIKGGHSSGKPPPKGGGGGGGSGGGGSGGGGSAESKYGPPCPPCPAPEFEGGPSVFLFPPKPKDTLMISRTPEVTCVVVDVSQEDPEVQFNWYVDGVEVHNAKTKPREEQFNSTYRVVSVLTVLHQDWLNGKEYKCKVSNKGLPSSIEKTISKAKGQPREPQVYTLPPSQEEMTKNQVSLTCLVKGFYPSDIAVEWESNGQPENNYKTTPPVLDSDGSFFLYSRLTVDKSRWQEGNVFSCSVMHEALHNHYTQKSLSLSLGGGGSGSAHPIPDSSPLLQFGGQVRQRYLYTDDACQTEAHLEIREDGTVGGAADQSPESLLQLKALKPGVIQILGVKTSRFLCQRPDGALYGSLHFDPEACSFRELLLEDGYNVYQSEAHGLPLHLPGCKSPHRDPAPRGPARFLPLPGLPPAPPEPPGILAPQPPDVGSSDPLSMVYPSQGRSPSYAS

SEQ ID NO: 2764 - protein, 473 aa, Artificial Sequence
  Fusion Protein
HGEGTFTSDLSKQLAKRLVREFIEWLIKGGHSSGKPPPKGGGGGGGSGGGGSGGGGSAESKYGPPCPPCPAPEFEGGPSVFLFPPKPKDTLMISRTPEVTCVVVDVSQEDPEVQFNWYVDGVEVHNAKTKPREEQFNSTYRVVSVLTVLHQDWLNGKEYKCKVSNKGLPSSIEKTISKAKGQPREPQVYTLPPSQEEMTKNQVSLTCLVKGFYPSDIAVEWESNGQPENNYKTTPPVLDSDGSFFLYSRLTVDKSRWQEGNVFSCSVMHEALHNHYTQKSLSLSLGGGGSGSAHPIPDSSPLLQFGGQVRQRYLYTDDACQTEAHLEIREDGTVGGAADQSPESLLQLKALKPGVIQILGVKTSRFLCQRPDGALYGSLHFDPEACSFRELLLEDGYNVYQSEAHGLPLHLCGNKSPHRDPAPRGPARFLPLPGLPPAPPEPPGILAPQPPDVGSSDPLSMVGSQGRSPSYAS

SEQ ID NO: 2765 - protein, 474 aa, Artificial Sequence
  Fusion Protein
HGEGTFTSDLSKQLAKRLVREFIEWLIKGGHSSGKPPPKGGGGGGGSGGGGSGGGGSAESKYGPPCPPCPAPEFEGGPSVFLFPPKPKDTLMISRTPEVTCVVVDVSQEDPEVQFNWYVDGVEVHNAKTKPREEQFNSTYRVVSVLTVLHQDWLNGKEYKCKVSNKGLPSSIEKTISKAKGQPREPQVYTLPPSQEEMTKNQVSLTCLVKGFYPSDIAVEWESNGQPENNYKTTPPVLDSDGSFFLYSRLTVDKSRWQEGNVFSCSVMHEALHNHYTQKSLSLSLGGGGSGSAHPIPDSSPLLQFGGQVRQRYLYTDDACQTEAHLEIREDGTVGGAADQSPESLLQLKALKPGVIQILGVKTSRFLCQRPDGALYGSLHFDPEACSFRELLLEDGYNVYQSEAHGLPLHLCGNKSPHRDPAPRGPARFLPLPGLPPAPPEPPGILAPQPPDVGSSDPLSMVYPSQGRSPSYAS

SEQ ID NO: 2766 - protein, 471 aa, Artificial Sequence
  Fusion Protein
HGEGTFTSDLSKQLAKRLVREFIEWLIEGGHSSGKPPPKGGGGGGGSGGGGSGGGGSADKTHTCPPCPAPEAAGGPSVFLFPPKPKDTLMISRTPEVTCVVVDVSHEDPEVKFNWYVDGVEVHNAKTKPREEQYNSTYRVVSVLTVLHQDWLNGKEYKCKVSNKALPAPIEKTISKAKGQPREPQVYTLPPSRDELTKNQVSLTCLVKGFYPSDIAVEWESNGQPENNYKTTPPVLDSDGSFFLYSKLTVDKSRWQQGNVFSCSVMHEALHNHYTQKSLSLSPGGGGSGSAHPIPDSSPLLQFGGQVRQRYLYTDDACQTEAHLEIREDGTVGGAADQSPESLLQLKALKPGVIQILGVKTSRFLCQRPDGALYGSLHFDPEACSFRELLLEDGYNVYQSEAHGLPLHLPGCKSPHRDPAPRGPARFLPLPGLPPAPPEPPGILAPQPPDVGSSDPLSMVGSQGRSPSYAS

SEQ ID NO: 2767 - protein, 472 aa, Artificial Sequence
  Fusion Protein
HGEGTFTSDLSKQLAKRLVREFIEWLIEGGHSSGKPPPKGGGGGGGSGGGGSGGGGSADKTHTCPPCPAPEAAGGPSVFLFPPKPKDTLMISRTPEVTCVVVDVSHEDPEVKFNWYVDGVEVHNAKTKPREEQYNSTYRVVSVLTVLHQDWLNGKEYKCKVSNKALPAPIEKTISKAKGQPREPQVYTLPPSRDELTKNQVSLTCLVKGFYPSDIAVEWESNGQPENNYKTTPPVLDSDGSFFLYSKLTVDKSRWQQGNVFSCSVMHEALHNHYTQKSLSLSPGGGGSGSAHPIPDSSPLLQFGGQVRQRYLYTDDACQTEAHLEIREDGTVGGAADQSPESLLQLKALKPGVIQILGVKTSRFLCQRPDGALYGSLHFDPEACSFRELLLEDGYNVYQSEAHGLPLHLPGCKSPHRDPAPRGPARFLPLPGLPPAPPEPPGILAPQPPDVGSSDPLSMVYPSQGRSPSYAS

SEQ ID NO: 2768 - protein, 471 aa, Artificial Sequence
  Fusion Protein
HGEGTFTSDLSKQLAKRLVREFIEWLIEGGHSSGKPPPKGGGGGGGSGGGGSGGGGSADKTHTCPPCPAPEAAGGPSVFLFPPKPKDTLMISRTPEVTCVVVDVSHEDPEVKFNWYVDGVEVHNAKTKPREEQYNSTYRVVSVLTVLHQDWLNGKEYKCKVSNKALPAPIEKTISKAKGQPREPQVYTLPPSRDELTKNQVSLTCLVKGFYPSDIAVEWESNGQPENNYKTTPPVLDSDGSFFLYSKLTVDKSRWQQGNVFSCSVMHEALHNHYTQKSLSLSPGGGGSGSAHPIPDSSPLLQFGGQVRQRYLYTDDACQTEAHLEIREDGTVGGAADQSPESLLQLKALKPGVIQILGVKTSRFLCQRPDGALYGSLHFDPEACSFRELLLEDGYNVYQSEAHGLPLHLCGNKSPHRDPAPRGPARFLPLPGLPPAPPEPPGILAPQPPDVGSSDPLSMVGSQGRSPSYAS

SEQ ID NO: 2769 - protein, 472 aa, Artificial Sequence
  Fusion Protein
HGEGTFTSDLSKQLAKRLVREFIEWLIEGGHSSGKPPPKGGGGGGGSGGGGSGGGGSADKTHTCPPCPAPEAAGGPSVFLFPPKPKDTLMISRTPEVTCVVVDVSHEDPEVKFNWYVDGVEVHNAKTKPREEQYNSTYRVVSVLTVLHQDWLNGKEYKCKVSNKALPAPIEKTISKAKGQPREPQVYTLPPSRDELTKNQVSLTCLVKGFYPSDIAVEWESNGQPENNYKTTPPVLDSDGSFFLYSKLTVDKSRWQQGNVFSCSVMHEALHNHYTQKSLSLSPGGGGSGSAHPIPDSSPLLQFGGQVRQRYLYTDDACQTEAHLEIREDGTVGGAADQSPESLLQLKALKPGVIQILGVKTSRFLCQRPDGALYGSLHFDPEACSFRELLLEDGYNVYQSEAHGLPLHLCGNKSPHRDPAPRGPARFLPLPGLPPAPPEPPGILAPQPPDVGSSDPLSMVYPSQGRSPSYAS

SEQ ID NO: 2770 - protein, 471 aa, Artificial Sequence
  Fusion Protein
HGEGTFTSDLSKQLAKRLVREFIEWLIEGGHSSGKPPPKGGGGGGGSGGGGSGGGGSADKTHTCPPCPAPELLGGPSVFLFPPKPKDTLMISRTPEVTCVVVDVSHEDPEVKFNWYVDGVEVHNAKTKPREEQYNNASRVVSVLTVLHQDWLNGKEYKCKVSNKALPAPIEKTISKAKGQPREPQVYTLPPSRDELTKNQVSLTCLVKGFYPSDIAVEWESNGQPENNYKTTPPVLDSDGSFFLYSKLTVDKSRWQQGNVFSCSVMHEALHNHYTQKSLSLSPGGGGSGSAHPIPDSSPLLQFGGQVRQRYLYTDDACQTEAHLEIREDGTVGGAADQSPESLLQLKALKPGVIQILGVKTSRFLCQRPDGALYGSLHFDPEACSFRELLLEDGYNVYQSEAHGLPLHLPGCKSPHRDPAPRGPARFLPLPGLPPAPPEPPGILAPQPPDVGSSDPLSMVGSQGRSPSYAS

SEQ ID NO: 2771 - protein, 472 aa, Artificial Sequence
  Fusion Protein
HGEGTFTSDLSKQLAKRLVREFIEWLIEGGHSSGKPPPKGGGGGGGSGGGGSGGGGSADKTHTCPPCPAPELLGGPSVFLFPPKPKDTLMISRTPEVTCVVVDVSHEDPEVKFNWYVDGVEVHNAKTKPREEQYNNASRVVSVLTVLHQDWLNGKEYKCKVSNKALPAPIEKTISKAKGQPREPQVYTLPPSRDELTKNQVSLTCLVKGFYPSDIAVEWESNGQPENNYKTTPPVLDSDGSFFLYSKLTVDKSRWQQGNVFSCSVMHEALHNHYTQKSLSLSPGGGGSGSAHPIPDSSPLLQFGGQVRQRYLYTDDACQTEAHLEIREDGTVGGAADQSPESLLQLKALKPGVIQILGVKTSRFLCQRPDGALYGSLHFDPEACSFRELLLEDGYNVYQSEAHGLPLHLPGCKSPHRDPAPRGPARFLPLPGLPPAPPEPPGILAPQPPDVGSSDPLSMVYPSQGRSPSYAS

SEQ ID NO: 2772 - protein, 471 aa, Artificial Sequence
  Fusion Protein
HGEGTFTSDLSKQLAKRLVREFIEWLIEGGHSSGKPPPKGGGGGGGSGGGGSGGGGSADKTHTCPPCPAPELLGGPSVFLFPPKPKDTLMISRTPEVTCVVVDVSHEDPEVKFNWYVDGVEVHNAKTKPREEQYNNASRVVSVLTVLHQDWLNGKEYKCKVSNKALPAPIEKTISKAKGQPREPQVYTLPPSRDELTKNQVSLTCLVKGFYPSDIAVEWESNGQPENNYKTTPPVLDSDGSFFLYSKLTVDKSRWQQGNVFSCSVMHEALHNHYTQKSLSLSPGGGGSGSAHPIPDSSPLLQFGGQVRQRYLYTDDACQTEAHLEIREDGTVGGAADQSPESLLQLKALKPGVIQILGVKTSRFLCQRPDGALYGSLHFDPEACSFRELLLEDGYNVYQSEAHGLPLHLCGNKSPHRDPAPRGPARFLPLPGLPPAPPEPPGILAPQPPDVGSSDPLSMVGSQGRSPSYAS

SEQ ID NO: 2773 - protein, 472 aa, Artificial Sequence
  Fusion Protein
HGEGTFTSDLSKQLAKRLVREFIEWLIEGGHSSGKPPPKGGGGGGGSGGGGSGGGGSADKTHTCPPCPAPELLGGPSVFLFPPKPKDTLMISRTPEVTCVVVDVSHEDPEVKFNWYVDGVEVHNAKTKPREEQYNNASRVVSVLTVLHQDWLNGKEYKCKVSNKALPAPIEKTISKAKGQPREPQVYTLPPSRDELTKNQVSLTCLVKGFYPSDIAVEWESNGQPENNYKTTPPVLDSDGSFFLYSKLTVDKSRWQQGNVFSCSVMHEALHNHYTQKSLSLSPGGGGSGSAHPIPDSSPLLQFGGQVRQRYLYTDDACQTEAHLEIREDGTVGGAADQSPESLLQLKALKPGVIQILGVKTSRFLCQRPDGALYGSLHFDPEACSFRELLLEDGYNVYQSEAHGLPLHLCGNKSPHRDPAPRGPARFLPLPGLPPAPPEPPGILAPQPPDVGSSDPLSMVYPSQGRSPSYAS

SEQ ID NO: 2774 - protein, 474 aa, Artificial Sequence
  Fusion Protein
HGEGTFTSDLSKQLAKRLVREFIEWLIEGGHSSGKPPPKGGGGGGGSGGGGSGGGGSAESKYGPPCPPCPAPEFEGGPSVFLFPPKPKDTLMISRTPEVTCVVVDVSQEDPEVQFNWYVDGVEVHNAKTKPREEQFNSTYRVVSVLTVLHQDWLNGKEYKCKVSNKGLPSSIEKTISKAKGQPREPQVYTLPPSQEEMTKNQVSLTCLVKGFYPSDIAVEWESNGQPENNYKTTPPVLDSDGSFFLYSRLTVDKSRWQEGNVFSCSVMHEALHNHYTQKSLSLSLGGGGSGSAHPIPDSSPLLQFGGQVRQRYLYTDDACQTEAHLEIREDGTVGGAADQSPESLLQLKALKPGVIQILGVKTSRFLCQRPDGALYGSLHFDPEACSFRELLLEDGYNVYQSEAHGLPLHLPGCKSPHRDPAPRGPARFLPLPGLPPAPPEPPGILAPQPPDVGSSDPLSMVYPSQGRSPSYAS

SEQ ID NO: 2775 - protein, 473 aa, Artificial Sequence
  Fusion Protein
HGEGTFTSDLSKQLAKRLVREFIEWLIEGGHSSGKPPPKGGGGGGGSGGGGSGGGGSAESKYGPPCPPCPAPEFEGGPSVFLFPPKPKDTLMISRTPEVTCVVVDVSQEDPEVQFNWYVDGVEVHNAKTKPREEQFNSTYRVVSVLTVLHQDWLNGKEYKCKVSNKGLPSSIEKTISKAKGQPREPQVYTLPPSQEEMTKNQVSLTCLVKGFYPSDIAVEWESNGQPENNYKTTPPVLDSDGSFFLYSRLTVDKSRWQEGNVFSCSVMHEALHNHYTQKSLSLSLGGGGSGSAHPIPDSSPLLQFGGQVRQRYLYTDDACQTEAHLEIREDGTVGGAADQSPESLLQLKALKPGVIQILGVKTSRFLCQRPDGALYGSLHFDPEACSFRELLLEDGYNVYQSEAHGLPLHLCGNKSPHRDPAPRGPARFLPLPGLPPAPPEPPGILAPQPPDVGSSDPLSMVGSQGRSPSYAS

SEQ ID NO: 2776 - protein, 474 aa, Artificial Sequence
  Fusion Protein
HGEGTFTSDLSKQLAKRLVREFIEWLIEGGHSSGKPPPKGGGGGGGSGGGGSGGGGSAESKYGPPCPPCPAPEFEGGPSVFLFPPKPKDTLMISRTPEVTCVVVDVSQEDPEVQFNWYVDGVEVHNAKTKPREEQFNSTYRVVSVLTVLHQDWLNGKEYKCKVSNKGLPSSIEKTISKAKGQPREPQVYTLPPSQEEMTKNQVSLTCLVKGFYPSDIAVEWESNGQPENNYKTTPPVLDSDGSFFLYSRLTVDKSRWQEGNVFSCSVMHEALHNHYTQKSLSLSLGGGGSGSAHPIPDSSPLLQFGGQVRQRYLYTDDACQTEAHLEIREDGTVGGAADQSPESLLQLKALKPGVIQILGVKTSRFLCQRPDGALYGSLHFDPEACSFRELLLEDGYNVYQSEAHGLPLHLCGNKSPHRDPAPRGPARFLPLPGLPPAPPEPPGILAPQPPDVGSSDPLSMVYPSQGRSPSYAS

SEQ ID NO: 2777 - protein, 471 aa, Artificial Sequence
  Fusion Protein
HGEGTFTSDKSKQLAKRLVREFIEWLIEGGHSSGKPPPKGGGGGGGSGGGGSGGGGSADKTHTCPPCPAPEAAGGPSVFLFPPKPKDTLMISRTPEVTCVVVDVSHEDPEVKFNWYVDGVEVHNAKTKPREEQYNSTYRVVSVLTVLHQDWLNGKEYKCKVSNKALPAPIEKTISKAKGQPREPQVYTLPPSRDELTKNQVSLTCLVKGFYPSDIAVEWESNGQPENNYKTTPPVLDSDGSFFLYSKLTVDKSRWQQGNVFSCSVMHEALHNHYTQKSLSLSPGGGGSGSAHPIPDSSPLLQFGGQVRQRYLYTDDACQTEAHLEIREDGTVGGAADQSPESLLQLKALKPGVIQILGVKTSRFLCQRPDGALYGSLHFDPEACSFRELLLEDGYNVYQSEAHGLPLHLPGCKSPHRDPAPRGPARFLPLPGLPPAPPEPPGILAPQPPDVGSSDPLSMVGSQGRSPSYAS

SEQ ID NO: 2778 - protein, 472 aa, Artificial Sequence
  Fusion Protein
HGEGTFTSDKSKQLAKRLVREFIEWLIEGGHSSGKPPPKGGGGGGGSGGGGSGGGGSADKTHTCPPCPAPEAAGGPSVFLFPPKPKDTLMISRTPEVTCVVVDVSHEDPEVKFNWYVDGVEVHNAKTKPREEQYNSTYRVVSVLTVLHQDWLNGKEYKCKVSNKALPAPIEKTISKAKGQPREPQVYTLPPSRDELTKNQVSLTCLVKGFYPSDIAVEWESNGQPENNYKTTPPVLDSDGSFFLYSKLTVDKSRWQQGNVFSCSVMHEALHNHYTQKSLSLSPGGGGSGSAHPIPDSSPLLQFGGQVRQRYLYTDDACQTEAHLEIREDGTVGGAADQSPESLLQLKALKPGVIQILGVKTSRFLCQRPDGALYGSLHFDPEACSFRELLLEDGYNVYQSEAHGLPLHLPGCKSPHRDPAPRGPARFLPLPGLPPAPPEPPGILAPQPPDVGSSDPLSMVYPSQGRSPSYAS

SEQ ID NO: 2779 - protein, 471 aa, Artificial Sequence
  Fusion Protein
HGEGTFTSDKSKQLAKRLVREFIEWLIEGGHSSGKPPPKGGGGGGGSGGGGSGGGGSADKTHTCPPCPAPEAAGGPSVFLFPPKPKDTLMISRTPEVTCVVVDVSHEDPEVKFNWYVDGVEVHNAKTKPREEQYNSTYRVVSVLTVLHQDWLNGKEYKCKVSNKALPAPIEKTISKAKGQPREPQVYTLPPSRDELTKNQVSLTCLVKGFYPSDIAVEWESNGQPENNYKTTPPVLDSDGSFFLYSKLTVDKSRWQQGNVFSCSVMHEALHNHYTQKSLSLSPGGGGSGSAHPIPDSSPLLQFGGQVRQRYLYTDDACQTEAHLEIREDGTVGGAADQSPESLLQLKALKPGVIQILGVKTSRFLCQRPDGALYGSLHFDPEACSFRELLLEDGYNVYQSEAHGLPLHLCGNKSPHRDPAPRGPARFLPLPGLPPAPPEPPGILAPQPPDVGSSDPLSMVGSQGRSPSYAS

SEQ ID NO: 2780 - protein, 472 aa, Artificial Sequence
  Fusion Protein
HGEGTFTSDKSKQLAKRLVREFIEWLIEGGHSSGKPPPKGGGGGGGSGGGGSGGGGSADKTHTCPPCPAPEAAGGPSVFLFPPKPKDTLMISRTPEVTCVVVDVSHEDPEVKFNWYVDGVEVHNAKTKPREEQYNSTYRVVSVLTVLHQDWLNGKEYKCKVSNKALPAPIEKTISKAKGQPREPQVYTLPPSRDELTKNQVSLTCLVKGFYPSDIAVEWESNGQPENNYKTTPPVLDSDGSFFLYSKLTVDKSRWQQGNVFSCSVMHEALHNHYTQKSLSLSPGGGGSGSAHPIPDSSPLLQFGGQVRQRYLYTDDACQTEAHLEIREDGTVGGAADQSPESLLQLKALKPGVIQILGVKTSRFLCQRPDGALYGSLHFDPEACSFRELLLEDGYNVYQSEAHGLPLHLCGNKSPHRDPAPRGPARFLPLPGLPPAPPEPPGILAPQPPDVGSSDPLSMVYPSQGRSPSYAS

SEQ ID NO: 2781 - protein, 471 aa, Artificial Sequence
  Fusion Protein
HGEGTFTSDKSKQLAKRLVREFIEWLIEGGHSSGKPPPKGGGGGGGSGGGGSGGGGSADKTHTCPPCPAPELLGGPSVFLFPPKPKDTLMISRTPEVTCVVVDVSHEDPEVKFNWYVDGVEVHNAKTKPREEQYNNASRVVSVLTVLHQDWLNGKEYKCKVSNKALPAPIEKTISKAKGQPREPQVYTLPPSRDELTKNQVSLTCLVKGFYPSDIAVEWESNGQPENNYKTTPPVLDSDGSFFLYSKLTVDKSRWQQGNVFSCSVMHEALHNHYTQKSLSLSPGGGGSGSAHPIPDSSPLLQFGGQVRQRYLYTDDACQTEAHLEIREDGTVGGAADQSPESLLQLKALKPGVIQILGVKTSRFLCQRPDGALYGSLHFDPEACSFRELLLEDGYNVYQSEAHGLPLHLPGCKSPHRDPAPRGPARFLPLPGLPPAPPEPPGILAPQPPDVGSSDPLSMVGSQGRSPSYAS

SEQ ID NO: 2782 - protein, 472 aa, Artificial Sequence
  Fusion Protein
HGEGTFTSDKSKQLAKRLVREFIEWLIEGGHSSGKPPPKGGGGGGGSGGGGSGGGGSADKTHTCPPCPAPELLGGPSVFLFPPKPKDTLMISRTPEVTCVVVDVSHEDPEVKFNWYVDGVEVHNAKTKPREEQYNNASRVVSVLTVLHQDWLNGKEYKCKVSNKALPAPIEKTISKAKGQPREPQVYTLPPSRDELTKNQVSLTCLVKGFYPSDIAVEWESNGQPENNYKTTPPVLDSDGSFFLYSKLTVDKSRWQQGNVFSCSVMHEALHNHYTQKSLSLSPGGGGSGSAHPIPDSSPLLQFGGQVRQRYLYTDDACQTEAHLEIREDGTVGGAADQSPESLLQLKALKPGVIQILGVKTSRFLCQRPDGALYGSLHFDPEACSFRELLLEDGYNVYQSEAHGLPLHLPGCKSPHRDPAPRGPARFLPLPGLPPAPPEPPGILAPQPPDVGSSDPLSMVYPSQGRSPSYAS

SEQ ID NO: 2783 - protein, 471 aa, Artificial Sequence
  Fusion Protein
HGEGTFTSDKSKQLAKRLVREFIEWLIEGGHSSGKPPPKGGGGGGGSGGGGSGGGGSADKTHTCPPCPAPELLGGPSVFLFPPKPKDTLMISRTPEVTCVVVDVSHEDPEVKFNWYVDGVEVHNAKTKPREEQYNNASRVVSVLTVLHQDWLNGKEYKCKVSNKALPAPIEKTISKAKGQPREPQVYTLPPSRDELTKNQVSLTCLVKGFYPSDIAVEWESNGQPENNYKTTPPVLDSDGSFFLYSKLTVDKSRWQQGNVFSCSVMHEALHNHYTQKSLSLSPGGGGSGSAHPIPDSSPLLQFGGQVRQRYLYTDDACQTEAHLEIREDGTVGGAADQSPESLLQLKALKPGVIQILGVKTSRFLCQRPDGALYGSLHFDPEACSFRELLLEDGYNVYQSEAHGLPLHLCGNKSPHRDPAPRGPARFLPLPGLPPAPPEPPGILAPQPPDVGSSDPLSMVGSQGRSPSYAS

SEQ ID NO: 2784 - protein, 472 aa, Artificial Sequence
  Fusion Protein
HGEGTFTSDKSKQLAKRLVREFIEWLIEGGHSSGKPPPKGGGGGGGSGGGGSGGGGSADKTHTCPPCPAPELLGGPSVFLFPPKPKDTLMISRTPEVTCVVVDVSHEDPEVKFNWYVDGVEVHNAKTKPREEQYNNASRVVSVLTVLHQDWLNGKEYKCKVSNKALPAPIEKTISKAKGQPREPQVYTLPPSRDELTKNQVSLTCLVKGFYPSDIAVEWESNGQPENNYKTTPPVLDSDGSFFLYSKLTVDKSRWQQGNVFSCSVMHEALHNHYTQKSLSLSPGGGGSGSAHPIPDSSPLLQFGGQVRQRYLYTDDACQTEAHLEIREDGTVGGAADQSPESLLQLKALKPGVIQILGVKTSRFLCQRPDGALYGSLHFDPEACSFRELLLEDGYNVYQSEAHGLPLHLCGNKSPHRDPAPRGPARFLPLPGLPPAPPEPPGILAPQPPDVGSSDPLSMVYPSQGRSPSYAS

SEQ ID NO: 2785 - protein, 474 aa, Artificial Sequence
  Fusion Protein
HGEGTFTSDKSKQLAKRLVREFIEWLIEGGHSSGKPPPKGGGGGGGSGGGGSGGGGSAESKYGPPCPPCPAPEFEGGPSVFLFPPKPKDTLMISRTPEVTCVVVDVSQEDPEVQFNWYVDGVEVHNAKTKPREEQFNSTYRVVSVLTVLHQDWLNGKEYKCKVSNKGLPSSIEKTISKAKGQPREPQVYTLPPSQEEMTKNQVSLTCLVKGFYPSDIAVEWESNGQPENNYKTTPPVLDSDGSFFLYSRLTVDKSRWQEGNVFSCSVMHEALHNHYTQKSLSLSLGGGGSGSAHPIPDSSPLLQFGGQVRQRYLYTDDACQTEAHLEIREDGTVGGAADQSPESLLQLKALKPGVIQILGVKTSRFLCQRPDGALYGSLHFDPEACSFRELLLEDGYNVYQSEAHGLPLHLPGCKSPHRDPAPRGPARFLPLPGLPPAPPEPPGILAPQPPDVGSSDPLSMVYPSQGRSPSYAS

SEQ ID NO: 2786 - protein, 473 aa, Artificial Sequence
  Fusion Protein
HGEGTFTSDKSKQLAKRLVREFIEWLIEGGHSSGKPPPKGGGGGGGSGGGGSGGGGSAESKYGPPCPPCPAPEFEGGPSVFLFPPKPKDTLMISRTPEVTCVVVDVSQEDPEVQFNWYVDGVEVHNAKTKPREEQFNSTYRVVSVLTVLHQDWLNGKEYKCKVSNKGLPSSIEKTISKAKGQPREPQVYTLPPSQEEMTKNQVSLTCLVKGFYPSDIAVEWESNGQPENNYKTTPPVLDSDGSFFLYSRLTVDKSRWQEGNVFSCSVMHEALHNHYTQKSLSLSLGGGGSGSAHPIPDSSPLLQFGGQVRQRYLYTDDACQTEAHLEIREDGTVGGAADQSPESLLQLKALKPGVIQILGVKTSRFLCQRPDGALYGSLHFDPEACSFRELLLEDGYNVYQSEAHGLPLHLCGNKSPHRDPAPRGPARFLPLPGLPPAPPEPPGILAPQPPDVGSSDPLSMVGSQGRSPSYAS

SEQ ID NO: 2787 - protein, 474 aa, Artificial Sequence
  Fusion Protein
HGEGTFTSDKSKQLAKRLVREFIEWLIEGGHSSGKPPPKGGGGGGGSGGGGSGGGGSAESKYGPPCPPCPAPEFEGGPSVFLFPPKPKDTLMISRTPEVTCVVVDVSQEDPEVQFNWYVDGVEVHNAKTKPREEQFNSTYRVVSVLTVLHQDWLNGKEYKCKVSNKGLPSSIEKTISKAKGQPREPQVYTLPPSQEEMTKNQVSLTCLVKGFYPSDIAVEWESNGQPENNYKTTPPVLDSDGSFFLYSRLTVDKSRWQEGNVFSCSVMHEALHNHYTQKSLSLSLGGGGSGSAHPIPDSSPLLQFGGQVRQRYLYTDDACQTEAHLEIREDGTVGGAADQSPESLLQLKALKPGVIQILGVKTSRFLCQRPDGALYGSLHFDPEACSFRELLLEDGYNVYQSEAHGLPLHLCGNKSPHRDPAPRGPARFLPLPGLPPAPPEPPGILAPQPPDVGSSDPLSMVYPSQGRSPSYAS

SEQ ID NO: 2788 - protein, 471 aa, Artificial Sequence
  Fusion Protein
HGEGTFTSDKSKQLAKRLVRLFIEWLIKGGPSSGAPPPSGGGGGGGSGGGGSGGGGSADKTHTCPPCPAPEAAGGPSVFLFPPKPKDTLMISRTPEVTCVVVDVSHEDPEVKFNWYVDGVEVHNAKTKPREEQYNSTYRVVSVLTVLHQDWLNGKEYKCKVSNKALPAPIEKTISKAKGQPREPQVYTLPPSRDELTKNQVSLTCLVKGFYPSDIAVEWESNGQPENNYKTTPPVLDSDGSFFLYSKLTVDKSRWQQGNVFSCSVMHEALHNHYTQKSLSLSPGGGGSGSAHPIPDSSPLLQFGGQVRQRYLYTDDACQTEAHLEIREDGTVGGAADQSPESLLQLKALKPGVIQILGVKTSRFLCQRPDGALYGSLHFDPEACSFRELLLEDGYNVYQSEAHGLPLHLPGCKSPHRDPAPRGPARFLPLPGLPPAPPEPPGILAPQPPDVGSSDPLSMVGSQGRSPSYAS

SEQ ID NO: 2789 - protein, 472 aa, Artificial Sequence
  Fusion Protein
HGEGTFTSDKSKQLAKRLVRLFIEWLIKGGPSSGAPPPSGGGGGGGSGGGGSGGGGSADKTHTCPPCPAPEAAGGPSVFLFPPKPKDTLMISRTPEVTCVVVDVSHEDPEVKFNWYVDGVEVHNAKTKPREEQYNSTYRVVSVLTVLHQDWLNGKEYKCKVSNKALPAPIEKTISKAKGQPREPQVYTLPPSRDELTKNQVSLTCLVKGFYPSDIAVEWESNGQPENNYKTTPPVLDSDGSFFLYSKLTVDKSRWQQGNVFSCSVMHEALHNHYTQKSLSLSPGGGGSGSAHPIPDSSPLLQFGGQVRQRYLYTDDACQTEAHLEIREDGTVGGAADQSPESLLQLKALKPGVIQILGVKTSRFLCQRPDGALYGSLHFDPEACSFRELLLEDGYNVYQSEAHGLPLHLPGCKSPHRDPAPRGPARFLPLPGLPPAPPEPPGILAPQPPDVGSSDPLSMVYPSQGRSPSYAS

SEQ ID NO: 2790 - protein, 471 aa, Artificial Sequence
  Fusion Protein
HGEGTFTSDKSKQLAKRLVRLFIEWLIKGGPSSGAPPPSGGGGGGGSGGGGSGGGGSADKTHTCPPCPAPEAAGGPSVFLFPPKPKDTLMISRTPEVTCVVVDVSHEDPEVKFNWYVDGVEVHNAKTKPREEQYNSTYRVVSVLTVLHQDWLNGKEYKCKVSNKALPAPIEKTISKAKGQPREPQVYTLPPSRDELTKNQVSLTCLVKGFYPSDIAVEWESNGQPENNYKTTPPVLDSDGSFFLYSKLTVDKSRWQQGNVFSCSVMHEALHNHYTQKSLSLSPGGGGSGSAHPIPDSSPLLQFGGQVRQRYLYTDDACQTEAHLEIREDGTVGGAADQSPESLLQLKALKPGVIQILGVKTSRFLCQRPDGALYGSLHFDPEACSFRELLLEDGYNVYQSEAHGLPLHLCGNKSPHRDPAPRGPARFLPLPGLPPAPPEPPGILAPQPPDVGSSDPLSMVGSQGRSPSYAS

SEQ ID NO: 2791 - protein, 472 aa, Artificial Sequence
  Fusion Protein
HGEGTFTSDKSKQLAKRLVRLFIEWLIKGGPSSGAPPPSGGGGGGGSGGGGSGGGGSADKTHTCPPCPAPEAAGGPSVFLFPPKPKDTLMISRTPEVTCVVVDVSHEDPEVKFNWYVDGVEVHNAKTKPREEQYNSTYRVVSVLTVLHQDWLNGKEYKCKVSNKALPAPIEKTISKAKGQPREPQVYTLPPSRDELTKNQVSLTCLVKGFYPSDIAVEWESNGQPENNYKTTPPVLDSDGSFFLYSKLTVDKSRWQQGNVFSCSVMHEALHNHYTQKSLSLSPGGGGSGSAHPIPDSSPLLQFGGQVRQRYLYTDDACQTEAHLEIREDGTVGGAADQSPESLLQLKALKPGVIQILGVKTSRFLCQRPDGALYGSLHFDPEACSFRELLLEDGYNVYQSEAHGLPLHLCGNKSPHRDPAPRGPARFLPLPGLPPAPPEPPGILAPQPPDVGSSDPLSMVYPSQGRSPSYAS

SEQ ID NO: 2792 - protein, 471 aa, Artificial Sequence
  Fusion Protein
HGEGTFTSDKSKQLAKRLVRLFIEWLIKGGPSSGAPPPSGGGGGGGSGGGGSGGGGSADKTHTCPPCPAPELLGGPSVFLFPPKPKDTLMISRTPEVTCVVVDVSHEDPEVKFNWYVDGVEVHNAKTKPREEQYNNASRVVSVLTVLHQDWLNGKEYKCKVSNKALPAPIEKTISKAKGQPREPQVYTLPPSRDELTKNQVSLTCLVKGFYPSDIAVEWESNGQPENNYKTTPPVLDSDGSFFLYSKLTVDKSRWQQGNVFSCSVMHEALHNHYTQKSLSLSPGGGGSGSAHPIPDSSPLLQFGGQVRQRYLYTDDACQTEAHLEIREDGTVGGAADQSPESLLQLKALKPGVIQILGVKTSRFLCQRPDGALYGSLHFDPEACSFRELLLEDGYNVYQSEAHGLPLHLPGCKSPHRDPAPRGPARFLPLPGLPPAPPEPPGILAPQPPDVGSSDPLSMVGSQGRSPSYAS

SEQ ID NO: 2793 - protein, 472 aa, Artificial Sequence
  Fusion Protein
HGEGTFTSDKSKQLAKRLVRLFIEWLIKGGPSSGAPPPSGGGGGGGSGGGGSGGGGSADKTHTCPPCPAPELLGGPSVFLFPPKPKDTLMISRTPEVTCVVVDVSHEDPEVKFNWYVDGVEVHNAKTKPREEQYNNASRVVSVLTVLHQDWLNGKEYKCKVSNKALPAPIEKTISKAKGQPREPQVYTLPPSRDELTKNQVSLTCLVKGFYPSDIAVEWESNGQPENNYKTTPPVLDSDGSFFLYSKLTVDKSRWQQGNVFSCSVMHEALHNHYTQKSLSLSPGGGGSGSAHPIPDSSPLLQFGGQVRQRYLYTDDACQTEAHLEIREDGTVGGAADQSPESLLQLKALKPGVIQILGVKTSRFLCQRPDGALYGSLHFDPEACSFRELLLEDGYNVYQSEAHGLPLHLPGCKSPHRDPAPRGPARFLPLPGLPPAPPEPPGILAPQPPDVGSSDPLSMVYPSQGRSPSYAS

SEQ ID NO: 2794 - protein, 471 aa, Artificial Sequence
  Fusion Protein
HGEGTFTSDKSKQLAKRLVRLFIEWLIKGGPSSGAPPPSGGGGGGGSGGGGSGGGGSADKTHTCPPCPAPELLGGPSVFLFPPKPKDTLMISRTPEVTCVVVDVSHEDPEVKFNWYVDGVEVHNAKTKPREEQYNNASRVVSVLTVLHQDWLNGKEYKCKVSNKALPAPIEKTISKAKGQPREPQVYTLPPSRDELTKNQVSLTCLVKGFYPSDIAVEWESNGQPENNYKTTPPVLDSDGSFFLYSKLTVDKSRWQQGNVFSCSVMHEALHNHYTQKSLSLSPGGGGSGSAHPIPDSSPLLQFGGQVRQRYLYTDDACQTEAHLEIREDGTVGGAADQSPESLLQLKALKPGVIQILGVKTSRFLCQRPDGALYGSLHFDPEACSFRELLLEDGYNVYQSEAHGLPLHLCGNKSPHRDPAPRGPARFLPLPGLPPAPPEPPGILAPQPPDVGSSDPLSMVGSQGRSPSYAS

SEQ ID NO: 2795 - protein, 472 aa, Artificial Sequence
  Fusion Protein
HGEGTFTSDKSKQLAKRLVRLFIEWLIKGGPSSGAPPPSGGGGGGGSGGGGSGGGGSADKTHTCPPCPAPELLGGPSVFLFPPKPKDTLMISRTPEVTCVVVDVSHEDPEVKFNWYVDGVEVHNAKTKPREEQYNNASRVVSVLTVLHQDWLNGKEYKCKVSNKALPAPIEKTISKAKGQPREPQVYTLPPSRDELTKNQVSLTCLVKGFYPSDIAVEWESNGQPENNYKTTPPVLDSDGSFFLYSKLTVDKSRWQQGNVFSCSVMHEALHNHYTQKSLSLSPGGGGSGSAHPIPDSSPLLQFGGQVRQRYLYTDDACQTEAHLEIREDGTVGGAADQSPESLLQLKALKPGVIQILGVKTSRFLCQRPDGALYGSLHFDPEACSFRELLLEDGYNVYQSEAHGLPLHLCGNKSPHRDPAPRGPARFLPLPGLPPAPPEPPGILAPQPPDVGSSDPLSMVYPSQGRSPSYAS

SEQ ID NO: 2796 - protein, 474 aa, Artificial Sequence
  Fusion Protein
HGEGTFTSDKSKQLAKRLVRLFIEWLIKGGPSSGAPPPSGGGGGGGSGGGGSGGGGSAESKYGPPCPPCPAPEFEGGPSVFLFPPKPKDTLMISRTPEVTCVVVDVSQEDPEVQFNWYVDGVEVHNAKTKPREEQFNSTYRVVSVLTVLHQDWLNGKEYKCKVSNKGLPSSIEKTISKAKGQPREPQVYTLPPSQEEMTKNQVSLTCLVKGFYPSDIAVEWESNGQPENNYKTTPPVLDSDGSFFLYSRLTVDKSRWQEGNVFSCSVMHEALHNHYTQKSLSLSLGGGGSGSAHPIPDSSPLLQFGGQVRQRYLYTDDACQTEAHLEIREDGTVGGAADQSPESLLQLKALKPGVIQILGVKTSRFLCQRPDGALYGSLHFDPEACSFRELLLEDGYNVYQSEAHGLPLHLPGCKSPHRDPAPRGPARFLPLPGLPPAPPEPPGILAPQPPDVGSSDPLSMVYPSQGRSPSYAS

SEQ ID NO: 2797 - protein, 473 aa, Artificial Sequence
  Fusion Protein
HGEGTFTSDKSKQLAKRLVRLFIEWLIKGGPSSGAPPPSGGGGGGGSGGGGSGGGGSAESKYGPPCPPCPAPEFEGGPSVFLFPPKPKDTLMISRTPEVTCVVVDVSQEDPEVQFNWYVDGVEVHNAKTKPREEQFNSTYRVVSVLTVLHQDWLNGKEYKCKVSNKGLPSSIEKTISKAKGQPREPQVYTLPPSQEEMTKNQVSLTCLVKGFYPSDIAVEWESNGQPENNYKTTPPVLDSDGSFFLYSRLTVDKSRWQEGNVFSCSVMHEALHNHYTQKSLSLSLGGGGSGSAHPIPDSSPLLQFGGQVRQRYLYTDDACQTEAHLEIREDGTVGGAADQSPESLLQLKALKPGVIQILGVKTSRFLCQRPDGALYGSLHFDPEACSFRELLLEDGYNVYQSEAHGLPLHLCGNKSPHRDPAPRGPARFLPLPGLPPAPPEPPGILAPQPPDVGSSDPLSMVGSQGRSPSYAS

SEQ ID NO: 2798 - protein, 474 aa, Artificial Sequence
  Fusion Protein
HGEGTFTSDKSKQLAKRLVRLFIEWLIKGGPSSGAPPPSGGGGGGGSGGGGSGGGGSAESKYGPPCPPCPAPEFEGGPSVFLFPPKPKDTLMISRTPEVTCVVVDVSQEDPEVQFNWYVDGVEVHNAKTKPREEQFNSTYRVVSVLTVLHQDWLNGKEYKCKVSNKGLPSSIEKTISKAKGQPREPQVYTLPPSQEEMTKNQVSLTCLVKGFYPSDIAVEWESNGQPENNYKTTPPVLDSDGSFFLYSRLTVDKSRWQEGNVFSCSVMHEALHNHYTQKSLSLSLGGGGSGSAHPIPDSSPLLQFGGQVRQRYLYTDDACQTEAHLEIREDGTVGGAADQSPESLLQLKALKPGVIQILGVKTSRFLCQRPDGALYGSLHFDPEACSFRELLLEDGYNVYQSEAHGLPLHLCGNKSPHRDPAPRGPARFLPLPGLPPAPPEPPGILAPQPPDVGSSDPLSMVYPSQGRSPSYAS

SEQ ID NO: 2799 - protein, 471 aa, Artificial Sequence
  Fusion Protein
HGEGTFTSDKSKQLAKRLVRLFIEWLIKGGHSSGKPPPSGGGGGGGSGGGGSGGGGSADKTHTCPPCPAPEAAGGPSVFLFPPKPKDTLMISRTPEVTCVVVDVSHEDPEVKFNWYVDGVEVHNAKTKPREEQYNSTYRVVSVLTVLHQDWLNGKEYKCKVSNKALPAPIEKTISKAKGQPREPQVYTLPPSRDELTKNQVSLTCLVKGFYPSDIAVEWESNGQPENNYKTTPPVLDSDGSFFLYSKLTVDKSRWQQGNVFSCSVMHEALHNHYTQKSLSLSPGGGGSGSAHPIPDSSPLLQFGGQVRQRYLYTDDACQTEAHLEIREDGTVGGAADQSPESLLQLKALKPGVIQILGVKTSRFLCQRPDGALYGSLHFDPEACSFRELLLEDGYNVYQSEAHGLPLHLPGCKSPHRDPAPRGPARFLPLPGLPPAPPEPPGILAPQPPDVGSSDPLSMVGSQGRSPSYAS

SEQ ID NO: 2800 - protein, 472 aa, Artificial Sequence
  Fusion Protein
HGEGTFTSDKSKQLAKRLVRLFIEWLIKGGHSSGKPPPSGGGGGGGSGGGGSGGGGSADKTHTCPPCPAPEAAGGPSVFLFPPKPKDTLMISRTPEVTCVVVDVSHEDPEVKFNWYVDGVEVHNAKTKPREEQYNSTYRVVSVLTVLHQDWLNGKEYKCKVSNKALPAPIEKTISKAKGQPREPQVYTLPPSRDELTKNQVSLTCLVKGFYPSDIAVEWESNGQPENNYKTTPPVLDSDGSFFLYSKLTVDKSRWQQGNVFSCSVMHEALHNHYTQKSLSLSPGGGGSGSAHPIPDSSPLLQFGGQVRQRYLYTDDACQTEAHLEIREDGTVGGAADQSPESLLQLKALKPGVIQILGVKTSRFLCQRPDGALYGSLHFDPEACSFRELLLEDGYNVYQSEAHGLPLHLPGCKSPHRDPAPRGPARFLPLPGLPPAPPEPPGILAPQPPDVGSSDPLSMVYPSQGRSPSYAS

SEQ ID NO: 2801 - protein, 471 aa, Artificial Sequence
  Fusion Protein
HGEGTFTSDKSKQLAKRLVRLFIEWLIKGGHSSGKPPPSGGGGGGGSGGGGSGGGGSADKTHTCPPCPAPEAAGGPSVFLFPPKPKDTLMISRTPEVTCVVVDVSHEDPEVKFNWYVDGVEVHNAKTKPREEQYNSTYRVVSVLTVLHQDWLNGKEYKCKVSNKALPAPIEKTISKAKGQPREPQVYTLPPSRDELTKNQVSLTCLVKGFYPSDIAVEWESNGQPENNYKTTPPVLDSDGSFFLYSKLTVDKSRWQQGNVFSCSVMHEALHNHYTQKSLSLSPGGGGSGSAHPIPDSSPLLQFGGQVRQRYLYTDDACQTEAHLEIREDGTVGGAADQSPESLLQLKALKPGVIQILGVKTSRFLCQRPDGALYGSLHFDPEACSFRELLLEDGYNVYQSEAHGLPLHLCGNKSPHRDPAPRGPARFLPLPGLPPAPPEPPGILAPQPPDVGSSDPLSMVGSQGRSPSYAS

SEQ ID NO: 2802 - protein, 472 aa, Artificial Sequence
  Fusion Protein
HGEGTFTSDKSKQLAKRLVRLFIEWLIKGGHSSGKPPPSGGGGGGGSGGGGSGGGGSADKTHTCPPCPAPEAAGGPSVFLFPPKPKDTLMISRTPEVTCVVVDVSHEDPEVKFNWYVDGVEVHNAKTKPREEQYNSTYRVVSVLTVLHQDWLNGKEYKCKVSNKALPAPIEKTISKAKGQPREPQVYTLPPSRDELTKNQVSLTCLVKGFYPSDIAVEWESNGQPENNYKTTPPVLDSDGSFFLYSKLTVDKSRWQQGNVFSCSVMHEALHNHYTQKSLSLSPGGGGSGSAHPIPDSSPLLQFGGQVRQRYLYTDDACQTEAHLEIREDGTVGGAADQSPESLLQLKALKPGVIQILGVKTSRFLCQRPDGALYGSLHFDPEACSFRELLLEDGYNVYQSEAHGLPLHLCGNKSPHRDPAPRGPARFLPLPGLPPAPPEPPGILAPQPPDVGSSDPLSMVYPSQGRSPSYAS

SEQ ID NO: 2803 - protein, 471 aa, Artificial Sequence
  Fusion Protein
HGEGTFTSDKSKQLAKRLVRLFIEWLIKGGHSSGKPPPSGGGGGGGSGGGGSGGGGSADKTHTCPPCPAPELLGGPSVFLFPPKPKDTLMISRTPEVTCVVVDVSHEDPEVKFNWYVDGVEVHNAKTKPREEQYNNASRVVSVLTVLHQDWLNGKEYKCKVSNKALPAPIEKTISKAKGQPREPQVYTLPPSRDELTKNQVSLTCLVKGFYPSDIAVEWESNGQPENNYKTTPPVLDSDGSFFLYSKLTVDKSRWQQGNVFSCSVMHEALHNHYTQKSLSLSPGGGGSGSAHPIPDSSPLLQFGGQVRQRYLYTDDACQTEAHLEIREDGTVGGAADQSPESLLQLKALKPGVIQILGVKTSRFLCQRPDGALYGSLHFDPEACSFRELLLEDGYNVYQSEAHGLPLHLPGCKSPHRDPAPRGPARFLPLPGLPPAPPEPPGILAPQPPDVGSSDPLSMVGSQGRSPSYAS

SEQ ID NO: 2804 - protein, 472 aa, Artificial Sequence
  Fusion Protein
HGEGTFTSDKSKQLAKRLVRLFIEWLIKGGHSSGKPPPSGGGGGGGSGGGGSGGGGSADKTHTCPPCPAPELLGGPSVFLFPPKPKDTLMISRTPEVTCVVVDVSHEDPEVKFNWYVDGVEVHNAKTKPREEQYNNASRVVSVLTVLHQDWLNGKEYKCKVSNKALPAPIEKTISKAKGQPREPQVYTLPPSRDELTKNQVSLTCLVKGFYPSDIAVEWESNGQPENNYKTTPPVLDSDGSFFLYSKLTVDKSRWQQGNVFSCSVMHEALHNHYTQKSLSLSPGGGGSGSAHPIPDSSPLLQFGGQVRQRYLYTDDACQTEAHLEIREDGTVGGAADQSPESLLQLKALKPGVIQILGVKTSRFLCQRPDGALYGSLHFDPEACSFRELLLEDGYNVYQSEAHGLPLHLPGCKSPHRDPAPRGPARFLPLPGLPPAPPEPPGILAPQPPDVGSSDPLSMVYPSQGRSPSYAS

SEQ ID NO: 2805 - protein, 471 aa, Artificial Sequence
  Fusion Protein
HGEGTFTSDKSKQLAKRLVRLFIEWLIKGGHSSGKPPPSGGGGGGGSGGGGSGGGGSADKTHTCPPCPAPELLGGPSVFLFPPKPKDTLMISRTPEVTCVVVDVSHEDPEVKFNWYVDGVEVHNAKTKPREEQYNNASRVVSVLTVLHQDWLNGKEYKCKVSNKALPAPIEKTISKAKGQPREPQVYTLPPSRDELTKNQVSLTCLVKGFYPSDIAVEWESNGQPENNYKTTPPVLDSDGSFFLYSKLTVDKSRWQQGNVFSCSVMHEALHNHYTQKSLSLSPGGGGSGSAHPIPDSSPLLQFGGQVRQRYLYTDDACQTEAHLEIREDGTVGGAADQSPESLLQLKALKPGVIQILGVKTSRFLCQRPDGALYGSLHFDPEACSFRELLLEDGYNVYQSEAHGLPLHLCGNKSPHRDPAPRGPARFLPLPGLPPAPPEPPGILAPQPPDVGSSDPLSMVGSQGRSPSYAS

SEQ ID NO: 2806 - protein, 472 aa, Artificial Sequence
  Fusion Protein
HGEGTFTSDKSKQLAKRLVRLFIEWLIKGGHSSGKPPPSGGGGGGGSGGGGSGGGGSADKTHTCPPCPAPELLGGPSVFLFPPKPKDTLMISRTPEVTCVVVDVSHEDPEVKFNWYVDGVEVHNAKTKPREEQYNNASRVVSVLTVLHQDWLNGKEYKCKVSNKALPAPIEKTISKAKGQPREPQVYTLPPSRDELTKNQVSLTCLVKGFYPSDIAVEWESNGQPENNYKTTPPVLDSDGSFFLYSKLTVDKSRWQQGNVFSCSVMHEALHNHYTQKSLSLSPGGGGSGSAHPIPDSSPLLQFGGQVRQRYLYTDDACQTEAHLEIREDGTVGGAADQSPESLLQLKALKPGVIQILGVKTSRFLCQRPDGALYGSLHFDPEACSFRELLLEDGYNVYQSEAHGLPLHLCGNKSPHRDPAPRGPARFLPLPGLPPAPPEPPGILAPQPPDVGSSDPLSMVYPSQGRSPSYAS

SEQ ID NO: 2807 - protein, 474 aa, Artificial Sequence
  Fusion Protein
HGEGTFTSDKSKQLAKRLVRLFIEWLIKGGHSSGKPPPSGGGGGGGSGGGGSGGGGSAESKYGPPCPPCPAPEFEGGPSVFLFPPKPKDTLMISRTPEVTCVVVDVSQEDPEVQFNWYVDGVEVHNAKTKPREEQFNSTYRVVSVLTVLHQDWLNGKEYKCKVSNKGLPSSIEKTISKAKGQPREPQVYTLPPSQEEMTKNQVSLTCLVKGFYPSDIAVEWESNGQPENNYKTTPPVLDSDGSFFLYSRLTVDKSRWQEGNVFSCSVMHEALHNHYTQKSLSLSLGGGGSGSAHPIPDSSPLLQFGGQVRQRYLYTDDACQTEAHLEIREDGTVGGAADQSPESLLQLKALKPGVIQILGVKTSRFLCQRPDGALYGSLHFDPEACSFRELLLEDGYNVYQSEAHGLPLHLPGCKSPHRDPAPRGPARFLPLPGLPPAPPEPPGILAPQPPDVGSSDPLSMVYPSQGRSPSYAS

SEQ ID NO: 2808 - protein, 473 aa, Artificial Sequence
  Fusion Protein
HGEGTFTSDKSKQLAKRLVRLFIEWLIKGGHSSGKPPPSGGGGGGGSGGGGSGGGGSAESKYGPPCPPCPAPEFEGGPSVFLFPPKPKDTLMISRTPEVTCVVVDVSQEDPEVQFNWYVDGVEVHNAKTKPREEQFNSTYRVVSVLTVLHQDWLNGKEYKCKVSNKGLPSSIEKTISKAKGQPREPQVYTLPPSQEEMTKNQVSLTCLVKGFYPSDIAVEWESNGQPENNYKTTPPVLDSDGSFFLYSRLTVDKSRWQEGNVFSCSVMHEALHNHYTQKSLSLSLGGGGSGSAHPIPDSSPLLQFGGQVRQRYLYTDDACQTEAHLEIREDGTVGGAADQSPESLLQLKALKPGVIQILGVKTSRFLCQRPDGALYGSLHFDPEACSFRELLLEDGYNVYQSEAHGLPLHLCGNKSPHRDPAPRGPARFLPLPGLPPAPPEPPGILAPQPPDVGSSDPLSMVGSQGRSPSYAS

SEQ ID NO: 2809 - protein, 474 aa, Artificial Sequence
  Fusion Protein
HGEGTFTSDKSKQLAKRLVRLFIEWLIKGGHSSGKPPPSGGGGGGGSGGGGSGGGGSAESKYGPPCPPCPAPEFEGGPSVFLFPPKPKDTLMISRTPEVTCVVVDVSQEDPEVQFNWYVDGVEVHNAKTKPREEQFNSTYRVVSVLTVLHQDWLNGKEYKCKVSNKGLPSSIEKTISKAKGQPREPQVYTLPPSQEEMTKNQVSLTCLVKGFYPSDIAVEWESNGQPENNYKTTPPVLDSDGSFFLYSRLTVDKSRWQEGNVFSCSVMHEALHNHYTQKSLSLSLGGGGSGSAHPIPDSSPLLQFGGQVRQRYLYTDDACQTEAHLEIREDGTVGGAADQSPESLLQLKALKPGVIQILGVKTSRFLCQRPDGALYGSLHFDPEACSFRELLLEDGYNVYQSEAHGLPLHLCGNKSPHRDPAPRGPARFLPLPGLPPAPPEPPGILAPQPPDVGSSDPLSMVYPSQGRSPSYAS

SEQ ID NO: 2810 - protein, 471 aa, Artificial Sequence
  Fusion Protein
HGEGTFTSDKSKQLAKRLVRLFVQWLIKGGHSSGKPPPKGGGGGGGSGGGGSGGGGSADKTHTCPPCPAPEAAGGPSVFLFPPKPKDTLMISRTPEVTCVVVDVSHEDPEVKFNWYVDGVEVHNAKTKPREEQYNSTYRVVSVLTVLHQDWLNGKEYKCKVSNKALPAPIEKTISKAKGQPREPQVYTLPPSRDELTKNQVSLTCLVKGFYPSDIAVEWESNGQPENNYKTTPPVLDSDGSFFLYSKLTVDKSRWQQGNVFSCSVMHEALHNHYTQKSLSLSPGGGGSGSAHPIPDSSPLLQFGGQVRQRYLYTDDACQTEAHLEIREDGTVGGAADQSPESLLQLKALKPGVIQILGVKTSRFLCQRPDGALYGSLHFDPEACSFRELLLEDGYNVYQSEAHGLPLHLPGCKSPHRDPAPRGPARFLPLPGLPPAPPEPPGILAPQPPDVGSSDPLSMVGSQGRSPSYAS

SEQ ID NO: 2811 - protein, 472 aa, Artificial Sequence
  Fusion Protein
HGEGTFTSDKSKQLAKRLVRLFVQWLIKGGHSSGKPPPKGGGGGGGSGGGGSGGGGSADKTHTCPPCPAPEAAGGPSVFLFPPKPKDTLMISRTPEVTCVVVDVSHEDPEVKFNWYVDGVEVHNAKTKPREEQYNSTYRVVSVLTVLHQDWLNGKEYKCKVSNKALPAPIEKTISKAKGQPREPQVYTLPPSRDELTKNQVSLTCLVKGFYPSDIAVEWESNGQPENNYKTTPPVLDSDGSFFLYSKLTVDKSRWQQGNVFSCSVMHEALHNHYTQKSLSLSPGGGGSGSAHPIPDSSPLLQFGGQVRQRYLYTDDACQTEAHLEIREDGTVGGAADQSPESLLQLKALKPGVIQILGVKTSRFLCQRPDGALYGSLHFDPEACSFRELLLEDGYNVYQSEAHGLPLHLPGCKSPHRDPAPRGPARFLPLPGLPPAPPEPPGILAPQPPDVGSSDPLSMVYPSQGRSPSYAS

SEQ ID NO: 2812 - protein, 471 aa, Artificial Sequence
  Fusion Protein
HGEGTFTSDKSKQLAKRLVRLFVQWLIKGGHSSGKPPPKGGGGGGGSGGGGSGGGGSADKTHTCPPCPAPEAAGGPSVFLFPPKPKDTLMISRTPEVTCVVVDVSHEDPEVKFNWYVDGVEVHNAKTKPREEQYNSTYRVVSVLTVLHQDWLNGKEYKCKVSNKALPAPIEKTISKAKGQPREPQVYTLPPSRDELTKNQVSLTCLVKGFYPSDIAVEWESNGQPENNYKTTPPVLDSDGSFFLYSKLTVDKSRWQQGNVFSCSVMHEALHNHYTQKSLSLSPGGGGSGSAHPIPDSSPLLQFGGQVRQRYLYTDDACQTEAHLEIREDGTVGGAADQSPESLLQLKALKPGVIQILGVKTSRFLCQRPDGALYGSLHFDPEACSFRELLLEDGYNVYQSEAHGLPLHLCGNKSPHRDPAPRGPARFLPLPGLPPAPPEPPGILAPQPPDVGSSDPLSMVGSQGRSPSYAS

SEQ ID NO: 2813 - protein, 472 aa, Artificial Sequence
  Fusion Protein
HGEGTFTSDKSKQLAKRLVRLFVQWLIKGGHSSGKPPPKGGGGGGGSGGGGSGGGGSADKTHTCPPCPAPEAAGGPSVFLFPPKPKDTLMISRTPEVTCVVVDVSHEDPEVKFNWYVDGVEVHNAKTKPREEQYNSTYRVVSVLTVLHQDWLNGKEYKCKVSNKALPAPIEKTISKAKGQPREPQVYTLPPSRDELTKNQVSLTCLVKGFYPSDIAVEWESNGQPENNYKTTPPVLDSDGSFFLYSKLTVDKSRWQQGNVFSCSVMHEALHNHYTQKSLSLSPGGGGSGSAHPIPDSSPLLQFGGQVRQRYLYTDDACQTEAHLEIREDGTVGGAADQSPESLLQLKALKPGVIQILGVKTSRFLCQRPDGALYGSLHFDPEACSFRELLLEDGYNVYQSEAHGLPLHLCGNKSPHRDPAPRGPARFLPLPGLPPAPPEPPGILAPQPPDVGSSDPLSMVYPSQGRSPSYAS

SEQ ID NO: 2814 - protein, 471 aa, Artificial Sequence
  Fusion Protein
HGEGTFTSDKSKQLAKRLVRLFVQWLIKGGHSSGKPPPKGGGGGGGSGGGGSGGGGSADKTHTCPPCPAPELLGGPSVFLFPPKPKDTLMISRTPEVTCVVVDVSHEDPEVKFNWYVDGVEVHNAKTKPREEQYNNASRVVSVLTVLHQDWLNGKEYKCKVSNKALPAPIEKTISKAKGQPREPQVYTLPPSRDELTKNQVSLTCLVKGFYPSDIAVEWESNGQPENNYKTTPPVLDSDGSFFLYSKLTVDKSRWQQGNVFSCSVMHEALHNHYTQKSLSLSPGGGGSGSAHPIPDSSPLLQFGGQVRQRYLYTDDACQTEAHLEIREDGTVGGAADQSPESLLQLKALKPGVIQILGVKTSRFLCQRPDGALYGSLHFDPEACSFRELLLEDGYNVYQSEAHGLPLHLPGCKSPHRDPAPRGPARFLPLPGLPPAPPEPPGILAPQPPDVGSSDPLSMVGSQGRSPSYAS

SEQ ID NO: 2815 - protein, 472 aa, Artificial Sequence
  Fusion Protein
HGEGTFTSDKSKQLAKRLVRLFVQWLIKGGHSSGKPPPKGGGGGGGSGGGGSGGGGSADKTHTCPPCPAPELLGGPSVFLFPPKPKDTLMISRTPEVTCVVVDVSHEDPEVKFNWYVDGVEVHNAKTKPREEQYNNASRVVSVLTVLHQDWLNGKEYKCKVSNKALPAPIEKTISKAKGQPREPQVYTLPPSRDELTKNQVSLTCLVKGFYPSDIAVEWESNGQPENNYKTTPPVLDSDGSFFLYSKLTVDKSRWQQGNVFSCSVMHEALHNHYTQKSLSLSPGGGGSGSAHPIPDSSPLLQFGGQVRQRYLYTDDACQTEAHLEIREDGTVGGAADQSPESLLQLKALKPGVIQILGVKTSRFLCQRPDGALYGSLHFDPEACSFRELLLEDGYNVYQSEAHGLPLHLPGCKSPHRDPAPRGPARFLPLPGLPPAPPEPPGILAPQPPDVGSSDPLSMVYPSQGRSPSYAS

SEQ ID NO: 2816 - protein, 471 aa, Artificial Sequence
  Fusion Protein
HGEGTFTSDKSKQLAKRLVRLFVQWLIKGGHSSGKPPPKGGGGGGGSGGGGSGGGGSADKTHTCPPCPAPELLGGPSVFLFPPKPKDTLMISRTPEVTCVVVDVSHEDPEVKFNWYVDGVEVHNAKTKPREEQYNNASRVVSVLTVLHQDWLNGKEYKCKVSNKALPAPIEKTISKAKGQPREPQVYTLPPSRDELTKNQVSLTCLVKGFYPSDIAVEWESNGQPENNYKTTPPVLDSDGSFFLYSKLTVDKSRWQQGNVFSCSVMHEALHNHYTQKSLSLSPGGGGSGSAHPIPDSSPLLQFGGQVRQRYLYTDDACQTEAHLEIREDGTVGGAADQSPESLLQLKALKPGVIQILGVKTSRFLCQRPDGALYGSLHFDPEACSFRELLLEDGYNVYQSEAHGLPLHLCGNKSPHRDPAPRGPARFLPLPGLPPAPPEPPGILAPQPPDVGSSDPLSMVGSQGRSPSYAS

SEQ ID NO: 2817 - protein, 472 aa, Artificial Sequence
  Fusion Protein
HGEGTFTSDKSKQLAKRLVRLFVQWLIKGGHSSGKPPPKGGGGGGGSGGGGSGGGGSADKTHTCPPCPAPELLGGPSVFLFPPKPKDTLMISRTPEVTCVVVDVSHEDPEVKFNWYVDGVEVHNAKTKPREEQYNNASRVVSVLTVLHQDWLNGKEYKCKVSNKALPAPIEKTISKAKGQPREPQVYTLPPSRDELTKNQVSLTCLVKGFYPSDIAVEWESNGQPENNYKTTPPVLDSDGSFFLYSKLTVDKSRWQQGNVFSCSVMHEALHNHYTQKSLSLSPGGGGSGSAHPIPDSSPLLQFGGQVRQRYLYTDDACQTEAHLEIREDGTVGGAADQSPESLLQLKALKPGVIQILGVKTSRFLCQRPDGALYGSLHFDPEACSFRELLLEDGYNVYQSEAHGLPLHLCGNKSPHRDPAPRGPARFLPLPGLPPAPPEPPGILAPQPPDVGSSDPLSMVYPSQGRSPSYAS

SEQ ID NO: 2818 - protein, 474 aa, Artificial Sequence
  Fusion Protein
HGEGTFTSDKSKQLAKRLVRLFVQWLIKGGHSSGKPPPKGGGGGGGSGGGGSGGGGSAESKYGPPCPPCPAPEFEGGPSVFLFPPKPKDTLMISRTPEVTCVVVDVSQEDPEVQFNWYVDGVEVHNAKTKPREEQFNSTYRVVSVLTVLHQDWLNGKEYKCKVSNKGLPSSIEKTISKAKGQPREPQVYTLPPSQEEMTKNQVSLTCLVKGFYPSDIAVEWESNGQPENNYKTTPPVLDSDGSFFLYSRLTVDKSRWQEGNVFSCSVMHEALHNHYTQKSLSLSLGGGGSGSAHPIPDSSPLLQFGGQVRQRYLYTDDACQTEAHLEIREDGTVGGAADQSPESLLQLKALKPGVIQILGVKTSRFLCQRPDGALYGSLHFDPEACSFRELLLEDGYNVYQSEAHGLPLHLPGCKSPHRDPAPRGPARFLPLPGLPPAPPEPPGILAPQPPDVGSSDPLSMVYPSQGRSPSYAS

SEQ ID NO: 2819 - protein, 473 aa, Artificial Sequence
  Fusion Protein
HGEGTFTSDKSKQLAKRLVRLFVQWLIKGGHSSGKPPPKGGGGGGGSGGGGSGGGGSAESKYGPPCPPCPAPEFEGGPSVFLFPPKPKDTLMISRTPEVTCVVVDVSQEDPEVQFNWYVDGVEVHNAKTKPREEQFNSTYRVVSVLTVLHQDWLNGKEYKCKVSNKGLPSSIEKTISKAKGQPREPQVYTLPPSQEEMTKNQVSLTCLVKGFYPSDIAVEWESNGQPENNYKTTPPVLDSDGSFFLYSRLTVDKSRWQEGNVFSCSVMHEALHNHYTQKSLSLSLGGGGSGSAHPIPDSSPLLQFGGQVRQRYLYTDDACQTEAHLEIREDGTVGGAADQSPESLLQLKALKPGVIQILGVKTSRFLCQRPDGALYGSLHFDPEACSFRELLLEDGYNVYQSEAHGLPLHLCGNKSPHRDPAPRGPARFLPLPGLPPAPPEPPGILAPQPPDVGSSDPLSMVGSQGRSPSYAS

SEQ ID NO: 2820 - protein, 474 aa, Artificial Sequence
  Fusion Protein
HGEGTFTSDKSKQLAKRLVRLFVQWLIKGGHSSGKPPPKGGGGGGGSGGGGSGGGGSAESKYGPPCPPCPAPEFEGGPSVFLFPPKPKDTLMISRTPEVTCVVVDVSQEDPEVQFNWYVDGVEVHNAKTKPREEQFNSTYRVVSVLTVLHQDWLNGKEYKCKVSNKGLPSSIEKTISKAKGQPREPQVYTLPPSQEEMTKNQVSLTCLVKGFYPSDIAVEWESNGQPENNYKTTPPVLDSDGSFFLYSRLTVDKSRWQEGNVFSCSVMHEALHNHYTQKSLSLSLGGGGSGSAHPIPDSSPLLQFGGQVRQRYLYTDDACQTEAHLEIREDGTVGGAADQSPESLLQLKALKPGVIQILGVKTSRFLCQRPDGALYGSLHFDPEACSFRELLLEDGYNVYQSEAHGLPLHLCGNKSPHRDPAPRGPARFLPLPGLPPAPPEPPGILAPQPPDVGSSDPLSMVYPSQGRSPSYAS

SEQ ID NO: 2821 - protein, 471 aa, Artificial Sequence
  Fusion Protein
HGEGTFTSDLSKQLAKRLVREFIEWLIEGGPSSGAPPPSGGGGGGGSGGGGSGGGGSADKTHTCPPCPAPEAAGGPSVFLFPPKPKDTLMISRTPEVTCVVVDVSHEDPEVKFNWYVDGVEVHNAKTKPREEQYNSTYRVVSVLTVLHQDWLNGKEYKCKVSNKALPAPIEKTISKAKGQPREPQVYTLPPSRDELTKNQVSLTCLVKGFYPSDIAVEWESNGQPENNYKTTPPVLDSDGSFFLYSKLTVDKSRWQQGNVFSCSVMHEALHNHYTQKSLSLSPGGGGSGSAHPIPDSSPLLQFGGQVRQRYLYTDDACQTEAHLEIREDGTVGGAADQSPESLLQLKALKPGVIQILGVKTSRFLCQRPDGALYGSLHFDPEACSFRELLLEDGYNVYQSEAHGLPLHLPGCKSPHRDPAPRGPARFLPLPGLPPAPPEPPGILAPQPPDVGSSDPLSMVGSQGRSPSYAS

SEQ ID NO: 2822 - protein, 472 aa, Artificial Sequence
  Fusion Protein
HGEGTFTSDLSKQLAKRLVREFIEWLIEGGPSSGAPPPSGGGGGGGSGGGGSGGGGSADKTHTCPPCPAPEAAGGPSVFLFPPKPKDTLMISRTPEVTCVVVDVSHEDPEVKFNWYVDGVEVHNAKTKPREEQYNSTYRVVSVLTVLHQDWLNGKEYKCKVSNKALPAPIEKTISKAKGQPREPQVYTLPPSRDELTKNQVSLTCLVKGFYPSDIAVEWESNGQPENNYKTTPPVLDSDGSFFLYSKLTVDKSRWQQGNVFSCSVMHEALHNHYTQKSLSLSPGGGGSGSAHPIPDSSPLLQFGGQVRQRYLYTDDACQTEAHLEIREDGTVGGAADQSPESLLQLKALKPGVIQILGVKTSRFLCQRPDGALYGSLHFDPEACSFRELLLEDGYNVYQSEAHGLPLHLPGCKSPHRDPAPRGPARFLPLPGLPPAPPEPPGILAPQPPDVGSSDPLSMVYPSQGRSPSYAS

SEQ ID NO: 2823 - protein, 471 aa, Artificial Sequence
  Fusion Protein
HGEGTFTSDLSKQLAKRLVREFIEWLIEGGPSSGAPPPSGGGGGGGSGGGGSGGGGSADKTHTCPPCPAPEAAGGPSVFLFPPKPKDTLMISRTPEVTCVVVDVSHEDPEVKFNWYVDGVEVHNAKTKPREEQYNSTYRVVSVLTVLHQDWLNGKEYKCKVSNKALPAPIEKTISKAKGQPREPQVYTLPPSRDELTKNQVSLTCLVKGFYPSDIAVEWESNGQPENNYKTTPPVLDSDGSFFLYSKLTVDKSRWQQGNVFSCSVMHEALHNHYTQKSLSLSPGGGGSGSAHPIPDSSPLLQFGGQVRQRYLYTDDACQTEAHLEIREDGTVGGAADQSPESLLQLKALKPGVIQILGVKTSRFLCQRPDGALYGSLHFDPEACSFRELLLEDGYNVYQSEAHGLPLHLCGNKSPHRDPAPRGPARFLPLPGLPPAPPEPPGILAPQPPDVGSSDPLSMVGSQGRSPSYAS

SEQ ID NO: 2824 - protein, 472 aa, Artificial Sequence
  Fusion Protein
HGEGTFTSDLSKQLAKRLVREFIEWLIEGGPSSGAPPPSGGGGGGGSGGGGSGGGGSADKTHTCPPCPAPEAAGGPSVFLFPPKPKDTLMISRTPEVTCVVVDVSHEDPEVKFNWYVDGVEVHNAKTKPREEQYNSTYRVVSVLTVLHQDWLNGKEYKCKVSNKALPAPIEKTISKAKGQPREPQVYTLPPSRDELTKNQVSLTCLVKGFYPSDIAVEWESNGQPENNYKTTPPVLDSDGSFFLYSKLTVDKSRWQQGNVFSCSVMHEALHNHYTQKSLSLSPGGGGSGSAHPIPDSSPLLQFGGQVRQRYLYTDDACQTEAHLEIREDGTVGGAADQSPESLLQLKALKPGVIQILGVKTSRFLCQRPDGALYGSLHFDPEACSFRELLLEDGYNVYQSEAHGLPLHLCGNKSPHRDPAPRGPARFLPLPGLPPAPPEPPGILAPQPPDVGSSDPLSMVYPSQGRSPSYAS

SEQ ID NO: 2825 - protein, 471 aa, Artificial Sequence
  Fusion Protein
HGEGTFTSDLSKQLAKRLVREFIEWLIEGGPSSGAPPPSGGGGGGGSGGGGSGGGGSADKTHTCPPCPAPELLGGPSVFLFPPKPKDTLMISRTPEVTCVVVDVSHEDPEVKFNWYVDGVEVHNAKTKPREEQYNNASRVVSVLTVLHQDWLNGKEYKCKVSNKALPAPIEKTISKAKGQPREPQVYTLPPSRDELTKNQVSLTCLVKGFYPSDIAVEWESNGQPENNYKTTPPVLDSDGSFFLYSKLTVDKSRWQQGNVFSCSVMHEALHNHYTQKSLSLSPGGGGSGSAHPIPDSSPLLQFGGQVRQRYLYTDDACQTEAHLEIREDGTVGGAADQSPESLLQLKALKPGVIQILGVKTSRFLCQRPDGALYGSLHFDPEACSFRELLLEDGYNVYQSEAHGLPLHLPGCKSPHRDPAPRGPARFLPLPGLPPAPPEPPGILAPQPPDVGSSDPLSMVGSQGRSPSYAS

SEQ ID NO: 2826 - protein, 472 aa, Artificial Sequence
  Fusion Protein
HGEGTFTSDLSKQLAKRLVREFIEWLIEGGPSSGAPPPSGGGGGGGSGGGGSGGGGSADKTHTCPPCPAPELLGGPSVFLFPPKPKDTLMISRTPEVTCVVVDVSHEDPEVKFNWYVDGVEVHNAKTKPREEQYNNASRVVSVLTVLHQDWLNGKEYKCKVSNKALPAPIEKTISKAKGQPREPQVYTLPPSRDELTKNQVSLTCLVKGFYPSDIAVEWESNGQPENNYKTTPPVLDSDGSFFLYSKLTVDKSRWQQGNVFSCSVMHEALHNHYTQKSLSLSPGGGGSGSAHPIPDSSPLLQFGGQVRQRYLYTDDACQTEAHLEIREDGTVGGAADQSPESLLQLKALKPGVIQILGVKTSRFLCQRPDGALYGSLHFDPEACSFRELLLEDGYNVYQSEAHGLPLHLPGCKSPHRDPAPRGPARFLPLPGLPPAPPEPPGILAPQPPDVGSSDPLSMVYPSQGRSPSYAS

SEQ ID NO: 2827 - protein, 471 aa, Artificial Sequence
  Fusion Protein
HGEGTFTSDLSKQLAKRLVREFIEWLIEGGPSSGAPPPSGGGGGGGSGGGGSGGGGSADKTHTCPPCPAPELLGGPSVFLFPPKPKDTLMISRTPEVTCVVVDVSHEDPEVKFNWYVDGVEVHNAKTKPREEQYNNASRVVSVLTVLHQDWLNGKEYKCKVSNKALPAPIEKTISKAKGQPREPQVYTLPPSRDELTKNQVSLTCLVKGFYPSDIAVEWESNGQPENNYKTTPPVLDSDGSFFLYSKLTVDKSRWQQGNVFSCSVMHEALHNHYTQKSLSLSPGGGGSGSAHPIPDSSPLLQFGGQVRQRYLYTDDACQTEAHLEIREDGTVGGAADQSPESLLQLKALKPGVIQILGVKTSRFLCQRPDGALYGSLHFDPEACSFRELLLEDGYNVYQSEAHGLPLHLCGNKSPHRDPAPRGPARFLPLPGLPPAPPEPPGILAPQPPDVGSSDPLSMVGSQGRSPSYAS

SEQ ID NO: 2828 - protein, 472 aa, Artificial Sequence
  Fusion Protein
HGEGTFTSDLSKQLAKRLVREFIEWLIEGGPSSGAPPPSGGGGGGGSGGGGSGGGGSADKTHTCPPCPAPELLGGPSVFLFPPKPKDTLMISRTPEVTCVVVDVSHEDPEVKFNWYVDGVEVHNAKTKPREEQYNNASRVVSVLTVLHQDWLNGKEYKCKVSNKALPAPIEKTISKAKGQPREPQVYTLPPSRDELTKNQVSLTCLVKGFYPSDIAVEWESNGQPENNYKTTPPVLDSDGSFFLYSKLTVDKSRWQQGNVFSCSVMHEALHNHYTQKSLSLSPGGGGSGSAHPIPDSSPLLQFGGQVRQRYLYTDDACQTEAHLEIREDGTVGGAADQSPESLLQLKALKPGVIQILGVKTSRFLCQRPDGALYGSLHFDPEACSFRELLLEDGYNVYQSEAHGLPLHLCGNKSPHRDPAPRGPARFLPLPGLPPAPPEPPGILAPQPPDVGSSDPLSMVYPSQGRSPSYAS

SEQ ID NO: 2829 - protein, 474 aa, Artificial Sequence
  Fusion Protein
HGEGTFTSDLSKQLAKRLVREFIEWLIEGGPSSGAPPPSGGGGGGGSGGGGSGGGGSAESKYGPPCPPCPAPEFEGGPSVFLFPPKPKDTLMISRTPEVTCVVVDVSQEDPEVQFNWYVDGVEVHNAKTKPREEQFNSTYRVVSVLTVLHQDWLNGKEYKCKVSNKGLPSSIEKTISKAKGQPREPQVYTLPPSQEEMTKNQVSLTCLVKGFYPSDIAVEWESNGQPENNYKTTPPVLDSDGSFFLYSRLTVDKSRWQEGNVFSCSVMHEALHNHYTQKSLSLSLGGGGSGSAHPIPDSSPLLQFGGQVRQRYLYTDDACQTEAHLEIREDGTVGGAADQSPESLLQLKALKPGVIQILGVKTSRFLCQRPDGALYGSLHFDPEACSFRELLLEDGYNVYQSEAHGLPLHLPGCKSPHRDPAPRGPARFLPLPGLPPAPPEPPGILAPQPPDVGSSDPLSMVYPSQGRSPSYAS

SEQ ID NO: 2830 - protein, 473 aa, Artificial Sequence
  Fusion Protein
HGEGTFTSDLSKQLAKRLVREFIEWLIEGGPSSGAPPPSGGGGGGGSGGGGSGGGGSAESKYGPPCPPCPAPEFEGGPSVFLFPPKPKDTLMISRTPEVTCVVVDVSQEDPEVQFNWYVDGVEVHNAKTKPREEQFNSTYRVVSVLTVLHQDWLNGKEYKCKVSNKGLPSSIEKTISKAKGQPREPQVYTLPPSQEEMTKNQVSLTCLVKGFYPSDIAVEWESNGQPENNYKTTPPVLDSDGSFFLYSRLTVDKSRWQEGNVFSCSVMHEALHNHYTQKSLSLSLGGGGSGSAHPIPDSSPLLQFGGQVRQRYLYTDDACQTEAHLEIREDGTVGGAADQSPESLLQLKALKPGVIQILGVKTSRFLCQRPDGALYGSLHFDPEACSFRELLLEDGYNVYQSEAHGLPLHLCGNKSPHRDPAPRGPARFLPLPGLPPAPPEPPGILAPQPPDVGSSDPLSMVGSQGRSPSYAS

SEQ ID NO: 2831 - protein, 474 aa, Artificial Sequence
  Fusion Protein
HGEGTFTSDLSKQLAKRLVREFIEWLIEGGPSSGAPPPSGGGGGGGSGGGGSGGGGSAESKYGPPCPPCPAPEFEGGPSVFLFPPKPKDTLMISRTPEVTCVVVDVSQEDPEVQFNWYVDGVEVHNAKTKPREEQFNSTYRVVSVLTVLHQDWLNGKEYKCKVSNKGLPSSIEKTISKAKGQPREPQVYTLPPSQEEMTKNQVSLTCLVKGFYPSDIAVEWESNGQPENNYKTTPPVLDSDGSFFLYSRLTVDKSRWQEGNVFSCSVMHEALHNHYTQKSLSLSLGGGGSGSAHPIPDSSPLLQFGGQVRQRYLYTDDACQTEAHLEIREDGTVGGAADQSPESLLQLKALKPGVIQILGVKTSRFLCQRPDGALYGSLHFDPEACSFRELLLEDGYNVYQSEAHGLPLHLCGNKSPHRDPAPRGPARFLPLPGLPPAPPEPPGILAPQPPDVGSSDPLSMVYPSQGRSPSYAS

SEQ ID NO: 2832 - protein, 469 aa, Artificial Sequence
  Fusion Protein
HGEGTFTSDKSKQLAKEAVQLFIEWLLAGGPKKIRYSGGGGGGGSGGGGSGGGGSADKTHTCPPCPAPEAAGGPSVFLFPPKPKDTLMISRTPEVTCVVVDVSHEDPEVKFNWYVDGVEVHNAKTKPREEQYNSTYRVVSVLTVLHQDWLNGKEYKCKVSNKALPAPIEKTISKAKGQPREPQVYTLPPSRDELTKNQVSLTCLVKGFYPSDIAVEWESNGQPENNYKTTPPVLDSDGSFFLYSKLTVDKSRWQQGNVFSCSVMHEALHNHYTQKSLSLSPGGGGSGSAHPIPDSSPLLQFGGQVRQRYLYTDDACQTEAHLEIREDGTVGGAADQSPESLLQLKALKPGVIQILGVKTSRFLCQRPDGALYGSLHFDPEACSFRELLLEDGYNVYQSEAHGLPLHLPGCKSPHRDPAPRGPARFLPLPGLPPAPPEPPGILAPQPPDVGSSDPLSMVGSQGRSPSYAS

SEQ ID NO: 2833 - protein, 470 aa, Artificial Sequence
  Fusion Protein
HGEGTFTSDKSKQLAKEAVQLFIEWLLAGGPKKIRYSGGGGGGGSGGGGSGGGGSADKTHTCPPCPAPEAAGGPSVFLFPPKPKDTLMISRTPEVTCVVVDVSHEDPEVKFNWYVDGVEVHNAKTKPREEQYNSTYRVVSVLTVLHQDWLNGKEYKCKVSNKALPAPIEKTISKAKGQPREPQVYTLPPSRDELTKNQVSLTCLVKGFYPSDIAVEWESNGQPENNYKTTPPVLDSDGSFFLYSKLTVDKSRWQQGNVFSCSVMHEALHNHYTQKSLSLSPGGGGSGSAHPIPDSSPLLQFGGQVRQRYLYTDDACQTEAHLEIREDGTVGGAADQSPESLLQLKALKPGVIQILGVKTSRFLCQRPDGALYGSLHFDPEACSFRELLLEDGYNVYQSEAHGLPLHLPGCKSPHRDPAPRGPARFLPLPGLPPAPPEPPGILAPQPPDVGSSDPLSMVYPSQGRSPSYAS

SEQ ID NO: 2834 - protein, 469 aa, Artificial Sequence
  Fusion Protein
HGEGTFTSDKSKQLAKEAVQLFIEWLLAGGPKKIRYSGGGGGGGSGGGGSGGGGSADKTHTCPPCPAPEAAGGPSVFLFPPKPKDTLMISRTPEVTCVVVDVSHEDPEVKFNWYVDGVEVHNAKTKPREEQYNSTYRVVSVLTVLHQDWLNGKEYKCKVSNKALPAPIEKTISKAKGQPREPQVYTLPPSRDELTKNQVSLTCLVKGFYPSDIAVEWESNGQPENNYKTTPPVLDSDGSFFLYSKLTVDKSRWQQGNVFSCSVMHEALHNHYTQKSLSLSPGGGGSGSAHPIPDSSPLLQFGGQVRQRYLYTDDACQTEAHLEIREDGTVGGAADQSPESLLQLKALKPGVIQILGVKTSRFLCQRPDGALYGSLHFDPEACSFRELLLEDGYNVYQSEAHGLPLHLCGNKSPHRDPAPRGPARFLPLPGLPPAPPEPPGILAPQPPDVGSSDPLSMVGSQGRSPSYAS

SEQ ID NO: 2835 - protein, 470 aa, Artificial Sequence
  Fusion Protein
HGEGTFTSDKSKQLAKEAVQLFIEWLLAGGPKKIRYSGGGGGGGSGGGGSGGGGSADKTHTCPPCPAPEAAGGPSVFLFPPKPKDTLMISRTPEVTCVVVDVSHEDPEVKFNWYVDGVEVHNAKTKPREEQYNSTYRVVSVLTVLHQDWLNGKEYKCKVSNKALPAPIEKTISKAKGQPREPQVYTLPPSRDELTKNQVSLTCLVKGFYPSDIAVEWESNGQPENNYKTTPPVLDSDGSFFLYSKLTVDKSRWQQGNVFSCSVMHEALHNHYTQKSLSLSPGGGGSGSAHPIPDSSPLLQFGGQVRQRYLYTDDACQTEAHLEIREDGTVGGAADQSPESLLQLKALKPGVIQILGVKTSRFLCQRPDGALYGSLHFDPEACSFRELLLEDGYNVYQSEAHGLPLHLCGNKSPHRDPAPRGPARFLPLPGLPPAPPEPPGILAPQPPDVGSSDPLSMVYPSQGRSPSYAS

SEQ ID NO: 2836 - protein, 469 aa, Artificial Sequence
  Fusion Protein
HGEGTFTSDKSKQLAKEAVQLFIEWLLAGGPKKIRYSGGGGGGGSGGGGSGGGGSADKTHTCPPCPAPELLGGPSVFLFPPKPKDTLMISRTPEVTCVVVDVSHEDPEVKFNWYVDGVEVHNAKTKPREEQYNNASRVVSVLTVLHQDWLNGKEYKCKVSNKALPAPIEKTISKAKGQPREPQVYTLPPSRDELTKNQVSLTCLVKGFYPSDIAVEWESNGQPENNYKTTPPVLDSDGSFFLYSKLTVDKSRWQQGNVFSCSVMHEALHNHYTQKSLSLSPGGGGSGSAHPIPDSSPLLQFGGQVRQRYLYTDDACQTEAHLEIREDGTVGGAADQSPESLLQLKALKPGVIQILGVKTSRFLCQRPDGALYGSLHFDPEACSFRELLLEDGYNVYQSEAHGLPLHLPGCKSPHRDPAPRGPARFLPLPGLPPAPPEPPGILAPQPPDVGSSDPLSMVGSQGRSPSYAS

SEQ ID NO: 2837 - protein, 470 aa, Artificial Sequence
  Fusion Protein
HGEGTFTSDKSKQLAKEAVQLFIEWLLAGGPKKIRYSGGGGGGGSGGGGSGGGGSADKTHTCPPCPAPELLGGPSVFLFPPKPKDTLMISRTPEVTCVVVDVSHEDPEVKFNWYVDGVEVHNAKTKPREEQYNNASRVVSVLTVLHQDWLNGKEYKCKVSNKALPAPIEKTISKAKGQPREPQVYTLPPSRDELTKNQVSLTCLVKGFYPSDIAVEWESNGQPENNYKTTPPVLDSDGSFFLYSKLTVDKSRWQQGNVFSCSVMHEALHNHYTQKSLSLSPGGGGSGSAHPIPDSSPLLQFGGQVRQRYLYTDDACQTEAHLEIREDGTVGGAADQSPESLLQLKALKPGVIQILGVKTSRFLCQRPDGALYGSLHFDPEACSFRELLLEDGYNVYQSEAHGLPLHLPGCKSPHRDPAPRGPARFLPLPGLPPAPPEPPGILAPQPPDVGSSDPLSMVYPSQGRSPSYAS

SEQ ID NO: 2838 - protein, 469 aa, Artificial Sequence
  Fusion Protein
HGEGTFTSDKSKQLAKEAVQLFIEWLLAGGPKKIRYSGGGGGGGSGGGGSGGGGSADKTHTCPPCPAPELLGGPSVFLFPPKPKDTLMISRTPEVTCVVVDVSHEDPEVKFNWYVDGVEVHNAKTKPREEQYNNASRVVSVLTVLHQDWLNGKEYKCKVSNKALPAPIEKTISKAKGQPREPQVYTLPPSRDELTKNQVSLTCLVKGFYPSDIAVEWESNGQPENNYKTTPPVLDSDGSFFLYSKLTVDKSRWQQGNVFSCSVMHEALHNHYTQKSLSLSPGGGGSGSAHPIPDSSPLLQFGGQVRQRYLYTDDACQTEAHLEIREDGTVGGAADQSPESLLQLKALKPGVIQILGVKTSRFLCQRPDGALYGSLHFDPEACSFRELLLEDGYNVYQSEAHGLPLHLCGNKSPHRDPAPRGPARFLPLPGLPPAPPEPPGILAPQPPDVGSSDPLSMVGSQGRSPSYAS

SEQ ID NO: 2839 - protein, 470 aa, Artificial Sequence
  Fusion Protein
HGEGTFTSDKSKQLAKEAVQLFIEWLLAGGPKKIRYSGGGGGGGSGGGGSGGGGSADKTHTCPPCPAPELLGGPSVFLFPPKPKDTLMISRTPEVTCVVVDVSHEDPEVKFNWYVDGVEVHNAKTKPREEQYNNASRVVSVLTVLHQDWLNGKEYKCKVSNKALPAPIEKTISKAKGQPREPQVYTLPPSRDELTKNQVSLTCLVKGFYPSDIAVEWESNGQPENNYKTTPPVLDSDGSFFLYSKLTVDKSRWQQGNVFSCSVMHEALHNHYTQKSLSLSPGGGGSGSAHPIPDSSPLLQFGGQVRQRYLYTDDACQTEAHLEIREDGTVGGAADQSPESLLQLKALKPGVIQILGVKTSRFLCQRPDGALYGSLHFDPEACSFRELLLEDGYNVYQSEAHGLPLHLCGNKSPHRDPAPRGPARFLPLPGLPPAPPEPPGILAPQPPDVGSSDPLSMVYPSQGRSPSYAS

SEQ ID NO: 2840 - protein, 472 aa, Artificial Sequence
  Fusion Protein
HGEGTFTSDKSKQLAKEAVQLFIEWLLAGGPKKIRYSGGGGGGGSGGGGSGGGGSAESKYGPPCPPCPAPEFEGGPSVFLFPPKPKDTLMISRTPEVTCVVVDVSQEDPEVQFNWYVDGVEVHNAKTKPREEQFNSTYRVVSVLTVLHQDWLNGKEYKCKVSNKGLPSSIEKTISKAKGQPREPQVYTLPPSQEEMTKNQVSLTCLVKGFYPSDIAVEWESNGQPENNYKTTPPVLDSDGSFFLYSRLTVDKSRWQEGNVFSCSVMHEALHNHYTQKSLSLSLGGGGSGSAHPIPDSSPLLQFGGQVRQRYLYTDDACQTEAHLEIREDGTVGGAADQSPESLLQLKALKPGVIQILGVKTSRFLCQRPDGALYGSLHFDPEACSFRELLLEDGYNVYQSEAHGLPLHLPGCKSPHRDPAPRGPARFLPLPGLPPAPPEPPGILAPQPPDVGSSDPLSMVYPSQGRSPSYAS

SEQ ID NO: 2841 - protein, 471 aa, Artificial Sequence
  Fusion Protein
HGEGTFTSDKSKQLAKEAVQLFIEWLLAGGPKKIRYSGGGGGGGSGGGGSGGGGSAESKYGPPCPPCPAPEFEGGPSVFLFPPKPKDTLMISRTPEVTCVVVDVSQEDPEVQFNWYVDGVEVHNAKTKPREEQFNSTYRVVSVLTVLHQDWLNGKEYKCKVSNKGLPSSIEKTISKAKGQPREPQVYTLPPSQEEMTKNQVSLTCLVKGFYPSDIAVEWESNGQPENNYKTTPPVLDSDGSFFLYSRLTVDKSRWQEGNVFSCSVMHEALHNHYTQKSLSLSLGGGGSGSAHPIPDSSPLLQFGGQVRQRYLYTDDACQTEAHLEIREDGTVGGAADQSPESLLQLKALKPGVIQILGVKTSRFLCQRPDGALYGSLHFDPEACSFRELLLEDGYNVYQSEAHGLPLHLCGNKSPHRDPAPRGPARFLPLPGLPPAPPEPPGILAPQPPDVGSSDPLSMVGSQGRSPSYAS

SEQ ID NO: 2842 - protein, 472 aa, Artificial Sequence
  Fusion Protein
HGEGTFTSDKSKQLAKEAVQLFIEWLLAGGPKKIRYSGGGGGGGSGGGGSGGGGSAESKYGPPCPPCPAPEFEGGPSVFLFPPKPKDTLMISRTPEVTCVVVDVSQEDPEVQFNWYVDGVEVHNAKTKPREEQFNSTYRVVSVLTVLHQDWLNGKEYKCKVSNKGLPSSIEKTISKAKGQPREPQVYTLPPSQEEMTKNQVSLTCLVKGFYPSDIAVEWESNGQPENNYKTTPPVLDSDGSFFLYSRLTVDKSRWQEGNVFSCSVMHEALHNHYTQKSLSLSLGGGGSGSAHPIPDSSPLLQFGGQVRQRYLYTDDACQTEAHLEIREDGTVGGAADQSPESLLQLKALKPGVIQILGVKTSRFLCQRPDGALYGSLHFDPEACSFRELLLEDGYNVYQSEAHGLPLHLCGNKSPHRDPAPRGPARFLPLPGLPPAPPEPPGILAPQPPDVGSSDPLSMVYPSQGRSPSYAS

SEQ ID NO: 2843 - protein, 469 aa, Artificial Sequence
  Fusion Protein
HGEGTFTSDKSKQLAERAVQLFIEWLLAGGPKKIRYSGGGGGGGSGGGGSGGGGSADKTHTCPPCPAPEAAGGPSVFLFPPKPKDTLMISRTPEVTCVVVDVSHEDPEVKFNWYVDGVEVHNAKTKPREEQYNSTYRVVSVLTVLHQDWLNGKEYKCKVSNKALPAPIEKTISKAKGQPREPQVYTLPPSRDELTKNQVSLTCLVKGFYPSDIAVEWESNGQPENNYKTTPPVLDSDGSFFLYSKLTVDKSRWQQGNVFSCSVMHEALHNHYTQKSLSLSPGGGGSGSAHPIPDSSPLLQFGGQVRQRYLYTDDACQTEAHLEIREDGTVGGAADQSPESLLQLKALKPGVIQILGVKTSRFLCQRPDGALYGSLHFDPEACSFRELLLEDGYNVYQSEAHGLPLHLPGCKSPHRDPAPRGPARFLPLPGLPPAPPEPPGILAPQPPDVGSSDPLSMVGSQGRSPSYAS

SEQ ID NO: 2844 - protein, 470 aa, Artificial Sequence
  Fusion Protein
HGEGTFTSDKSKQLAERAVQLFIEWLLAGGPKKIRYSGGGGGGGSGGGGSGGGGSADKTHTCPPCPAPEAAGGPSVFLFPPKPKDTLMISRTPEVTCVVVDVSHEDPEVKFNWYVDGVEVHNAKTKPREEQYNSTYRVVSVLTVLHQDWLNGKEYKCKVSNKALPAPIEKTISKAKGQPREPQVYTLPPSRDELTKNQVSLTCLVKGFYPSDIAVEWESNGQPENNYKTTPPVLDSDGSFFLYSKLTVDKSRWQQGNVFSCSVMHEALHNHYTQKSLSLSPGGGGSGSAHPIPDSSPLLQFGGQVRQRYLYTDDACQTEAHLEIREDGTVGGAADQSPESLLQLKALKPGVIQILGVKTSRFLCQRPDGALYGSLHFDPEACSFRELLLEDGYNVYQSEAHGLPLHLPGCKSPHRDPAPRGPARFLPLPGLPPAPPEPPGILAPQPPDVGSSDPLSMVYPSQGRSPSYAS

SEQ ID NO: 2845 - protein, 469 aa, Artificial Sequence
  Fusion Protein
HGEGTFTSDKSKQLAERAVQLFIEWLLAGGPKKIRYSGGGGGGGSGGGGSGGGGSADKTHTCPPCPAPEAAGGPSVFLFPPKPKDTLMISRTPEVTCVVVDVSHEDPEVKFNWYVDGVEVHNAKTKPREEQYNSTYRVVSVLTVLHQDWLNGKEYKCKVSNKALPAPIEKTISKAKGQPREPQVYTLPPSRDELTKNQVSLTCLVKGFYPSDIAVEWESNGQPENNYKTTPPVLDSDGSFFLYSKLTVDKSRWQQGNVFSCSVMHEALHNHYTQKSLSLSPGGGGSGSAHPIPDSSPLLQFGGQVRQRYLYTDDACQTEAHLEIREDGTVGGAADQSPESLLQLKALKPGVIQILGVKTSRFLCQRPDGALYGSLHFDPEACSFRELLLEDGYNVYQSEAHGLPLHLCGNKSPHRDPAPRGPARFLPLPGLPPAPPEPPGILAPQPPDVGSSDPLSMVGSQGRSPSYAS

SEQ ID NO: 2846 - protein, 470 aa, Artificial Sequence
  Fusion Protein
HGEGTFTSDKSKQLAERAVQLFIEWLLAGGPKKIRYSGGGGGGGSGGGGSGGGGSADKTHTCPPCPAPEAAGGPSVFLFPPKPKDTLMISRTPEVTCVVVDVSHEDPEVKFNWYVDGVEVHNAKTKPREEQYNSTYRVVSVLTVLHQDWLNGKEYKCKVSNKALPAPIEKTISKAKGQPREPQVYTLPPSRDELTKNQVSLTCLVKGFYPSDIAVEWESNGQPENNYKTTPPVLDSDGSFFLYSKLTVDKSRWQQGNVFSCSVMHEALHNHYTQKSLSLSPGGGGSGSAHPIPDSSPLLQFGGQVRQRYLYTDDACQTEAHLEIREDGTVGGAADQSPESLLQLKALKPGVIQILGVKTSRFLCQRPDGALYGSLHFDPEACSFRELLLEDGYNVYQSEAHGLPLHLCGNKSPHRDPAPRGPARFLPLPGLPPAPPEPPGILAPQPPDVGSSDPLSMVYPSQGRSPSYAS

SEQ ID NO: 2847 - protein, 469 aa, Artificial Sequence
  Fusion Protein
HGEGTFTSDKSKQLAERAVQLFIEWLLAGGPKKIRYSGGGGGGGSGGGGSGGGGSADKTHTCPPCPAPELLGGPSVFLFPPKPKDTLMISRTPEVTCVVVDVSHEDPEVKFNWYVDGVEVHNAKTKPREEQYNNASRVVSVLTVLHQDWLNGKEYKCKVSNKALPAPIEKTISKAKGQPREPQVYTLPPSRDELTKNQVSLTCLVKGFYPSDIAVEWESNGQPENNYKTTPPVLDSDGSFFLYSKLTVDKSRWQQGNVFSCSVMHEALHNHYTQKSLSLSPGGGGSGSAHPIPDSSPLLQFGGQVRQRYLYTDDACQTEAHLEIREDGTVGGAADQSPESLLQLKALKPGVIQILGVKTSRFLCQRPDGALYGSLHFDPEACSFRELLLEDGYNVYQSEAHGLPLHLPGCKSPHRDPAPRGPARFLPLPGLPPAPPEPPGILAPQPPDVGSSDPLSMVGSQGRSPSYAS

SEQ ID NO: 2848 - protein, 470 aa, Artificial Sequence
  Fusion Protein
HGEGTFTSDKSKQLAERAVQLFIEWLLAGGPKKIRYSGGGGGGGSGGGGSGGGGSADKTHTCPPCPAPELLGGPSVFLFPPKPKDTLMISRTPEVTCVVVDVSHEDPEVKFNWYVDGVEVHNAKTKPREEQYNNASRVVSVLTVLHQDWLNGKEYKCKVSNKALPAPIEKTISKAKGQPREPQVYTLPPSRDELTKNQVSLTCLVKGFYPSDIAVEWESNGQPENNYKTTPPVLDSDGSFFLYSKLTVDKSRWQQGNVFSCSVMHEALHNHYTQKSLSLSPGGGGSGSAHPIPDSSPLLQFGGQVRQRYLYTDDACQTEAHLEIREDGTVGGAADQSPESLLQLKALKPGVIQILGVKTSRFLCQRPDGALYGSLHFDPEACSFRELLLEDGYNVYQSEAHGLPLHLPGCKSPHRDPAPRGPARFLPLPGLPPAPPEPPGILAPQPPDVGSSDPLSMVYPSQGRSPSYAS

SEQ ID NO: 2849 - protein, 469 aa, Artificial Sequence
  Fusion Protein
HGEGTFTSDKSKQLAERAVQLFIEWLLAGGPKKIRYSGGGGGGGSGGGGSGGGGSADKTHTCPPCPAPELLGGPSVFLFPPKPKDTLMISRTPEVTCVVVDVSHEDPEVKFNWYVDGVEVHNAKTKPREEQYNNASRVVSVLTVLHQDWLNGKEYKCKVSNKALPAPIEKTISKAKGQPREPQVYTLPPSRDELTKNQVSLTCLVKGFYPSDIAVEWESNGQPENNYKTTPPVLDSDGSFFLYSKLTVDKSRWQQGNVFSCSVMHEALHNHYTQKSLSLSPGGGGSGSAHPIPDSSPLLQFGGQVRQRYLYTDDACQTEAHLEIREDGTVGGAADQSPESLLQLKALKPGVIQILGVKTSRFLCQRPDGALYGSLHFDPEACSFRELLLEDGYNVYQSEAHGLPLHLCGNKSPHRDPAPRGPARFLPLPGLPPAPPEPPGILAPQPPDVGSSDPLSMVGSQGRSPSYAS

SEQ ID NO: 2850 - protein, 470 aa, Artificial Sequence
  Fusion Protein
HGEGTFTSDKSKQLAERAVQLFIEWLLAGGPKKIRYSGGGGGGGSGGGGSGGGGSADKTHTCPPCPAPELLGGPSVFLFPPKPKDTLMISRTPEVTCVVVDVSHEDPEVKFNWYVDGVEVHNAKTKPREEQYNNASRVVSVLTVLHQDWLNGKEYKCKVSNKALPAPIEKTISKAKGQPREPQVYTLPPSRDELTKNQVSLTCLVKGFYPSDIAVEWESNGQPENNYKTTPPVLDSDGSFFLYSKLTVDKSRWQQGNVFSCSVMHEALHNHYTQKSLSLSPGGGGSGSAHPIPDSSPLLQFGGQVRQRYLYTDDACQTEAHLEIREDGTVGGAADQSPESLLQLKALKPGVIQILGVKTSRFLCQRPDGALYGSLHFDPEACSFRELLLEDGYNVYQSEAHGLPLHLCGNKSPHRDPAPRGPARFLPLPGLPPAPPEPPGILAPQPPDVGSSDPLSMVYPSQGRSPSYAS

SEQ ID NO: 2851 - protein, 472 aa, Artificial Sequence
  Fusion Protein
HGEGTFTSDKSKQLAERAVQLFIEWLLAGGPKKIRYSGGGGGGGSGGGGSGGGGSAESKYGPPCPPCPAPEFEGGPSVFLFPPKPKDTLMISRTPEVTCVVVDVSQEDPEVQFNWYVDGVEVHNAKTKPREEQFNSTYRVVSVLTVLHQDWLNGKEYKCKVSNKGLPSSIEKTISKAKGQPREPQVYTLPPSQEEMTKNQVSLTCLVKGFYPSDIAVEWESNGQPENNYKTTPPVLDSDGSFFLYSRLTVDKSRWQEGNVFSCSVMHEALHNHYTQKSLSLSLGGGGSGSAHPIPDSSPLLQFGGQVRQRYLYTDDACQTEAHLEIREDGTVGGAADQSPESLLQLKALKPGVIQILGVKTSRFLCQRPDGALYGSLHFDPEACSFRELLLEDGYNVYQSEAHGLPLHLPGCKSPHRDPAPRGPARFLPLPGLPPAPPEPPGILAPQPPDVGSSDPLSMVYPSQGRSPSYAS

SEQ ID NO: 2852 - protein, 471 aa, Artificial Sequence
  Fusion Protein
HGEGTFTSDKSKQLAERAVQLFIEWLLAGGPKKIRYSGGGGGGGSGGGGSGGGGSAESKYGPPCPPCPAPEFEGGPSVFLFPPKPKDTLMISRTPEVTCVVVDVSQEDPEVQFNWYVDGVEVHNAKTKPREEQFNSTYRVVSVLTVLHQDWLNGKEYKCKVSNKGLPSSIEKTISKAKGQPREPQVYTLPPSQEEMTKNQVSLTCLVKGFYPSDIAVEWESNGQPENNYKTTPPVLDSDGSFFLYSRLTVDKSRWQEGNVFSCSVMHEALHNHYTQKSLSLSLGGGGSGSAHPIPDSSPLLQFGGQVRQRYLYTDDACQTEAHLEIREDGTVGGAADQSPESLLQLKALKPGVIQILGVKTSRFLCQRPDGALYGSLHFDPEACSFRELLLEDGYNVYQSEAHGLPLHLCGNKSPHRDPAPRGPARFLPLPGLPPAPPEPPGILAPQPPDVGSSDPLSMVGSQGRSPSYAS

SEQ ID NO: 2853 - protein, 472 aa, Artificial Sequence
  Fusion Protein
HGEGTFTSDKSKQLAERAVQLFIEWLLAGGPKKIRYSGGGGGGGSGGGGSGGGGSAESKYGPPCPPCPAPEFEGGPSVFLFPPKPKDTLMISRTPEVTCVVVDVSQEDPEVQFNWYVDGVEVHNAKTKPREEQFNSTYRVVSVLTVLHQDWLNGKEYKCKVSNKGLPSSIEKTISKAKGQPREPQVYTLPPSQEEMTKNQVSLTCLVKGFYPSDIAVEWESNGQPENNYKTTPPVLDSDGSFFLYSRLTVDKSRWQEGNVFSCSVMHEALHNHYTQKSLSLSLGGGGSGSAHPIPDSSPLLQFGGQVRQRYLYTDDACQTEAHLEIREDGTVGGAADQSPESLLQLKALKPGVIQILGVKTSRFLCQRPDGALYGSLHFDPEACSFRELLLEDGYNVYQSEAHGLPLHLCGNKSPHRDPAPRGPARFLPLPGLPPAPPEPPGILAPQPPDVGSSDPLSMVYPSQGRSPSYAS

SEQ ID NO: 2854 - protein, 469 aa, Artificial Sequence
  Fusion Protein
HGEGTFTSDKSKQLAKRAVQLFIEWLLAGGPKKIRYSGGGGGGGSGGGGSGGGGSADKTHTCPPCPAPEAAGGPSVFLFPPKPKDTLMISRTPEVTCVVVDVSHEDPEVKFNWYVDGVEVHNAKTKPREEQYNSTYRVVSVLTVLHQDWLNGKEYKCKVSNKALPAPIEKTISKAKGQPREPQVYTLPPSRDELTKNQVSLTCLVKGFYPSDIAVEWESNGQPENNYKTTPPVLDSDGSFFLYSKLTVDKSRWQQGNVFSCSVMHEALHNHYTQKSLSLSPGGGGSGSAHPIPDSSPLLQFGGQVRQRYLYTDDACQTEAHLEIREDGTVGGAADQSPESLLQLKALKPGVIQILGVKTSRFLCQRPDGALYGSLHFDPEACSFRELLLEDGYNVYQSEAHGLPLHLPGCKSPHRDPAPRGPARFLPLPGLPPAPPEPPGILAPQPPDVGSSDPLSMVGSQGRSPSYAS

SEQ ID NO: 2855 - protein, 470 aa, Artificial Sequence
  Fusion Protein
HGEGTFTSDKSKQLAKRAVQLFIEWLLAGGPKKIRYSGGGGGGGSGGGGSGGGGSADKTHTCPPCPAPEAAGGPSVFLFPPKPKDTLMISRTPEVTCVVVDVSHEDPEVKFNWYVDGVEVHNAKTKPREEQYNSTYRVVSVLTVLHQDWLNGKEYKCKVSNKALPAPIEKTISKAKGQPREPQVYTLPPSRDELTKNQVSLTCLVKGFYPSDIAVEWESNGQPENNYKTTPPVLDSDGSFFLYSKLTVDKSRWQQGNVFSCSVMHEALHNHYTQKSLSLSPGGGGSGSAHPIPDSSPLLQFGGQVRQRYLYTDDACQTEAHLEIREDGTVGGAADQSPESLLQLKALKPGVIQILGVKTSRFLCQRPDGALYGSLHFDPEACSFRELLLEDGYNVYQSEAHGLPLHLPGCKSPHRDPAPRGPARFLPLPGLPPAPPEPPGILAPQPPDVGSSDPLSMVYPSQGRSPSYAS

SEQ ID NO: 2856 - protein, 469 aa, Artificial Sequence
  Fusion Protein
HGEGTFTSDKSKQLAKRAVQLFIEWLLAGGPKKIRYSGGGGGGGSGGGGSGGGGSADKTHTCPPCPAPEAAGGPSVFLFPPKPKDTLMISRTPEVTCVVVDVSHEDPEVKFNWYVDGVEVHNAKTKPREEQYNSTYRVVSVLTVLHQDWLNGKEYKCKVSNKALPAPIEKTISKAKGQPREPQVYTLPPSRDELTKNQVSLTCLVKGFYPSDIAVEWESNGQPENNYKTTPPVLDSDGSFFLYSKLTVDKSRWQQGNVFSCSVMHEALHNHYTQKSLSLSPGGGGSGSAHPIPDSSPLLQFGGQVRQRYLYTDDACQTEAHLEIREDGTVGGAADQSPESLLQLKALKPGVIQILGVKTSRFLCQRPDGALYGSLHFDPEACSFRELLLEDGYNVYQSEAHGLPLHLCGNKSPHRDPAPRGPARFLPLPGLPPAPPEPPGILAPQPPDVGSSDPLSMVGSQGRSPSYAS

SEQ ID NO: 2857 - protein, 470 aa, Artificial Sequence
  Fusion Protein
HGEGTFTSDKSKQLAKRAVQLFIEWLLAGGPKKIRYSGGGGGGGSGGGGSGGGGSADKTHTCPPCPAPEAAGGPSVFLFPPKPKDTLMISRTPEVTCVVVDVSHEDPEVKFNWYVDGVEVHNAKTKPREEQYNSTYRVVSVLTVLHQDWLNGKEYKCKVSNKALPAPIEKTISKAKGQPREPQVYTLPPSRDELTKNQVSLTCLVKGFYPSDIAVEWESNGQPENNYKTTPPVLDSDGSFFLYSKLTVDKSRWQQGNVFSCSVMHEALHNHYTQKSLSLSPGGGGSGSAHPIPDSSPLLQFGGQVRQRYLYTDDACQTEAHLEIREDGTVGGAADQSPESLLQLKALKPGVIQILGVKTSRFLCQRPDGALYGSLHFDPEACSFRELLLEDGYNVYQSEAHGLPLHLCGNKSPHRDPAPRGPARFLPLPGLPPAPPEPPGILAPQPPDVGSSDPLSMVYPSQGRSPSYAS

SEQ ID NO: 2858 - protein, 469 aa, Artificial Sequence
  Fusion Protein
HGEGTFTSDKSKQLAKRAVQLFIEWLLAGGPKKIRYSGGGGGGGSGGGGSGGGGSADKTHTCPPCPAPELLGGPSVFLFPPKPKDTLMISRTPEVTCVVVDVSHEDPEVKFNWYVDGVEVHNAKTKPREEQYNNASRVVSVLTVLHQDWLNGKEYKCKVSNKALPAPIEKTISKAKGQPREPQVYTLPPSRDELTKNQVSLTCLVKGFYPSDIAVEWESNGQPENNYKTTPPVLDSDGSFFLYSKLTVDKSRWQQGNVFSCSVMHEALHNHYTQKSLSLSPGGGGSGSAHPIPDSSPLLQFGGQVRQRYLYTDDACQTEAHLEIREDGTVGGAADQSPESLLQLKALKPGVIQILGVKTSRFLCQRPDGALYGSLHFDPEACSFRELLLEDGYNVYQSEAHGLPLHLPGCKSPHRDPAPRGPARFLPLPGLPPAPPEPPGILAPQPPDVGSSDPLSMVGSQGRSPSYAS

SEQ ID NO: 2859 - protein, 470 aa, Artificial Sequence
  Fusion Protein
HGEGTFTSDKSKQLAKRAVQLFIEWLLAGGPKKIRYSGGGGGGGSGGGGSGGGGSADKTHTCPPCPAPELLGGPSVFLFPPKPKDTLMISRTPEVTCVVVDVSHEDPEVKFNWYVDGVEVHNAKTKPREEQYNNASRVVSVLTVLHQDWLNGKEYKCKVSNKALPAPIEKTISKAKGQPREPQVYTLPPSRDELTKNQVSLTCLVKGFYPSDIAVEWESNGQPENNYKTTPPVLDSDGSFFLYSKLTVDKSRWQQGNVFSCSVMHEALHNHYTQKSLSLSPGGGGSGSAHPIPDSSPLLQFGGQVRQRYLYTDDACQTEAHLEIREDGTVGGAADQSPESLLQLKALKPGVIQILGVKTSRFLCQRPDGALYGSLHFDPEACSFRELLLEDGYNVYQSEAHGLPLHLPGCKSPHRDPAPRGPARFLPLPGLPPAPPEPPGILAPQPPDVGSSDPLSMVYPSQGRSPSYAS

SEQ ID NO: 2860 - protein, 469 aa, Artificial Sequence
  Fusion Protein
HGEGTFTSDKSKQLAKRAVQLFIEWLLAGGPKKIRYSGGGGGGGSGGGGSGGGGSADKTHTCPPCPAPELLGGPSVFLFPPKPKDTLMISRTPEVTCVVVDVSHEDPEVKFNWYVDGVEVHNAKTKPREEQYNNASRVVSVLTVLHQDWLNGKEYKCKVSNKALPAPIEKTISKAKGQPREPQVYTLPPSRDELTKNQVSLTCLVKGFYPSDIAVEWESNGQPENNYKTTPPVLDSDGSFFLYSKLTVDKSRWQQGNVFSCSVMHEALHNHYTQKSLSLSPGGGGSGSAHPIPDSSPLLQFGGQVRQRYLYTDDACQTEAHLEIREDGTVGGAADQSPESLLQLKALKPGVIQILGVKTSRFLCQRPDGALYGSLHFDPEACSFRELLLEDGYNVYQSEAHGLPLHLCGNKSPHRDPAPRGPARFLPLPGLPPAPPEPPGILAPQPPDVGSSDPLSMVGSQGRSPSYAS

SEQ ID NO: 2861 - protein, 470 aa, Artificial Sequence
  Fusion Protein
HGEGTFTSDKSKQLAKRAVQLFIEWLLAGGPKKIRYSGGGGGGGSGGGGSGGGGSADKTHTCPPCPAPELLGGPSVFLFPPKPKDTLMISRTPEVTCVVVDVSHEDPEVKFNWYVDGVEVHNAKTKPREEQYNNASRVVSVLTVLHQDWLNGKEYKCKVSNKALPAPIEKTISKAKGQPREPQVYTLPPSRDELTKNQVSLTCLVKGFYPSDIAVEWESNGQPENNYKTTPPVLDSDGSFFLYSKLTVDKSRWQQGNVFSCSVMHEALHNHYTQKSLSLSPGGGGSGSAHPIPDSSPLLQFGGQVRQRYLYTDDACQTEAHLEIREDGTVGGAADQSPESLLQLKALKPGVIQILGVKTSRFLCQRPDGALYGSLHFDPEACSFRELLLEDGYNVYQSEAHGLPLHLCGNKSPHRDPAPRGPARFLPLPGLPPAPPEPPGILAPQPPDVGSSDPLSMVYPSQGRSPSYAS

SEQ ID NO: 2862 - protein, 472 aa, Artificial Sequence
  Fusion Protein
HGEGTFTSDKSKQLAKRAVQLFIEWLLAGGPKKIRYSGGGGGGGSGGGGSGGGGSAESKYGPPCPPCPAPEFEGGPSVFLFPPKPKDTLMISRTPEVTCVVVDVSQEDPEVQFNWYVDGVEVHNAKTKPREEQFNSTYRVVSVLTVLHQDWLNGKEYKCKVSNKGLPSSIEKTISKAKGQPREPQVYTLPPSQEEMTKNQVSLTCLVKGFYPSDIAVEWESNGQPENNYKTTPPVLDSDGSFFLYSRLTVDKSRWQEGNVFSCSVMHEALHNHYTQKSLSLSLGGGGSGSAHPIPDSSPLLQFGGQVRQRYLYTDDACQTEAHLEIREDGTVGGAADQSPESLLQLKALKPGVIQILGVKTSRFLCQRPDGALYGSLHFDPEACSFRELLLEDGYNVYQSEAHGLPLHLPGCKSPHRDPAPRGPARFLPLPGLPPAPPEPPGILAPQPPDVGSSDPLSMVYPSQGRSPSYAS

SEQ ID NO: 2863 - protein, 471 aa, Artificial Sequence
  Fusion Protein
HGEGTFTSDKSKQLAKRAVQLFIEWLLAGGPKKIRYSGGGGGGGSGGGGSGGGGSAESKYGPPCPPCPAPEFEGGPSVFLFPPKPKDTLMISRTPEVTCVVVDVSQEDPEVQFNWYVDGVEVHNAKTKPREEQFNSTYRVVSVLTVLHQDWLNGKEYKCKVSNKGLPSSIEKTISKAKGQPREPQVYTLPPSQEEMTKNQVSLTCLVKGFYPSDIAVEWESNGQPENNYKTTPPVLDSDGSFFLYSRLTVDKSRWQEGNVFSCSVMHEALHNHYTQKSLSLSLGGGGSGSAHPIPDSSPLLQFGGQVRQRYLYTDDACQTEAHLEIREDGTVGGAADQSPESLLQLKALKPGVIQILGVKTSRFLCQRPDGALYGSLHFDPEACSFRELLLEDGYNVYQSEAHGLPLHLCGNKSPHRDPAPRGPARFLPLPGLPPAPPEPPGILAPQPPDVGSSDPLSMVGSQGRSPSYAS

SEQ ID NO: 2864 - protein, 472 aa, Artificial Sequence
  Fusion Protein
HGEGTFTSDKSKQLAKRAVQLFIEWLLAGGPKKIRYSGGGGGGGSGGGGSGGGGSAESKYGPPCPPCPAPEFEGGPSVFLFPPKPKDTLMISRTPEVTCVVVDVSQEDPEVQFNWYVDGVEVHNAKTKPREEQFNSTYRVVSVLTVLHQDWLNGKEYKCKVSNKGLPSSIEKTISKAKGQPREPQVYTLPPSQEEMTKNQVSLTCLVKGFYPSDIAVEWESNGQPENNYKTTPPVLDSDGSFFLYSRLTVDKSRWQEGNVFSCSVMHEALHNHYTQKSLSLSLGGGGSGSAHPIPDSSPLLQFGGQVRQRYLYTDDACQTEAHLEIREDGTVGGAADQSPESLLQLKALKPGVIQILGVKTSRFLCQRPDGALYGSLHFDPEACSFRELLLEDGYNVYQSEAHGLPLHLCGNKSPHRDPAPRGPARFLPLPGLPPAPPEPPGILAPQPPDVGSSDPLSMVYPSQGRSPSYAS

SEQ ID NO: 2865 - protein, 469 aa, Artificial Sequence
  Fusion Protein
HGEGTFTSDKSKQLAKRLVQLFIEWLLAGGPKKIRYSGGGGGGGSGGGGSGGGGSADKTHTCPPCPAPEAAGGPSVFLFPPKPKDTLMISRTPEVTCVVVDVSHEDPEVKFNWYVDGVEVHNAKTKPREEQYNSTYRVVSVLTVLHQDWLNGKEYKCKVSNKALPAPIEKTISKAKGQPREPQVYTLPPSRDELTKNQVSLTCLVKGFYPSDIAVEWESNGQPENNYKTTPPVLDSDGSFFLYSKLTVDKSRWQQGNVFSCSVMHEALHNHYTQKSLSLSPGGGGSGSAHPIPDSSPLLQFGGQVRQRYLYTDDACQTEAHLEIREDGTVGGAADQSPESLLQLKALKPGVIQILGVKTSRFLCQRPDGALYGSLHFDPEACSFRELLLEDGYNVYQSEAHGLPLHLPGCKSPHRDPAPRGPARFLPLPGLPPAPPEPPGILAPQPPDVGSSDPLSMVGSQGRSPSYAS

SEQ ID NO: 2866 - protein, 470 aa, Artificial Sequence
  Fusion Protein
HGEGTFTSDKSKQLAKRLVQLFIEWLLAGGPKKIRYSGGGGGGGSGGGGSGGGGSADKTHTCPPCPAPEAAGGPSVFLFPPKPKDTLMISRTPEVTCVVVDVSHEDPEVKFNWYVDGVEVHNAKTKPREEQYNSTYRVVSVLTVLHQDWLNGKEYKCKVSNKALPAPIEKTISKAKGQPREPQVYTLPPSRDELTKNQVSLTCLVKGFYPSDIAVEWESNGQPENNYKTTPPVLDSDGSFFLYSKLTVDKSRWQQGNVFSCSVMHEALHNHYTQKSLSLSPGGGGSGSAHPIPDSSPLLQFGGQVRQRYLYTDDACQTEAHLEIREDGTVGGAADQSPESLLQLKALKPGVIQILGVKTSRFLCQRPDGALYGSLHFDPEACSFRELLLEDGYNVYQSEAHGLPLHLPGCKSPHRDPAPRGPARFLPLPGLPPAPPEPPGILAPQPPDVGSSDPLSMVYPSQGRSPSYAS

SEQ ID NO: 2867 - protein, 469 aa, Artificial Sequence
  Fusion Protein
HGEGTFTSDKSKQLAKRLVQLFIEWLLAGGPKKIRYSGGGGGGGSGGGGSGGGGSADKTHTCPPCPAPEAAGGPSVFLFPPKPKDTLMISRTPEVTCVVVDVSHEDPEVKFNWYVDGVEVHNAKTKPREEQYNSTYRVVSVLTVLHQDWLNGKEYKCKVSNKALPAPIEKTISKAKGQPREPQVYTLPPSRDELTKNQVSLTCLVKGFYPSDIAVEWESNGQPENNYKTTPPVLDSDGSFFLYSKLTVDKSRWQQGNVFSCSVMHEALHNHYTQKSLSLSPGGGGSGSAHPIPDSSPLLQFGGQVRQRYLYTDDACQTEAHLEIREDGTVGGAADQSPESLLQLKALKPGVIQILGVKTSRFLCQRPDGALYGSLHFDPEACSFRELLLEDGYNVYQSEAHGLPLHLCGNKSPHRDPAPRGPARFLPLPGLPPAPPEPPGILAPQPPDVGSSDPLSMVGSQGRSPSYAS

SEQ ID NO: 2868 - protein, 470 aa, Artificial Sequence
  Fusion Protein
HGEGTFTSDKSKQLAKRLVQLFIEWLLAGGPKKIRYSGGGGGGGSGGGGSGGGGSADKTHTCPPCPAPEAAGGPSVFLFPPKPKDTLMISRTPEVTCVVVDVSHEDPEVKFNWYVDGVEVHNAKTKPREEQYNSTYRVVSVLTVLHQDWLNGKEYKCKVSNKALPAPIEKTISKAKGQPREPQVYTLPPSRDELTKNQVSLTCLVKGFYPSDIAVEWESNGQPENNYKTTPPVLDSDGSFFLYSKLTVDKSRWQQGNVFSCSVMHEALHNHYTQKSLSLSPGGGGSGSAHPIPDSSPLLQFGGQVRQRYLYTDDACQTEAHLEIREDGTVGGAADQSPESLLQLKALKPGVIQILGVKTSRFLCQRPDGALYGSLHFDPEACSFRELLLEDGYNVYQSEAHGLPLHLCGNKSPHRDPAPRGPARFLPLPGLPPAPPEPPGILAPQPPDVGSSDPLSMVYPSQGRSPSYAS

SEQ ID NO: 2869 - protein, 469 aa, Artificial Sequence
  Fusion Protein
HGEGTFTSDKSKQLAKRLVQLFIEWLLAGGPKKIRYSGGGGGGGSGGGGSGGGGSADKTHTCPPCPAPELLGGPSVFLFPPKPKDTLMISRTPEVTCVVVDVSHEDPEVKFNWYVDGVEVHNAKTKPREEQYNNASRVVSVLTVLHQDWLNGKEYKCKVSNKALPAPIEKTISKAKGQPREPQVYTLPPSRDELTKNQVSLTCLVKGFYPSDIAVEWESNGQPENNYKTTPPVLDSDGSFFLYSKLTVDKSRWQQGNVFSCSVMHEALHNHYTQKSLSLSPGGGGSGSAHPIPDSSPLLQFGGQVRQRYLYTDDACQTEAHLEIREDGTVGGAADQSPESLLQLKALKPGVIQILGVKTSRFLCQRPDGALYGSLHFDPEACSFRELLLEDGYNVYQSEAHGLPLHLPGCKSPHRDPAPRGPARFLPLPGLPPAPPEPPGILAPQPPDVGSSDPLSMVGSQGRSPSYAS

SEQ ID NO: 2870 - protein, 470 aa, Artificial Sequence
  Fusion Protein
HGEGTFTSDKSKQLAKRLVQLFIEWLLAGGPKKIRYSGGGGGGGSGGGGSGGGGSADKTHTCPPCPAPELLGGPSVFLFPPKPKDTLMISRTPEVTCVVVDVSHEDPEVKFNWYVDGVEVHNAKTKPREEQYNNASRVVSVLTVLHQDWLNGKEYKCKVSNKALPAPIEKTISKAKGQPREPQVYTLPPSRDELTKNQVSLTCLVKGFYPSDIAVEWESNGQPENNYKTTPPVLDSDGSFFLYSKLTVDKSRWQQGNVFSCSVMHEALHNHYTQKSLSLSPGGGGSGSAHPIPDSSPLLQFGGQVRQRYLYTDDACQTEAHLEIREDGTVGGAADQSPESLLQLKALKPGVIQILGVKTSRFLCQRPDGALYGSLHFDPEACSFRELLLEDGYNVYQSEAHGLPLHLPGCKSPHRDPAPRGPARFLPLPGLPPAPPEPPGILAPQPPDVGSSDPLSMVYPSQGRSPSYAS

SEQ ID NO: 2871 - protein, 469 aa, Artificial Sequence
  Fusion Protein
HGEGTFTSDKSKQLAKRLVQLFIEWLLAGGPKKIRYSGGGGGGGSGGGGSGGGGSADKTHTCPPCPAPELLGGPSVFLFPPKPKDTLMISRTPEVTCVVVDVSHEDPEVKFNWYVDGVEVHNAKTKPREEQYNNASRVVSVLTVLHQDWLNGKEYKCKVSNKALPAPIEKTISKAKGQPREPQVYTLPPSRDELTKNQVSLTCLVKGFYPSDIAVEWESNGQPENNYKTTPPVLDSDGSFFLYSKLTVDKSRWQQGNVFSCSVMHEALHNHYTQKSLSLSPGGGGSGSAHPIPDSSPLLQFGGQVRQRYLYTDDACQTEAHLEIREDGTVGGAADQSPESLLQLKALKPGVIQILGVKTSRFLCQRPDGALYGSLHFDPEACSFRELLLEDGYNVYQSEAHGLPLHLCGNKSPHRDPAPRGPARFLPLPGLPPAPPEPPGILAPQPPDVGSSDPLSMVGSQGRSPSYAS

SEQ ID NO: 2872 - protein, 470 aa, Artificial Sequence
  Fusion Protein
HGEGTFTSDKSKQLAKRLVQLFIEWLLAGGPKKIRYSGGGGGGGSGGGGSGGGGSADKTHTCPPCPAPELLGGPSVFLFPPKPKDTLMISRTPEVTCVVVDVSHEDPEVKFNWYVDGVEVHNAKTKPREEQYNNASRVVSVLTVLHQDWLNGKEYKCKVSNKALPAPIEKTISKAKGQPREPQVYTLPPSRDELTKNQVSLTCLVKGFYPSDIAVEWESNGQPENNYKTTPPVLDSDGSFFLYSKLTVDKSRWQQGNVFSCSVMHEALHNHYTQKSLSLSPGGGGSGSAHPIPDSSPLLQFGGQVRQRYLYTDDACQTEAHLEIREDGTVGGAADQSPESLLQLKALKPGVIQILGVKTSRFLCQRPDGALYGSLHFDPEACSFRELLLEDGYNVYQSEAHGLPLHLCGNKSPHRDPAPRGPARFLPLPGLPPAPPEPPGILAPQPPDVGSSDPLSMVYPSQGRSPSYAS

SEQ ID NO: 2873 - protein, 472 aa, Artificial Sequence
  Fusion Protein
HGEGTFTSDKSKQLAKRLVQLFIEWLLAGGPKKIRYSGGGGGGGSGGGGSGGGGSAESKYGPPCPPCPAPEFEGGPSVFLFPPKPKDTLMISRTPEVTCVVVDVSQEDPEVQFNWYVDGVEVHNAKTKPREEQFNSTYRVVSVLTVLHQDWLNGKEYKCKVSNKGLPSSIEKTISKAKGQPREPQVYTLPPSQEEMTKNQVSLTCLVKGFYPSDIAVEWESNGQPENNYKTTPPVLDSDGSFFLYSRLTVDKSRWQEGNVFSCSVMHEALHNHYTQKSLSLSLGGGGSGSAHPIPDSSPLLQFGGQVRQRYLYTDDACQTEAHLEIREDGTVGGAADQSPESLLQLKALKPGVIQILGVKTSRFLCQRPDGALYGSLHFDPEACSFRELLLEDGYNVYQSEAHGLPLHLPGCKSPHRDPAPRGPARFLPLPGLPPAPPEPPGILAPQPPDVGSSDPLSMVYPSQGRSPSYAS

SEQ ID NO: 2874 - protein, 471 aa, Artificial Sequence
  Fusion Protein
HGEGTFTSDKSKQLAKRLVQLFIEWLLAGGPKKIRYSGGGGGGGSGGGGSGGGGSAESKYGPPCPPCPAPEFEGGPSVFLFPPKPKDTLMISRTPEVTCVVVDVSQEDPEVQFNWYVDGVEVHNAKTKPREEQFNSTYRVVSVLTVLHQDWLNGKEYKCKVSNKGLPSSIEKTISKAKGQPREPQVYTLPPSQEEMTKNQVSLTCLVKGFYPSDIAVEWESNGQPENNYKTTPPVLDSDGSFFLYSRLTVDKSRWQEGNVFSCSVMHEALHNHYTQKSLSLSLGGGGSGSAHPIPDSSPLLQFGGQVRQRYLYTDDACQTEAHLEIREDGTVGGAADQSPESLLQLKALKPGVIQILGVKTSRFLCQRPDGALYGSLHFDPEACSFRELLLEDGYNVYQSEAHGLPLHLCGNKSPHRDPAPRGPARFLPLPGLPPAPPEPPGILAPQPPDVGSSDPLSMVGSQGRSPSYAS

SEQ ID NO: 2875 - protein, 472 aa, Artificial Sequence
  Fusion Protein
HGEGTFTSDKSKQLAKRLVQLFIEWLLAGGPKKIRYSGGGGGGGSGGGGSGGGGSAESKYGPPCPPCPAPEFEGGPSVFLFPPKPKDTLMISRTPEVTCVVVDVSQEDPEVQFNWYVDGVEVHNAKTKPREEQFNSTYRVVSVLTVLHQDWLNGKEYKCKVSNKGLPSSIEKTISKAKGQPREPQVYTLPPSQEEMTKNQVSLTCLVKGFYPSDIAVEWESNGQPENNYKTTPPVLDSDGSFFLYSRLTVDKSRWQEGNVFSCSVMHEALHNHYTQKSLSLSLGGGGSGSAHPIPDSSPLLQFGGQVRQRYLYTDDACQTEAHLEIREDGTVGGAADQSPESLLQLKALKPGVIQILGVKTSRFLCQRPDGALYGSLHFDPEACSFRELLLEDGYNVYQSEAHGLPLHLCGNKSPHRDPAPRGPARFLPLPGLPPAPPEPPGILAPQPPDVGSSDPLSMVYPSQGRSPSYAS

SEQ ID NO: 2876 - protein, 469 aa, Artificial Sequence
  Fusion Protein
HGEGTFTSDKSKQLAKELVQLFIEWLLAGGPKKIRYSGGGGGGGSGGGGSGGGGSADKTHTCPPCPAPEAAGGPSVFLFPPKPKDTLMISRTPEVTCVVVDVSHEDPEVKFNWYVDGVEVHNAKTKPREEQYNSTYRVVSVLTVLHQDWLNGKEYKCKVSNKALPAPIEKTISKAKGQPREPQVYTLPPSRDELTKNQVSLTCLVKGFYPSDIAVEWESNGQPENNYKTTPPVLDSDGSFFLYSKLTVDKSRWQQGNVFSCSVMHEALHNHYTQKSLSLSPGGGGSGSAHPIPDSSPLLQFGGQVRQRYLYTDDACQTEAHLEIREDGTVGGAADQSPESLLQLKALKPGVIQILGVKTSRFLCQRPDGALYGSLHFDPEACSFRELLLEDGYNVYQSEAHGLPLHLPGCKSPHRDPAPRGPARFLPLPGLPPAPPEPPGILAPQPPDVGSSDPLSMVGSQGRSPSYAS

SEQ ID NO: 2877 - protein, 470 aa, Artificial Sequence
  Fusion Protein
HGEGTFTSDKSKQLAKELVQLFIEWLLAGGPKKIRYSGGGGGGGSGGGGSGGGGSADKTHTCPPCPAPEAAGGPSVFLFPPKPKDTLMISRTPEVTCVVVDVSHEDPEVKFNWYVDGVEVHNAKTKPREEQYNSTYRVVSVLTVLHQDWLNGKEYKCKVSNKALPAPIEKTISKAKGQPREPQVYTLPPSRDELTKNQVSLTCLVKGFYPSDIAVEWESNGQPENNYKTTPPVLDSDGSFFLYSKLTVDKSRWQQGNVFSCSVMHEALHNHYTQKSLSLSPGGGGSGSAHPIPDSSPLLQFGGQVRQRYLYTDDACQTEAHLEIREDGTVGGAADQSPESLLQLKALKPGVIQILGVKTSRFLCQRPDGALYGSLHFDPEACSFRELLLEDGYNVYQSEAHGLPLHLPGCKSPHRDPAPRGPARFLPLPGLPPAPPEPPGILAPQPPDVGSSDPLSMVYPSQGRSPSYAS

SEQ ID NO: 2878 - protein, 469 aa, Artificial Sequence
  Fusion Protein
HGEGTFTSDKSKQLAKELVQLFIEWLLAGGPKKIRYSGGGGGGGSGGGGSGGGGSADKTHTCPPCPAPEAAGGPSVFLFPPKPKDTLMISRTPEVTCVVVDVSHEDPEVKFNWYVDGVEVHNAKTKPREEQYNSTYRVVSVLTVLHQDWLNGKEYKCKVSNKALPAPIEKTISKAKGQPREPQVYTLPPSRDELTKNQVSLTCLVKGFYPSDIAVEWESNGQPENNYKTTPPVLDSDGSFFLYSKLTVDKSRWQQGNVFSCSVMHEALHNHYTQKSLSLSPGGGGSGSAHPIPDSSPLLQFGGQVRQRYLYTDDACQTEAHLEIREDGTVGGAADQSPESLLQLKALKPGVIQILGVKTSRFLCQRPDGALYGSLHFDPEACSFRELLLEDGYNVYQSEAHGLPLHLCGNKSPHRDPAPRGPARFLPLPGLPPAPPEPPGILAPQPPDVGSSDPLSMVGSQGRSPSYAS

SEQ ID NO: 2879 - protein, 470 aa, Artificial Sequence
  Fusion Protein
HGEGTFTSDKSKQLAKELVQLFIEWLLAGGPKKIRYSGGGGGGGSGGGGSGGGGSADKTHTCPPCPAPEAAGGPSVFLFPPKPKDTLMISRTPEVTCVVVDVSHEDPEVKFNWYVDGVEVHNAKTKPREEQYNSTYRVVSVLTVLHQDWLNGKEYKCKVSNKALPAPIEKTISKAKGQPREPQVYTLPPSRDELTKNQVSLTCLVKGFYPSDIAVEWESNGQPENNYKTTPPVLDSDGSFFLYSKLTVDKSRWQQGNVFSCSVMHEALHNHYTQKSLSLSPGGGGSGSAHPIPDSSPLLQFGGQVRQRYLYTDDACQTEAHLEIREDGTVGGAADQSPESLLQLKALKPGVIQILGVKTSRFLCQRPDGALYGSLHFDPEACSFRELLLEDGYNVYQSEAHGLPLHLCGNKSPHRDPAPRGPARFLPLPGLPPAPPEPPGILAPQPPDVGSSDPLSMVYPSQGRSPSYAS

SEQ ID NO: 2880 - protein, 469 aa, Artificial Sequence
  Fusion Protein
HGEGTFTSDKSKQLAKELVQLFIEWLLAGGPKKIRYSGGGGGGGSGGGGSGGGGSADKTHTCPPCPAPELLGGPSVFLFPPKPKDTLMISRTPEVTCVVVDVSHEDPEVKFNWYVDGVEVHNAKTKPREEQYNNASRVVSVLTVLHQDWLNGKEYKCKVSNKALPAPIEKTISKAKGQPREPQVYTLPPSRDELTKNQVSLTCLVKGFYPSDIAVEWESNGQPENNYKTTPPVLDSDGSFFLYSKLTVDKSRWQQGNVFSCSVMHEALHNHYTQKSLSLSPGGGGSGSAHPIPDSSPLLQFGGQVRQRYLYTDDACQTEAHLEIREDGTVGGAADQSPESLLQLKALKPGVIQILGVKTSRFLCQRPDGALYGSLHFDPEACSFRELLLEDGYNVYQSEAHGLPLHLPGCKSPHRDPAPRGPARFLPLPGLPPAPPEPPGILAPQPPDVGSSDPLSMVGSQGRSPSYAS

SEQ ID NO: 2881 - protein, 470 aa, Artificial Sequence
  Fusion Protein
HGEGTFTSDKSKQLAKELVQLFIEWLLAGGPKKIRYSGGGGGGGSGGGGSGGGGSADKTHTCPPCPAPELLGGPSVFLFPPKPKDTLMISRTPEVTCVVVDVSHEDPEVKFNWYVDGVEVHNAKTKPREEQYNNASRVVSVLTVLHQDWLNGKEYKCKVSNKALPAPIEKTISKAKGQPREPQVYTLPPSRDELTKNQVSLTCLVKGFYPSDIAVEWESNGQPENNYKTTPPVLDSDGSFFLYSKLTVDKSRWQQGNVFSCSVMHEALHNHYTQKSLSLSPGGGGSGSAHPIPDSSPLLQFGGQVRQRYLYTDDACQTEAHLEIREDGTVGGAADQSPESLLQLKALKPGVIQILGVKTSRFLCQRPDGALYGSLHFDPEACSFRELLLEDGYNVYQSEAHGLPLHLPGCKSPHRDPAPRGPARFLPLPGLPPAPPEPPGILAPQPPDVGSSDPLSMVYPSQGRSPSYAS

SEQ ID NO: 2882 - protein, 469 aa, Artificial Sequence
  Fusion Protein
HGEGTFTSDKSKQLAKELVQLFIEWLLAGGPKKIRYSGGGGGGGSGGGGSGGGGSADKTHTCPPCPAPELLGGPSVFLFPPKPKDTLMISRTPEVTCVVVDVSHEDPEVKFNWYVDGVEVHNAKTKPREEQYNNASRVVSVLTVLHQDWLNGKEYKCKVSNKALPAPIEKTISKAKGQPREPQVYTLPPSRDELTKNQVSLTCLVKGFYPSDIAVEWESNGQPENNYKTTPPVLDSDGSFFLYSKLTVDKSRWQQGNVFSCSVMHEALHNHYTQKSLSLSPGGGGSGSAHPIPDSSPLLQFGGQVRQRYLYTDDACQTEAHLEIREDGTVGGAADQSPESLLQLKALKPGVIQILGVKTSRFLCQRPDGALYGSLHFDPEACSFRELLLEDGYNVYQSEAHGLPLHLCGNKSPHRDPAPRGPARFLPLPGLPPAPPEPPGILAPQPPDVGSSDPLSMVGSQGRSPSYAS

SEQ ID NO: 2883 - protein, 470 aa, Artificial Sequence
  Fusion Protein
HGEGTFTSDKSKQLAKELVQLFIEWLLAGGPKKIRYSGGGGGGGSGGGGSGGGGSADKTHTCPPCPAPELLGGPSVFLFPPKPKDTLMISRTPEVTCVVVDVSHEDPEVKFNWYVDGVEVHNAKTKPREEQYNNASRVVSVLTVLHQDWLNGKEYKCKVSNKALPAPIEKTISKAKGQPREPQVYTLPPSRDELTKNQVSLTCLVKGFYPSDIAVEWESNGQPENNYKTTPPVLDSDGSFFLYSKLTVDKSRWQQGNVFSCSVMHEALHNHYTQKSLSLSPGGGGSGSAHPIPDSSPLLQFGGQVRQRYLYTDDACQTEAHLEIREDGTVGGAADQSPESLLQLKALKPGVIQILGVKTSRFLCQRPDGALYGSLHFDPEACSFRELLLEDGYNVYQSEAHGLPLHLCGNKSPHRDPAPRGPARFLPLPGLPPAPPEPPGILAPQPPDVGSSDPLSMVYPSQGRSPSYAS

SEQ ID NO: 2884 - protein, 472 aa, Artificial Sequence
  Fusion Protein
HGEGTFTSDKSKQLAKELVQLFIEWLLAGGPKKIRYSGGGGGGGSGGGGSGGGGSAESKYGPPCPPCPAPEFEGGPSVFLFPPKPKDTLMISRTPEVTCVVVDVSQEDPEVQFNWYVDGVEVHNAKTKPREEQFNSTYRVVSVLTVLHQDWLNGKEYKCKVSNKGLPSSIEKTISKAKGQPREPQVYTLPPSQEEMTKNQVSLTCLVKGFYPSDIAVEWESNGQPENNYKTTPPVLDSDGSFFLYSRLTVDKSRWQEGNVFSCSVMHEALHNHYTQKSLSLSLGGGGSGSAHPIPDSSPLLQFGGQVRQRYLYTDDACQTEAHLEIREDGTVGGAADQSPESLLQLKALKPGVIQILGVKTSRFLCQRPDGALYGSLHFDPEACSFRELLLEDGYNVYQSEAHGLPLHLPGCKSPHRDPAPRGPARFLPLPGLPPAPPEPPGILAPQPPDVGSSDPLSMVYPSQGRSPSYAS

SEQ ID NO: 2885 - protein, 471 aa, Artificial Sequence
  Fusion Protein
HGEGTFTSDKSKQLAKELVQLFIEWLLAGGPKKIRYSGGGGGGGSGGGGSGGGGSAESKYGPPCPPCPAPEFEGGPSVFLFPPKPKDTLMISRTPEVTCVVVDVSQEDPEVQFNWYVDGVEVHNAKTKPREEQFNSTYRVVSVLTVLHQDWLNGKEYKCKVSNKGLPSSIEKTISKAKGQPREPQVYTLPPSQEEMTKNQVSLTCLVKGFYPSDIAVEWESNGQPENNYKTTPPVLDSDGSFFLYSRLTVDKSRWQEGNVFSCSVMHEALHNHYTQKSLSLSLGGGGSGSAHPIPDSSPLLQFGGQVRQRYLYTDDACQTEAHLEIREDGTVGGAADQSPESLLQLKALKPGVIQILGVKTSRFLCQRPDGALYGSLHFDPEACSFRELLLEDGYNVYQSEAHGLPLHLCGNKSPHRDPAPRGPARFLPLPGLPPAPPEPPGILAPQPPDVGSSDPLSMVGSQGRSPSYAS

SEQ ID NO: 2886 - protein, 472 aa, Artificial Sequence
  Fusion Protein
HGEGTFTSDKSKQLAKELVQLFIEWLLAGGPKKIRYSGGGGGGGSGGGGSGGGGSAESKYGPPCPPCPAPEFEGGPSVFLFPPKPKDTLMISRTPEVTCVVVDVSQEDPEVQFNWYVDGVEVHNAKTKPREEQFNSTYRVVSVLTVLHQDWLNGKEYKCKVSNKGLPSSIEKTISKAKGQPREPQVYTLPPSQEEMTKNQVSLTCLVKGFYPSDIAVEWESNGQPENNYKTTPPVLDSDGSFFLYSRLTVDKSRWQEGNVFSCSVMHEALHNHYTQKSLSLSLGGGGSGSAHPIPDSSPLLQFGGQVRQRYLYTDDACQTEAHLEIREDGTVGGAADQSPESLLQLKALKPGVIQILGVKTSRFLCQRPDGALYGSLHFDPEACSFRELLLEDGYNVYQSEAHGLPLHLCGNKSPHRDPAPRGPARFLPLPGLPPAPPEPPGILAPQPPDVGSSDPLSMVYPSQGRSPSYAS

SEQ ID NO: 2887 - protein, 469 aa, Artificial Sequence
  Fusion Protein
HGEGTFTSDKSKQLAERLVQLFIEWLLAGGPKKIRYSGGGGGGGSGGGGSGGGGSADKTHTCPPCPAPEAAGGPSVFLFPPKPKDTLMISRTPEVTCVVVDVSHEDPEVKFNWYVDGVEVHNAKTKPREEQYNSTYRVVSVLTVLHQDWLNGKEYKCKVSNKALPAPIEKTISKAKGQPREPQVYTLPPSRDELTKNQVSLTCLVKGFYPSDIAVEWESNGQPENNYKTTPPVLDSDGSFFLYSKLTVDKSRWQQGNVFSCSVMHEALHNHYTQKSLSLSPGGGGSGSAHPIPDSSPLLQFGGQVRQRYLYTDDACQTEAHLEIREDGTVGGAADQSPESLLQLKALKPGVIQILGVKTSRFLCQRPDGALYGSLHFDPEACSFRELLLEDGYNVYQSEAHGLPLHLPGCKSPHRDPAPRGPARFLPLPGLPPAPPEPPGILAPQPPDVGSSDPLSMVGSQGRSPSYAS

SEQ ID NO: 2888 - protein, 470 aa, Artificial Sequence
  Fusion Protein
HGEGTFTSDKSKQLAERLVQLFIEWLLAGGPKKIRYSGGGGGGGSGGGGSGGGGSADKTHTCPPCPAPEAAGGPSVFLFPPKPKDTLMISRTPEVTCVVVDVSHEDPEVKFNWYVDGVEVHNAKTKPREEQYNSTYRVVSVLTVLHQDWLNGKEYKCKVSNKALPAPIEKTISKAKGQPREPQVYTLPPSRDELTKNQVSLTCLVKGFYPSDIAVEWESNGQPENNYKTTPPVLDSDGSFFLYSKLTVDKSRWQQGNVFSCSVMHEALHNHYTQKSLSLSPGGGGSGSAHPIPDSSPLLQFGGQVRQRYLYTDDACQTEAHLEIREDGTVGGAADQSPESLLQLKALKPGVIQILGVKTSRFLCQRPDGALYGSLHFDPEACSFRELLLEDGYNVYQSEAHGLPLHLPGCKSPHRDPAPRGPARFLPLPGLPPAPPEPPGILAPQPPDVGSSDPLSMVYPSQGRSPSYAS

SEQ ID NO: 2889 - protein, 469 aa, Artificial Sequence
  Fusion Protein
HGEGTFTSDKSKQLAERLVQLFIEWLLAGGPKKIRYSGGGGGGGSGGGGSGGGGSADKTHTCPPCPAPEAAGGPSVFLFPPKPKDTLMISRTPEVTCVVVDVSHEDPEVKFNWYVDGVEVHNAKTKPREEQYNSTYRVVSVLTVLHQDWLNGKEYKCKVSNKALPAPIEKTISKAKGQPREPQVYTLPPSRDELTKNQVSLTCLVKGFYPSDIAVEWESNGQPENNYKTTPPVLDSDGSFFLYSKLTVDKSRWQQGNVFSCSVMHEALHNHYTQKSLSLSPGGGGSGSAHPIPDSSPLLQFGGQVRQRYLYTDDACQTEAHLEIREDGTVGGAADQSPESLLQLKALKPGVIQILGVKTSRFLCQRPDGALYGSLHFDPEACSFRELLLEDGYNVYQSEAHGLPLHLCGNKSPHRDPAPRGPARFLPLPGLPPAPPEPPGILAPQPPDVGSSDPLSMVGSQGRSPSYAS

SEQ ID NO: 2890 - protein, 470 aa, Artificial Sequence
  Fusion Protein
HGEGTFTSDKSKQLAERLVQLFIEWLLAGGPKKIRYSGGGGGGGSGGGGSGGGGSADKTHTCPPCPAPEAAGGPSVFLFPPKPKDTLMISRTPEVTCVVVDVSHEDPEVKFNWYVDGVEVHNAKTKPREEQYNSTYRVVSVLTVLHQDWLNGKEYKCKVSNKALPAPIEKTISKAKGQPREPQVYTLPPSRDELTKNQVSLTCLVKGFYPSDIAVEWESNGQPENNYKTTPPVLDSDGSFFLYSKLTVDKSRWQQGNVFSCSVMHEALHNHYTQKSLSLSPGGGGSGSAHPIPDSSPLLQFGGQVRQRYLYTDDACQTEAHLEIREDGTVGGAADQSPESLLQLKALKPGVIQILGVKTSRFLCQRPDGALYGSLHFDPEACSFRELLLEDGYNVYQSEAHGLPLHLCGNKSPHRDPAPRGPARFLPLPGLPPAPPEPPGILAPQPPDVGSSDPLSMVYPSQGRSPSYAS

SEQ ID NO: 2891 - protein, 469 aa, Artificial Sequence
  Fusion Protein
HGEGTFTSDKSKQLAERLVQLFIEWLLAGGPKKIRYSGGGGGGGSGGGGSGGGGSADKTHTCPPCPAPELLGGPSVFLFPPKPKDTLMISRTPEVTCVVVDVSHEDPEVKFNWYVDGVEVHNAKTKPREEQYNNASRVVSVLTVLHQDWLNGKEYKCKVSNKALPAPIEKTISKAKGQPREPQVYTLPPSRDELTKNQVSLTCLVKGFYPSDIAVEWESNGQPENNYKTTPPVLDSDGSFFLYSKLTVDKSRWQQGNVFSCSVMHEALHNHYTQKSLSLSPGGGGSGSAHPIPDSSPLLQFGGQVRQRYLYTDDACQTEAHLEIREDGTVGGAADQSPESLLQLKALKPGVIQILGVKTSRFLCQRPDGALYGSLHFDPEACSFRELLLEDGYNVYQSEAHGLPLHLPGCKSPHRDPAPRGPARFLPLPGLPPAPPEPPGILAPQPPDVGSSDPLSMVGSQGRSPSYAS

SEQ ID NO: 2892 - protein, 470 aa, Artificial Sequence
  Fusion Protein
HGEGTFTSDKSKQLAERLVQLFIEWLLAGGPKKIRYSGGGGGGGSGGGGSGGGGSADKTHTCPPCPAPELLGGPSVFLFPPKPKDTLMISRTPEVTCVVVDVSHEDPEVKFNWYVDGVEVHNAKTKPREEQYNNASRVVSVLTVLHQDWLNGKEYKCKVSNKALPAPIEKTISKAKGQPREPQVYTLPPSRDELTKNQVSLTCLVKGFYPSDIAVEWESNGQPENNYKTTPPVLDSDGSFFLYSKLTVDKSRWQQGNVFSCSVMHEALHNHYTQKSLSLSPGGGGSGSAHPIPDSSPLLQFGGQVRQRYLYTDDACQTEAHLEIREDGTVGGAADQSPESLLQLKALKPGVIQILGVKTSRFLCQRPDGALYGSLHFDPEACSFRELLLEDGYNVYQSEAHGLPLHLPGCKSPHRDPAPRGPARFLPLPGLPPAPPEPPGILAPQPPDVGSSDPLSMVYPSQGRSPSYAS

SEQ ID NO: 2893 - protein, 469 aa, Artificial Sequence
  Fusion Protein
HGEGTFTSDKSKQLAERLVQLFIEWLLAGGPKKIRYSGGGGGGGSGGGGSGGGGSADKTHTCPPCPAPELLGGPSVFLFPPKPKDTLMISRTPEVTCVVVDVSHEDPEVKFNWYVDGVEVHNAKTKPREEQYNNASRVVSVLTVLHQDWLNGKEYKCKVSNKALPAPIEKTISKAKGQPREPQVYTLPPSRDELTKNQVSLTCLVKGFYPSDIAVEWESNGQPENNYKTTPPVLDSDGSFFLYSKLTVDKSRWQQGNVFSCSVMHEALHNHYTQKSLSLSPGGGGSGSAHPIPDSSPLLQFGGQVRQRYLYTDDACQTEAHLEIREDGTVGGAADQSPESLLQLKALKPGVIQILGVKTSRFLCQRPDGALYGSLHFDPEACSFRELLLEDGYNVYQSEAHGLPLHLCGNKSPHRDPAPRGPARFLPLPGLPPAPPEPPGILAPQPPDVGSSDPLSMVGSQGRSPSYAS

SEQ ID NO: 2894 - protein, 470 aa, Artificial Sequence
  Fusion Protein
HGEGTFTSDKSKQLAERLVQLFIEWLLAGGPKKIRYSGGGGGGGSGGGGSGGGGSADKTHTCPPCPAPELLGGPSVFLFPPKPKDTLMISRTPEVTCVVVDVSHEDPEVKFNWYVDGVEVHNAKTKPREEQYNNASRVVSVLTVLHQDWLNGKEYKCKVSNKALPAPIEKTISKAKGQPREPQVYTLPPSRDELTKNQVSLTCLVKGFYPSDIAVEWESNGQPENNYKTTPPVLDSDGSFFLYSKLTVDKSRWQQGNVFSCSVMHEALHNHYTQKSLSLSPGGGGSGSAHPIPDSSPLLQFGGQVRQRYLYTDDACQTEAHLEIREDGTVGGAADQSPESLLQLKALKPGVIQILGVKTSRFLCQRPDGALYGSLHFDPEACSFRELLLEDGYNVYQSEAHGLPLHLCGNKSPHRDPAPRGPARFLPLPGLPPAPPEPPGILAPQPPDVGSSDPLSMVYPSQGRSPSYAS

SEQ ID NO: 2895 - protein, 472 aa, Artificial Sequence
  Fusion Protein
HGEGTFTSDKSKQLAERLVQLFIEWLLAGGPKKIRYSGGGGGGGSGGGGSGGGGSAESKYGPPCPPCPAPEFEGGPSVFLFPPKPKDTLMISRTPEVTCVVVDVSQEDPEVQFNWYVDGVEVHNAKTKPREEQFNSTYRVVSVLTVLHQDWLNGKEYKCKVSNKGLPSSIEKTISKAKGQPREPQVYTLPPSQEEMTKNQVSLTCLVKGFYPSDIAVEWESNGQPENNYKTTPPVLDSDGSFFLYSRLTVDKSRWQEGNVFSCSVMHEALHNHYTQKSLSLSLGGGGSGSAHPIPDSSPLLQFGGQVRQRYLYTDDACQTEAHLEIREDGTVGGAADQSPESLLQLKALKPGVIQILGVKTSRFLCQRPDGALYGSLHFDPEACSFRELLLEDGYNVYQSEAHGLPLHLPGCKSPHRDPAPRGPARFLPLPGLPPAPPEPPGILAPQPPDVGSSDPLSMVYPSQGRSPSYAS

SEQ ID NO: 2896 - protein, 471 aa, Artificial Sequence
  Fusion Protein
HGEGTFTSDKSKQLAERLVQLFIEWLLAGGPKKIRYSGGGGGGGSGGGGSGGGGSAESKYGPPCPPCPAPEFEGGPSVFLFPPKPKDTLMISRTPEVTCVVVDVSQEDPEVQFNWYVDGVEVHNAKTKPREEQFNSTYRVVSVLTVLHQDWLNGKEYKCKVSNKGLPSSIEKTISKAKGQPREPQVYTLPPSQEEMTKNQVSLTCLVKGFYPSDIAVEWESNGQPENNYKTTPPVLDSDGSFFLYSRLTVDKSRWQEGNVFSCSVMHEALHNHYTQKSLSLSLGGGGSGSAHPIPDSSPLLQFGGQVRQRYLYTDDACQTEAHLEIREDGTVGGAADQSPESLLQLKALKPGVIQILGVKTSRFLCQRPDGALYGSLHFDPEACSFRELLLEDGYNVYQSEAHGLPLHLCGNKSPHRDPAPRGPARFLPLPGLPPAPPEPPGILAPQPPDVGSSDPLSMVGSQGRSPSYAS

SEQ ID NO: 2897 - protein, 472 aa, Artificial Sequence
  Fusion Protein
HGEGTFTSDKSKQLAERLVQLFIEWLLAGGPKKIRYSGGGGGGGSGGGGSGGGGSAESKYGPPCPPCPAPEFEGGPSVFLFPPKPKDTLMISRTPEVTCVVVDVSQEDPEVQFNWYVDGVEVHNAKTKPREEQFNSTYRVVSVLTVLHQDWLNGKEYKCKVSNKGLPSSIEKTISKAKGQPREPQVYTLPPSQEEMTKNQVSLTCLVKGFYPSDIAVEWESNGQPENNYKTTPPVLDSDGSFFLYSRLTVDKSRWQEGNVFSCSVMHEALHNHYTQKSLSLSLGGGGSGSAHPIPDSSPLLQFGGQVRQRYLYTDDACQTEAHLEIREDGTVGGAADQSPESLLQLKALKPGVIQILGVKTSRFLCQRPDGALYGSLHFDPEACSFRELLLEDGYNVYQSEAHGLPLHLCGNKSPHRDPAPRGPARFLPLPGLPPAPPEPPGILAPQPPDVGSSDPLSMVYPSQGRSPSYAS

SEQ ID NO: 2898 - protein, 471 aa, Artificial Sequence
  Fusion Protein
HGEGTFTSDKSKQLAKRLAQEFIEWLIKGGHSSGKPPPKGGGGGGGSGGGGSGGGGSADKTHTCPPCPAPEAAGGPSVFLFPPKPKDTLMISRTPEVTCVVVDVSHEDPEVKFNWYVDGVEVHNAKTKPREEQYNSTYRVVSVLTVLHQDWLNGKEYKCKVSNKALPAPIEKTISKAKGQPREPQVYTLPPSRDELTKNQVSLTCLVKGFYPSDIAVEWESNGQPENNYKTTPPVLDSDGSFFLYSKLTVDKSRWQQGNVFSCSVMHEALHNHYTQKSLSLSPGGGGSGSAHPIPDSSPLLQFGGQVRQRYLYTDDACQTEAHLEIREDGTVGGAADQSPESLLQLKALKPGVIQILGVKTSRFLCQRPDGALYGSLHFDPEACSFRELLLEDGYNVYQSEAHGLPLHLPGCKSPHRDPAPRGPARFLPLPGLPPAPPEPPGILAPQPPDVGSSDPLSMVGSQGRSPSYAS

SEQ ID NO: 2899 - protein, 472 aa, Artificial Sequence
  Fusion Protein
HGEGTFTSDKSKQLAKRLAQEFIEWLIKGGHSSGKPPPKGGGGGGGSGGGGSGGGGSADKTHTCPPCPAPEAAGGPSVFLFPPKPKDTLMISRTPEVTCVVVDVSHEDPEVKFNWYVDGVEVHNAKTKPREEQYNSTYRVVSVLTVLHQDWLNGKEYKCKVSNKALPAPIEKTISKAKGQPREPQVYTLPPSRDELTKNQVSLTCLVKGFYPSDIAVEWESNGQPENNYKTTPPVLDSDGSFFLYSKLTVDKSRWQQGNVFSCSVMHEALHNHYTQKSLSLSPGGGGSGSAHPIPDSSPLLQFGGQVRQRYLYTDDACQTEAHLEIREDGTVGGAADQSPESLLQLKALKPGVIQILGVKTSRFLCQRPDGALYGSLHFDPEACSFRELLLEDGYNVYQSEAHGLPLHLPGCKSPHRDPAPRGPARFLPLPGLPPAPPEPPGILAPQPPDVGSSDPLSMVYPSQGRSPSYAS

SEQ ID NO: 2900 - protein, 471 aa, Artificial Sequence
  Fusion Protein
HGEGTFTSDKSKQLAKRLAQEFIEWLIKGGHSSGKPPPKGGGGGGGSGGGGSGGGGSADKTHTCPPCPAPEAAGGPSVFLFPPKPKDTLMISRTPEVTCVVVDVSHEDPEVKFNWYVDGVEVHNAKTKPREEQYNSTYRVVSVLTVLHQDWLNGKEYKCKVSNKALPAPIEKTISKAKGQPREPQVYTLPPSRDELTKNQVSLTCLVKGFYPSDIAVEWESNGQPENNYKTTPPVLDSDGSFFLYSKLTVDKSRWQQGNVFSCSVMHEALHNHYTQKSLSLSPGGGGSGSAHPIPDSSPLLQFGGQVRQRYLYTDDACQTEAHLEIREDGTVGGAADQSPESLLQLKALKPGVIQILGVKTSRFLCQRPDGALYGSLHFDPEACSFRELLLEDGYNVYQSEAHGLPLHLCGNKSPHRDPAPRGPARFLPLPGLPPAPPEPPGILAPQPPDVGSSDPLSMVGSQGRSPSYAS

SEQ ID NO: 2901 - protein, 472 aa, Artificial Sequence
  Fusion Protein
HGEGTFTSDKSKQLAKRLAQEFIEWLIKGGHSSGKPPPKGGGGGGGSGGGGSGGGGSADKTHTCPPCPAPEAAGGPSVFLFPPKPKDTLMISRTPEVTCVVVDVSHEDPEVKFNWYVDGVEVHNAKTKPREEQYNSTYRVVSVLTVLHQDWLNGKEYKCKVSNKALPAPIEKTISKAKGQPREPQVYTLPPSRDELTKNQVSLTCLVKGFYPSDIAVEWESNGQPENNYKTTPPVLDSDGSFFLYSKLTVDKSRWQQGNVFSCSVMHEALHNHYTQKSLSLSPGGGGSGSAHPIPDSSPLLQFGGQVRQRYLYTDDACQTEAHLEIREDGTVGGAADQSPESLLQLKALKPGVIQILGVKTSRFLCQRPDGALYGSLHFDPEACSFRELLLEDGYNVYQSEAHGLPLHLCGNKSPHRDPAPRGPARFLPLPGLPPAPPEPPGILAPQPPDVGSSDPLSMVYPSQGRSPSYAS

SEQ ID NO: 2902 - protein, 471 aa, Artificial Sequence
  Fusion Protein
HGEGTFTSDKSKQLAKRLAQEFIEWLIKGGHSSGKPPPKGGGGGGGSGGGGSGGGGSADKTHTCPPCPAPELLGGPSVFLFPPKPKDTLMISRTPEVTCVVVDVSHEDPEVKFNWYVDGVEVHNAKTKPREEQYNNASRVVSVLTVLHQDWLNGKEYKCKVSNKALPAPIEKTISKAKGQPREPQVYTLPPSRDELTKNQVSLTCLVKGFYPSDIAVEWESNGQPENNYKTTPPVLDSDGSFFLYSKLTVDKSRWQQGNVFSCSVMHEALHNHYTQKSLSLSPGGGGSGSAHPIPDSSPLLQFGGQVRQRYLYTDDACQTEAHLEIREDGTVGGAADQSPESLLQLKALKPGVIQILGVKTSRFLCQRPDGALYGSLHFDPEACSFRELLLEDGYNVYQSEAHGLPLHLPGCKSPHRDPAPRGPARFLPLPGLPPAPPEPPGILAPQPPDVGSSDPLSMVGSQGRSPSYAS

SEQ ID NO: 2903 - protein, 472 aa, Artificial Sequence
  Fusion Protein
HGEGTFTSDKSKQLAKRLAQEFIEWLIKGGHSSGKPPPKGGGGGGGSGGGGSGGGGSADKTHTCPPCPAPELLGGPSVFLFPPKPKDTLMISRTPEVTCVVVDVSHEDPEVKFNWYVDGVEVHNAKTKPREEQYNNASRVVSVLTVLHQDWLNGKEYKCKVSNKALPAPIEKTISKAKGQPREPQVYTLPPSRDELTKNQVSLTCLVKGFYPSDIAVEWESNGQPENNYKTTPPVLDSDGSFFLYSKLTVDKSRWQQGNVFSCSVMHEALHNHYTQKSLSLSPGGGGSGSAHPIPDSSPLLQFGGQVRQRYLYTDDACQTEAHLEIREDGTVGGAADQSPESLLQLKALKPGVIQILGVKTSRFLCQRPDGALYGSLHFDPEACSFRELLLEDGYNVYQSEAHGLPLHLPGCKSPHRDPAPRGPARFLPLPGLPPAPPEPPGILAPQPPDVGSSDPLSMVYPSQGRSPSYAS

SEQ ID NO: 2904 - protein, 471 aa, Artificial Sequence
  Fusion Protein
HGEGTFTSDKSKQLAKRLAQEFIEWLIKGGHSSGKPPPKGGGGGGGSGGGGSGGGGSADKTHTCPPCPAPELLGGPSVFLFPPKPKDTLMISRTPEVTCVVVDVSHEDPEVKFNWYVDGVEVHNAKTKPREEQYNNASRVVSVLTVLHQDWLNGKEYKCKVSNKALPAPIEKTISKAKGQPREPQVYTLPPSRDELTKNQVSLTCLVKGFYPSDIAVEWESNGQPENNYKTTPPVLDSDGSFFLYSKLTVDKSRWQQGNVFSCSVMHEALHNHYTQKSLSLSPGGGGSGSAHPIPDSSPLLQFGGQVRQRYLYTDDACQTEAHLEIREDGTVGGAADQSPESLLQLKALKPGVIQILGVKTSRFLCQRPDGALYGSLHFDPEACSFRELLLEDGYNVYQSEAHGLPLHLCGNKSPHRDPAPRGPARFLPLPGLPPAPPEPPGILAPQPPDVGSSDPLSMVGSQGRSPSYAS

SEQ ID NO: 2905 - protein, 472 aa, Artificial Sequence
  Fusion Protein
HGEGTFTSDKSKQLAKRLAQEFIEWLIKGGHSSGKPPPKGGGGGGGSGGGGSGGGGSADKTHTCPPCPAPELLGGPSVFLFPPKPKDTLMISRTPEVTCVVVDVSHEDPEVKFNWYVDGVEVHNAKTKPREEQYNNASRVVSVLTVLHQDWLNGKEYKCKVSNKALPAPIEKTISKAKGQPREPQVYTLPPSRDELTKNQVSLTCLVKGFYPSDIAVEWESNGQPENNYKTTPPVLDSDGSFFLYSKLTVDKSRWQQGNVFSCSVMHEALHNHYTQKSLSLSPGGGGSGSAHPIPDSSPLLQFGGQVRQRYLYTDDACQTEAHLEIREDGTVGGAADQSPESLLQLKALKPGVIQILGVKTSRFLCQRPDGALYGSLHFDPEACSFRELLLEDGYNVYQSEAHGLPLHLCGNKSPHRDPAPRGPARFLPLPGLPPAPPEPPGILAPQPPDVGSSDPLSMVYPSQGRSPSYAS

SEQ ID NO: 2906 - protein, 474 aa, Artificial Sequence
  Fusion Protein
HGEGTFTSDKSKQLAKRLAQEFIEWLIKGGHSSGKPPPKGGGGGGGSGGGGSGGGGSAESKYGPPCPPCPAPEFEGGPSVFLFPPKPKDTLMISRTPEVTCVVVDVSQEDPEVQFNWYVDGVEVHNAKTKPREEQFNSTYRVVSVLTVLHQDWLNGKEYKCKVSNKGLPSSIEKTISKAKGQPREPQVYTLPPSQEEMTKNQVSLTCLVKGFYPSDIAVEWESNGQPENNYKTTPPVLDSDGSFFLYSRLTVDKSRWQEGNVFSCSVMHEALHNHYTQKSLSLSLGGGGSGSAHPIPDSSPLLQFGGQVRQRYLYTDDACQTEAHLEIREDGTVGGAADQSPESLLQLKALKPGVIQILGVKTSRFLCQRPDGALYGSLHFDPEACSFRELLLEDGYNVYQSEAHGLPLHLPGCKSPHRDPAPRGPARFLPLPGLPPAPPEPPGILAPQPPDVGSSDPLSMVYPSQGRSPSYAS

SEQ ID NO: 2907 - protein, 473 aa, Artificial Sequence
  Fusion Protein
HGEGTFTSDKSKQLAKRLAQEFIEWLIKGGHSSGKPPPKGGGGGGGSGGGGSGGGGSAESKYGPPCPPCPAPEFEGGPSVFLFPPKPKDTLMISRTPEVTCVVVDVSQEDPEVQFNWYVDGVEVHNAKTKPREEQFNSTYRVVSVLTVLHQDWLNGKEYKCKVSNKGLPSSIEKTISKAKGQPREPQVYTLPPSQEEMTKNQVSLTCLVKGFYPSDIAVEWESNGQPENNYKTTPPVLDSDGSFFLYSRLTVDKSRWQEGNVFSCSVMHEALHNHYTQKSLSLSLGGGGSGSAHPIPDSSPLLQFGGQVRQRYLYTDDACQTEAHLEIREDGTVGGAADQSPESLLQLKALKPGVIQILGVKTSRFLCQRPDGALYGSLHFDPEACSFRELLLEDGYNVYQSEAHGLPLHLCGNKSPHRDPAPRGPARFLPLPGLPPAPPEPPGILAPQPPDVGSSDPLSMVGSQGRSPSYAS

SEQ ID NO: 2908 - protein, 474 aa, Artificial Sequence
  Fusion Protein
HGEGTFTSDKSKQLAKRLAQEFIEWLIKGGHSSGKPPPKGGGGGGGSGGGGSGGGGSAESKYGPPCPPCPAPEFEGGPSVFLFPPKPKDTLMISRTPEVTCVVVDVSQEDPEVQFNWYVDGVEVHNAKTKPREEQFNSTYRVVSVLTVLHQDWLNGKEYKCKVSNKGLPSSIEKTISKAKGQPREPQVYTLPPSQEEMTKNQVSLTCLVKGFYPSDIAVEWESNGQPENNYKTTPPVLDSDGSFFLYSRLTVDKSRWQEGNVFSCSVMHEALHNHYTQKSLSLSLGGGGSGSAHPIPDSSPLLQFGGQVRQRYLYTDDACQTEAHLEIREDGTVGGAADQSPESLLQLKALKPGVIQILGVKTSRFLCQRPDGALYGSLHFDPEACSFRELLLEDGYNVYQSEAHGLPLHLCGNKSPHRDPAPRGPARFLPLPGLPPAPPEPPGILAPQPPDVGSSDPLSMVYPSQGRSPSYAS

SEQ ID NO: 2909 - protein, 471 aa, Artificial Sequence
  Fusion Protein
HGEGTFTSDKSKQLAERLVRLFIEWLIAGGHSSGKPPPKGGGGGGGSGGGGSGGGGSADKTHTCPPCPAPEAAGGPSVFLFPPKPKDTLMISRTPEVTCVVVDVSHEDPEVKFNWYVDGVEVHNAKTKPREEQYNSTYRVVSVLTVLHQDWLNGKEYKCKVSNKALPAPIEKTISKAKGQPREPQVYTLPPSRDELTKNQVSLTCLVKGFYPSDIAVEWESNGQPENNYKTTPPVLDSDGSFFLYSKLTVDKSRWQQGNVFSCSVMHEALHNHYTQKSLSLSPGGGGSGSAHPIPDSSPLLQFGGQVRQRYLYTDDACQTEAHLEIREDGTVGGAADQSPESLLQLKALKPGVIQILGVKTSRFLCQRPDGALYGSLHFDPEACSFRELLLEDGYNVYQSEAHGLPLHLPGCKSPHRDPAPRGPARFLPLPGLPPAPPEPPGILAPQPPDVGSSDPLSMVGSQGRSPSYAS

SEQ ID NO: 2910 - protein, 472 aa, Artificial Sequence
  Fusion Protein
HGEGTFTSDKSKQLAERLVRLFIEWLIAGGHSSGKPPPKGGGGGGGSGGGGSGGGGSADKTHTCPPCPAPEAAGGPSVFLFPPKPKDTLMISRTPEVTCVVVDVSHEDPEVKFNWYVDGVEVHNAKTKPREEQYNSTYRVVSVLTVLHQDWLNGKEYKCKVSNKALPAPIEKTISKAKGQPREPQVYTLPPSRDELTKNQVSLTCLVKGFYPSDIAVEWESNGQPENNYKTTPPVLDSDGSFFLYSKLTVDKSRWQQGNVFSCSVMHEALHNHYTQKSLSLSPGGGGSGSAHPIPDSSPLLQFGGQVRQRYLYTDDACQTEAHLEIREDGTVGGAADQSPESLLQLKALKPGVIQILGVKTSRFLCQRPDGALYGSLHFDPEACSFRELLLEDGYNVYQSEAHGLPLHLPGCKSPHRDPAPRGPARFLPLPGLPPAPPEPPGILAPQPPDVGSSDPLSMVYPSQGRSPSYAS

SEQ ID NO: 2911 - protein, 471 aa, Artificial Sequence
  Fusion Protein
HGEGTFTSDKSKQLAERLVRLFIEWLIAGGHSSGKPPPKGGGGGGGSGGGGSGGGGSADKTHTCPPCPAPEAAGGPSVFLFPPKPKDTLMISRTPEVTCVVVDVSHEDPEVKFNWYVDGVEVHNAKTKPREEQYNSTYRVVSVLTVLHQDWLNGKEYKCKVSNKALPAPIEKTISKAKGQPREPQVYTLPPSRDELTKNQVSLTCLVKGFYPSDIAVEWESNGQPENNYKTTPPVLDSDGSFFLYSKLTVDKSRWQQGNVFSCSVMHEALHNHYTQKSLSLSPGGGGSGSAHPIPDSSPLLQFGGQVRQRYLYTDDACQTEAHLEIREDGTVGGAADQSPESLLQLKALKPGVIQILGVKTSRFLCQRPDGALYGSLHFDPEACSFRELLLEDGYNVYQSEAHGLPLHLCGNKSPHRDPAPRGPARFLPLPGLPPAPPEPPGILAPQPPDVGSSDPLSMVGSQGRSPSYAS

SEQ ID NO: 2912 - protein, 472 aa, Artificial Sequence
  Fusion Protein
HGEGTFTSDKSKQLAERLVRLFIEWLIAGGHSSGKPPPKGGGGGGGSGGGGSGGGGSADKTHTCPPCPAPEAAGGPSVFLFPPKPKDTLMISRTPEVTCVVVDVSHEDPEVKFNWYVDGVEVHNAKTKPREEQYNSTYRVVSVLTVLHQDWLNGKEYKCKVSNKALPAPIEKTISKAKGQPREPQVYTLPPSRDELTKNQVSLTCLVKGFYPSDIAVEWESNGQPENNYKTTPPVLDSDGSFFLYSKLTVDKSRWQQGNVFSCSVMHEALHNHYTQKSLSLSPGGGGSGSAHPIPDSSPLLQFGGQVRQRYLYTDDACQTEAHLEIREDGTVGGAADQSPESLLQLKALKPGVIQILGVKTSRFLCQRPDGALYGSLHFDPEACSFRELLLEDGYNVYQSEAHGLPLHLCGNKSPHRDPAPRGPARFLPLPGLPPAPPEPPGILAPQPPDVGSSDPLSMVYPSQGRSPSYAS

SEQ ID NO: 2913 - protein, 471 aa, Artificial Sequence
  Fusion Protein
HGEGTFTSDKSKQLAERLVRLFIEWLIAGGHSSGKPPPKGGGGGGGSGGGGSGGGGSADKTHTCPPCPAPELLGGPSVFLFPPKPKDTLMISRTPEVTCVVVDVSHEDPEVKFNWYVDGVEVHNAKTKPREEQYNNASRVVSVLTVLHQDWLNGKEYKCKVSNKALPAPIEKTISKAKGQPREPQVYTLPPSRDELTKNQVSLTCLVKGFYPSDIAVEWESNGQPENNYKTTPPVLDSDGSFFLYSKLTVDKSRWQQGNVFSCSVMHEALHNHYTQKSLSLSPGGGGSGSAHPIPDSSPLLQFGGQVRQRYLYTDDACQTEAHLEIREDGTVGGAADQSPESLLQLKALKPGVIQILGVKTSRFLCQRPDGALYGSLHFDPEACSFRELLLEDGYNVYQSEAHGLPLHLPGCKSPHRDPAPRGPARFLPLPGLPPAPPEPPGILAPQPPDVGSSDPLSMVGSQGRSPSYAS

SEQ ID NO: 2914 - protein, 472 aa, Artificial Sequence
  Fusion Protein
HGEGTFTSDKSKQLAERLVRLFIEWLIAGGHSSGKPPPKGGGGGGGSGGGGSGGGGSADKTHTCPPCPAPELLGGPSVFLFPPKPKDTLMISRTPEVTCVVVDVSHEDPEVKFNWYVDGVEVHNAKTKPREEQYNNASRVVSVLTVLHQDWLNGKEYKCKVSNKALPAPIEKTISKAKGQPREPQVYTLPPSRDELTKNQVSLTCLVKGFYPSDIAVEWESNGQPENNYKTTPPVLDSDGSFFLYSKLTVDKSRWQQGNVFSCSVMHEALHNHYTQKSLSLSPGGGGSGSAHPIPDSSPLLQFGGQVRQRYLYTDDACQTEAHLEIREDGTVGGAADQSPESLLQLKALKPGVIQILGVKTSRFLCQRPDGALYGSLHFDPEACSFRELLLEDGYNVYQSEAHGLPLHLPGCKSPHRDPAPRGPARFLPLPGLPPAPPEPPGILAPQPPDVGSSDPLSMVYPSQGRSPSYAS

SEQ ID NO: 2915 - protein, 471 aa, Artificial Sequence
  Fusion Protein
HGEGTFTSDKSKQLAERLVRLFIEWLIAGGHSSGKPPPKGGGGGGGSGGGGSGGGGSADKTHTCPPCPAPELLGGPSVFLFPPKPKDTLMISRTPEVTCVVVDVSHEDPEVKFNWYVDGVEVHNAKTKPREEQYNNASRVVSVLTVLHQDWLNGKEYKCKVSNKALPAPIEKTISKAKGQPREPQVYTLPPSRDELTKNQVSLTCLVKGFYPSDIAVEWESNGQPENNYKTTPPVLDSDGSFFLYSKLTVDKSRWQQGNVFSCSVMHEALHNHYTQKSLSLSPGGGGSGSAHPIPDSSPLLQFGGQVRQRYLYTDDACQTEAHLEIREDGTVGGAADQSPESLLQLKALKPGVIQILGVKTSRFLCQRPDGALYGSLHFDPEACSFRELLLEDGYNVYQSEAHGLPLHLCGNKSPHRDPAPRGPARFLPLPGLPPAPPEPPGILAPQPPDVGSSDPLSMVGSQGRSPSYAS

SEQ ID NO: 2916 - protein, 472 aa, Artificial Sequence
  Fusion Protein
HGEGTFTSDKSKQLAERLVRLFIEWLIAGGHSSGKPPPKGGGGGGGSGGGGSGGGGSADKTHTCPPCPAPELLGGPSVFLFPPKPKDTLMISRTPEVTCVVVDVSHEDPEVKFNWYVDGVEVHNAKTKPREEQYNNASRVVSVLTVLHQDWLNGKEYKCKVSNKALPAPIEKTISKAKGQPREPQVYTLPPSRDELTKNQVSLTCLVKGFYPSDIAVEWESNGQPENNYKTTPPVLDSDGSFFLYSKLTVDKSRWQQGNVFSCSVMHEALHNHYTQKSLSLSPGGGGSGSAHPIPDSSPLLQFGGQVRQRYLYTDDACQTEAHLEIREDGTVGGAADQSPESLLQLKALKPGVIQILGVKTSRFLCQRPDGALYGSLHFDPEACSFRELLLEDGYNVYQSEAHGLPLHLCGNKSPHRDPAPRGPARFLPLPGLPPAPPEPPGILAPQPPDVGSSDPLSMVYPSQGRSPSYAS

SEQ ID NO: 2917 - protein, 474 aa, Artificial Sequence
  Fusion Protein
HGEGTFTSDKSKQLAERLVRLFIEWLIAGGHSSGKPPPKGGGGGGGSGGGGSGGGGSAESKYGPPCPPCPAPEFEGGPSVFLFPPKPKDTLMISRTPEVTCVVVDVSQEDPEVQFNWYVDGVEVHNAKTKPREEQFNSTYRVVSVLTVLHQDWLNGKEYKCKVSNKGLPSSIEKTISKAKGQPREPQVYTLPPSQEEMTKNQVSLTCLVKGFYPSDIAVEWESNGQPENNYKTTPPVLDSDGSFFLYSRLTVDKSRWQEGNVFSCSVMHEALHNHYTQKSLSLSLGGGGSGSAHPIPDSSPLLQFGGQVRQRYLYTDDACQTEAHLEIREDGTVGGAADQSPESLLQLKALKPGVIQILGVKTSRFLCQRPDGALYGSLHFDPEACSFRELLLEDGYNVYQSEAHGLPLHLPGCKSPHRDPAPRGPARFLPLPGLPPAPPEPPGILAPQPPDVGSSDPLSMVYPSQGRSPSYAS

SEQ ID NO: 2918 - protein, 473 aa, Artificial Sequence
  Fusion Protein
HGEGTFTSDKSKQLAERLVRLFIEWLIAGGHSSGKPPPKGGGGGGGSGGGGSGGGGSAESKYGPPCPPCPAPEFEGGPSVFLFPPKPKDTLMISRTPEVTCVVVDVSQEDPEVQFNWYVDGVEVHNAKTKPREEQFNSTYRVVSVLTVLHQDWLNGKEYKCKVSNKGLPSSIEKTISKAKGQPREPQVYTLPPSQEEMTKNQVSLTCLVKGFYPSDIAVEWESNGQPENNYKTTPPVLDSDGSFFLYSRLTVDKSRWQEGNVFSCSVMHEALHNHYTQKSLSLSLGGGGSGSAHPIPDSSPLLQFGGQVRQRYLYTDDACQTEAHLEIREDGTVGGAADQSPESLLQLKALKPGVIQILGVKTSRFLCQRPDGALYGSLHFDPEACSFRELLLEDGYNVYQSEAHGLPLHLCGNKSPHRDPAPRGPARFLPLPGLPPAPPEPPGILAPQPPDVGSSDPLSMVGSQGRSPSYAS

SEQ ID NO: 2919 - protein, 474 aa, Artificial Sequence
  Fusion Protein
HGEGTFTSDKSKQLAERLVRLFIEWLIAGGHSSGKPPPKGGGGGGGSGGGGSGGGGSAESKYGPPCPPCPAPEFEGGPSVFLFPPKPKDTLMISRTPEVTCVVVDVSQEDPEVQFNWYVDGVEVHNAKTKPREEQFNSTYRVVSVLTVLHQDWLNGKEYKCKVSNKGLPSSIEKTISKAKGQPREPQVYTLPPSQEEMTKNQVSLTCLVKGFYPSDIAVEWESNGQPENNYKTTPPVLDSDGSFFLYSRLTVDKSRWQEGNVFSCSVMHEALHNHYTQKSLSLSLGGGGSGSAHPIPDSSPLLQFGGQVRQRYLYTDDACQTEAHLEIREDGTVGGAADQSPESLLQLKALKPGVIQILGVKTSRFLCQRPDGALYGSLHFDPEACSFRELLLEDGYNVYQSEAHGLPLHLCGNKSPHRDPAPRGPARFLPLPGLPPAPPEPPGILAPQPPDVGSSDPLSMVYPSQGRSPSYAS

SEQ ID NO: 2920 - protein, 471 aa, Artificial Sequence
  Fusion Protein
HGEGTFTSDKSKQLAERLVREFIEWLIAGGHSSGKPPPKGGGGGGGSGGGGSGGGGSADKTHTCPPCPAPEAAGGPSVFLFPPKPKDTLMISRTPEVTCVVVDVSHEDPEVKFNWYVDGVEVHNAKTKPREEQYNSTYRVVSVLTVLHQDWLNGKEYKCKVSNKALPAPIEKTISKAKGQPREPQVYTLPPSRDELTKNQVSLTCLVKGFYPSDIAVEWESNGQPENNYKTTPPVLDSDGSFFLYSKLTVDKSRWQQGNVFSCSVMHEALHNHYTQKSLSLSPGGGGSGSAHPIPDSSPLLQFGGQVRQRYLYTDDACQTEAHLEIREDGTVGGAADQSPESLLQLKALKPGVIQILGVKTSRFLCQRPDGALYGSLHFDPEACSFRELLLEDGYNVYQSEAHGLPLHLPGCKSPHRDPAPRGPARFLPLPGLPPAPPEPPGILAPQPPDVGSSDPLSMVGSQGRSPSYAS

SEQ ID NO: 2921 - protein, 472 aa, Artificial Sequence
  Fusion Protein
HGEGTFTSDKSKQLAERLVREFIEWLIAGGHSSGKPPPKGGGGGGGSGGGGSGGGGSADKTHTCPPCPAPEAAGGPSVFLFPPKPKDTLMISRTPEVTCVVVDVSHEDPEVKFNWYVDGVEVHNAKTKPREEQYNSTYRVVSVLTVLHQDWLNGKEYKCKVSNKALPAPIEKTISKAKGQPREPQVYTLPPSRDELTKNQVSLTCLVKGFYPSDIAVEWESNGQPENNYKTTPPVLDSDGSFFLYSKLTVDKSRWQQGNVFSCSVMHEALHNHYTQKSLSLSPGGGGSGSAHPIPDSSPLLQFGGQVRQRYLYTDDACQTEAHLEIREDGTVGGAADQSPESLLQLKALKPGVIQILGVKTSRFLCQRPDGALYGSLHFDPEACSFRELLLEDGYNVYQSEAHGLPLHLPGCKSPHRDPAPRGPARFLPLPGLPPAPPEPPGILAPQPPDVGSSDPLSMVYPSQGRSPSYAS

SEQ ID NO: 2922 - protein, 471 aa, Artificial Sequence
  Fusion Protein
HGEGTFTSDKSKQLAERLVREFIEWLIAGGHSSGKPPPKGGGGGGGSGGGGSGGGGSADKTHTCPPCPAPEAAGGPSVFLFPPKPKDTLMISRTPEVTCVVVDVSHEDPEVKFNWYVDGVEVHNAKTKPREEQYNSTYRVVSVLTVLHQDWLNGKEYKCKVSNKALPAPIEKTISKAKGQPREPQVYTLPPSRDELTKNQVSLTCLVKGFYPSDIAVEWESNGQPENNYKTTPPVLDSDGSFFLYSKLTVDKSRWQQGNVFSCSVMHEALHNHYTQKSLSLSPGGGGSGSAHPIPDSSPLLQFGGQVRQRYLYTDDACQTEAHLEIREDGTVGGAADQSPESLLQLKALKPGVIQILGVKTSRFLCQRPDGALYGSLHFDPEACSFRELLLEDGYNVYQSEAHGLPLHLCGNKSPHRDPAPRGPARFLPLPGLPPAPPEPPGILAPQPPDVGSSDPLSMVGSQGRSPSYAS

SEQ ID NO: 2923 - protein, 472 aa, Artificial Sequence
  Fusion Protein
HGEGTFTSDKSKQLAERLVREFIEWLIAGGHSSGKPPPKGGGGGGGSGGGGSGGGGSADKTHTCPPCPAPEAAGGPSVFLFPPKPKDTLMISRTPEVTCVVVDVSHEDPEVKFNWYVDGVEVHNAKTKPREEQYNSTYRVVSVLTVLHQDWLNGKEYKCKVSNKALPAPIEKTISKAKGQPREPQVYTLPPSRDELTKNQVSLTCLVKGFYPSDIAVEWESNGQPENNYKTTPPVLDSDGSFFLYSKLTVDKSRWQQGNVFSCSVMHEALHNHYTQKSLSLSPGGGGSGSAHPIPDSSPLLQFGGQVRQRYLYTDDACQTEAHLEIREDGTVGGAADQSPESLLQLKALKPGVIQILGVKTSRFLCQRPDGALYGSLHFDPEACSFRELLLEDGYNVYQSEAHGLPLHLCGNKSPHRDPAPRGPARFLPLPGLPPAPPEPPGILAPQPPDVGSSDPLSMVYPSQGRSPSYAS

SEQ ID NO: 2924 - protein, 471 aa, Artificial Sequence
  Fusion Protein
HGEGTFTSDKSKQLAERLVREFIEWLIAGGHSSGKPPPKGGGGGGGSGGGGSGGGGSADKTHTCPPCPAPELLGGPSVFLFPPKPKDTLMISRTPEVTCVVVDVSHEDPEVKFNWYVDGVEVHNAKTKPREEQYNNASRVVSVLTVLHQDWLNGKEYKCKVSNKALPAPIEKTISKAKGQPREPQVYTLPPSRDELTKNQVSLTCLVKGFYPSDIAVEWESNGQPENNYKTTPPVLDSDGSFFLYSKLTVDKSRWQQGNVFSCSVMHEALHNHYTQKSLSLSPGGGGSGSAHPIPDSSPLLQFGGQVRQRYLYTDDACQTEAHLEIREDGTVGGAADQSPESLLQLKALKPGVIQILGVKTSRFLCQRPDGALYGSLHFDPEACSFRELLLEDGYNVYQSEAHGLPLHLPGCKSPHRDPAPRGPARFLPLPGLPPAPPEPPGILAPQPPDVGSSDPLSMVGSQGRSPSYAS

SEQ ID NO: 2925 - protein, 472 aa, Artificial Sequence
  Fusion Protein
HGEGTFTSDKSKQLAERLVREFIEWLIAGGHSSGKPPPKGGGGGGGSGGGGSGGGGSADKTHTCPPCPAPELLGGPSVFLFPPKPKDTLMISRTPEVTCVVVDVSHEDPEVKFNWYVDGVEVHNAKTKPREEQYNNASRVVSVLTVLHQDWLNGKEYKCKVSNKALPAPIEKTISKAKGQPREPQVYTLPPSRDELTKNQVSLTCLVKGFYPSDIAVEWESNGQPENNYKTTPPVLDSDGSFFLYSKLTVDKSRWQQGNVFSCSVMHEALHNHYTQKSLSLSPGGGGSGSAHPIPDSSPLLQFGGQVRQRYLYTDDACQTEAHLEIREDGTVGGAADQSPESLLQLKALKPGVIQILGVKTSRFLCQRPDGALYGSLHFDPEACSFRELLLEDGYNVYQSEAHGLPLHLPGCKSPHRDPAPRGPARFLPLPGLPPAPPEPPGILAPQPPDVGSSDPLSMVYPSQGRSPSYAS

SEQ ID NO: 2926 - protein, 471 aa, Artificial Sequence
  Fusion Protein
HGEGTFTSDKSKQLAERLVREFIEWLIAGGHSSGKPPPKGGGGGGGSGGGGSGGGGSADKTHTCPPCPAPELLGGPSVFLFPPKPKDTLMISRTPEVTCVVVDVSHEDPEVKFNWYVDGVEVHNAKTKPREEQYNNASRVVSVLTVLHQDWLNGKEYKCKVSNKALPAPIEKTISKAKGQPREPQVYTLPPSRDELTKNQVSLTCLVKGFYPSDIAVEWESNGQPENNYKTTPPVLDSDGSFFLYSKLTVDKSRWQQGNVFSCSVMHEALHNHYTQKSLSLSPGGGGSGSAHPIPDSSPLLQFGGQVRQRYLYTDDACQTEAHLEIREDGTVGGAADQSPESLLQLKALKPGVIQILGVKTSRFLCQRPDGALYGSLHFDPEACSFRELLLEDGYNVYQSEAHGLPLHLCGNKSPHRDPAPRGPARFLPLPGLPPAPPEPPGILAPQPPDVGSSDPLSMVGSQGRSPSYAS

SEQ ID NO: 2927 - protein, 472 aa, Artificial Sequence
  Fusion Protein
HGEGTFTSDKSKQLAERLVREFIEWLIAGGHSSGKPPPKGGGGGGGSGGGGSGGGGSADKTHTCPPCPAPELLGGPSVFLFPPKPKDTLMISRTPEVTCVVVDVSHEDPEVKFNWYVDGVEVHNAKTKPREEQYNNASRVVSVLTVLHQDWLNGKEYKCKVSNKALPAPIEKTISKAKGQPREPQVYTLPPSRDELTKNQVSLTCLVKGFYPSDIAVEWESNGQPENNYKTTPPVLDSDGSFFLYSKLTVDKSRWQQGNVFSCSVMHEALHNHYTQKSLSLSPGGGGSGSAHPIPDSSPLLQFGGQVRQRYLYTDDACQTEAHLEIREDGTVGGAADQSPESLLQLKALKPGVIQILGVKTSRFLCQRPDGALYGSLHFDPEACSFRELLLEDGYNVYQSEAHGLPLHLCGNKSPHRDPAPRGPARFLPLPGLPPAPPEPPGILAPQPPDVGSSDPLSMVYPSQGRSPSYAS

SEQ ID NO: 2928 - protein, 474 aa, Artificial Sequence
  Fusion Protein
HGEGTFTSDKSKQLAERLVREFIEWLIAGGHSSGKPPPKGGGGGGGSGGGGSGGGGSAESKYGPPCPPCPAPEFEGGPSVFLFPPKPKDTLMISRTPEVTCVVVDVSQEDPEVQFNWYVDGVEVHNAKTKPREEQFNSTYRVVSVLTVLHQDWLNGKEYKCKVSNKGLPSSIEKTISKAKGQPREPQVYTLPPSQEEMTKNQVSLTCLVKGFYPSDIAVEWESNGQPENNYKTTPPVLDSDGSFFLYSRLTVDKSRWQEGNVFSCSVMHEALHNHYTQKSLSLSLGGGGSGSAHPIPDSSPLLQFGGQVRQRYLYTDDACQTEAHLEIREDGTVGGAADQSPESLLQLKALKPGVIQILGVKTSRFLCQRPDGALYGSLHFDPEACSFRELLLEDGYNVYQSEAHGLPLHLPGCKSPHRDPAPRGPARFLPLPGLPPAPPEPPGILAPQPPDVGSSDPLSMVYPSQGRSPSYAS

SEQ ID NO: 2929 - protein, 473 aa, Artificial Sequence
  Fusion Protein
HGEGTFTSDKSKQLAERLVREFIEWLIAGGHSSGKPPPKGGGGGGGSGGGGSGGGGSAESKYGPPCPPCPAPEFEGGPSVFLFPPKPKDTLMISRTPEVTCVVVDVSQEDPEVQFNWYVDGVEVHNAKTKPREEQFNSTYRVVSVLTVLHQDWLNGKEYKCKVSNKGLPSSIEKTISKAKGQPREPQVYTLPPSQEEMTKNQVSLTCLVKGFYPSDIAVEWESNGQPENNYKTTPPVLDSDGSFFLYSRLTVDKSRWQEGNVFSCSVMHEALHNHYTQKSLSLSLGGGGSGSAHPIPDSSPLLQFGGQVRQRYLYTDDACQTEAHLEIREDGTVGGAADQSPESLLQLKALKPGVIQILGVKTSRFLCQRPDGALYGSLHFDPEACSFRELLLEDGYNVYQSEAHGLPLHLCGNKSPHRDPAPRGPARFLPLPGLPPAPPEPPGILAPQPPDVGSSDPLSMVGSQGRSPSYAS

SEQ ID NO: 2930 - protein, 474 aa, Artificial Sequence
  Fusion Protein
HGEGTFTSDKSKQLAERLVREFIEWLIAGGHSSGKPPPKGGGGGGGSGGGGSGGGGSAESKYGPPCPPCPAPEFEGGPSVFLFPPKPKDTLMISRTPEVTCVVVDVSQEDPEVQFNWYVDGVEVHNAKTKPREEQFNSTYRVVSVLTVLHQDWLNGKEYKCKVSNKGLPSSIEKTISKAKGQPREPQVYTLPPSQEEMTKNQVSLTCLVKGFYPSDIAVEWESNGQPENNYKTTPPVLDSDGSFFLYSRLTVDKSRWQEGNVFSCSVMHEALHNHYTQKSLSLSLGGGGSGSAHPIPDSSPLLQFGGQVRQRYLYTDDACQTEAHLEIREDGTVGGAADQSPESLLQLKALKPGVIQILGVKTSRFLCQRPDGALYGSLHFDPEACSFRELLLEDGYNVYQSEAHGLPLHLCGNKSPHRDPAPRGPARFLPLPGLPPAPPEPPGILAPQPPDVGSSDPLSMVYPSQGRSPSYAS

SEQ ID NO: 2931 - protein, 471 aa, Artificial Sequence
  Fusion Protein
HGEGTFTSDKSKQLAERLVKLFIEWLIAGGHSSGKPPPKGGGGGGGSGGGGSGGGGSADKTHTCPPCPAPEAAGGPSVFLFPPKPKDTLMISRTPEVTCVVVDVSHEDPEVKFNWYVDGVEVHNAKTKPREEQYNSTYRVVSVLTVLHQDWLNGKEYKCKVSNKALPAPIEKTISKAKGQPREPQVYTLPPSRDELTKNQVSLTCLVKGFYPSDIAVEWESNGQPENNYKTTPPVLDSDGSFFLYSKLTVDKSRWQQGNVFSCSVMHEALHNHYTQKSLSLSPGGGGSGSAHPIPDSSPLLQFGGQVRQRYLYTDDACQTEAHLEIREDGTVGGAADQSPESLLQLKALKPGVIQILGVKTSRFLCQRPDGALYGSLHFDPEACSFRELLLEDGYNVYQSEAHGLPLHLPGCKSPHRDPAPRGPARFLPLPGLPPAPPEPPGILAPQPPDVGSSDPLSMVGSQGRSPSYAS

SEQ ID NO: 2932 - protein, 472 aa, Artificial Sequence
  Fusion Protein
HGEGTFTSDKSKQLAERLVKLFIEWLIAGGHSSGKPPPKGGGGGGGSGGGGSGGGGSADKTHTCPPCPAPEAAGGPSVFLFPPKPKDTLMISRTPEVTCVVVDVSHEDPEVKFNWYVDGVEVHNAKTKPREEQYNSTYRVVSVLTVLHQDWLNGKEYKCKVSNKALPAPIEKTISKAKGQPREPQVYTLPPSRDELTKNQVSLTCLVKGFYPSDIAVEWESNGQPENNYKTTPPVLDSDGSFFLYSKLTVDKSRWQQGNVFSCSVMHEALHNHYTQKSLSLSPGGGGSGSAHPIPDSSPLLQFGGQVRQRYLYTDDACQTEAHLEIREDGTVGGAADQSPESLLQLKALKPGVIQILGVKTSRFLCQRPDGALYGSLHFDPEACSFRELLLEDGYNVYQSEAHGLPLHLPGCKSPHRDPAPRGPARFLPLPGLPPAPPEPPGILAPQPPDVGSSDPLSMVYPSQGRSPSYAS

SEQ ID NO: 2933 - protein, 471 aa, Artificial Sequence
  Fusion Protein
HGEGTFTSDKSKQLAERLVKLFIEWLIAGGHSSGKPPPKGGGGGGGSGGGGSGGGGSADKTHTCPPCPAPEAAGGPSVFLFPPKPKDTLMISRTPEVTCVVVDVSHEDPEVKFNWYVDGVEVHNAKTKPREEQYNSTYRVVSVLTVLHQDWLNGKEYKCKVSNKALPAPIEKTISKAKGQPREPQVYTLPPSRDELTKNQVSLTCLVKGFYPSDIAVEWESNGQPENNYKTTPPVLDSDGSFFLYSKLTVDKSRWQQGNVFSCSVMHEALHNHYTQKSLSLSPGGGGSGSAHPIPDSSPLLQFGGQVRQRYLYTDDACQTEAHLEIREDGTVGGAADQSPESLLQLKALKPGVIQILGVKTSRFLCQRPDGALYGSLHFDPEACSFRELLLEDGYNVYQSEAHGLPLHLCGNKSPHRDPAPRGPARFLPLPGLPPAPPEPPGILAPQPPDVGSSDPLSMVGSQGRSPSYAS

SEQ ID NO: 2934 - protein, 472 aa, Artificial Sequence
  Fusion Protein
HGEGTFTSDKSKQLAERLVKLFIEWLIAGGHSSGKPPPKGGGGGGGSGGGGSGGGGSADKTHTCPPCPAPEAAGGPSVFLFPPKPKDTLMISRTPEVTCVVVDVSHEDPEVKFNWYVDGVEVHNAKTKPREEQYNSTYRVVSVLTVLHQDWLNGKEYKCKVSNKALPAPIEKTISKAKGQPREPQVYTLPPSRDELTKNQVSLTCLVKGFYPSDIAVEWESNGQPENNYKTTPPVLDSDGSFFLYSKLTVDKSRWQQGNVFSCSVMHEALHNHYTQKSLSLSPGGGGSGSAHPIPDSSPLLQFGGQVRQRYLYTDDACQTEAHLEIREDGTVGGAADQSPESLLQLKALKPGVIQILGVKTSRFLCQRPDGALYGSLHFDPEACSFRELLLEDGYNVYQSEAHGLPLHLCGNKSPHRDPAPRGPARFLPLPGLPPAPPEPPGILAPQPPDVGSSDPLSMVYPSQGRSPSYAS

SEQ ID NO: 2935 - protein, 471 aa, Artificial Sequence
  Fusion Protein
HGEGTFTSDKSKQLAERLVKLFIEWLIAGGHSSGKPPPKGGGGGGGSGGGGSGGGGSADKTHTCPPCPAPELLGGPSVFLFPPKPKDTLMISRTPEVTCVVVDVSHEDPEVKFNWYVDGVEVHNAKTKPREEQYNNASRVVSVLTVLHQDWLNGKEYKCKVSNKALPAPIEKTISKAKGQPREPQVYTLPPSRDELTKNQVSLTCLVKGFYPSDIAVEWESNGQPENNYKTTPPVLDSDGSFFLYSKLTVDKSRWQQGNVFSCSVMHEALHNHYTQKSLSLSPGGGGSGSAHPIPDSSPLLQFGGQVRQRYLYTDDACQTEAHLEIREDGTVGGAADQSPESLLQLKALKPGVIQILGVKTSRFLCQRPDGALYGSLHFDPEACSFRELLLEDGYNVYQSEAHGLPLHLPGCKSPHRDPAPRGPARFLPLPGLPPAPPEPPGILAPQPPDVGSSDPLSMVGSQGRSPSYAS

SEQ ID NO: 2936 - protein, 472 aa, Artificial Sequence
  Fusion Protein
HGEGTFTSDKSKQLAERLVKLFIEWLIAGGHSSGKPPPKGGGGGGGSGGGGSGGGGSADKTHTCPPCPAPELLGGPSVFLFPPKPKDTLMISRTPEVTCVVVDVSHEDPEVKFNWYVDGVEVHNAKTKPREEQYNNASRVVSVLTVLHQDWLNGKEYKCKVSNKALPAPIEKTISKAKGQPREPQVYTLPPSRDELTKNQVSLTCLVKGFYPSDIAVEWESNGQPENNYKTTPPVLDSDGSFFLYSKLTVDKSRWQQGNVFSCSVMHEALHNHYTQKSLSLSPGGGGSGSAHPIPDSSPLLQFGGQVRQRYLYTDDACQTEAHLEIREDGTVGGAADQSPESLLQLKALKPGVIQILGVKTSRFLCQRPDGALYGSLHFDPEACSFRELLLEDGYNVYQSEAHGLPLHLPGCKSPHRDPAPRGPARFLPLPGLPPAPPEPPGILAPQPPDVGSSDPLSMVYPSQGRSPSYAS

SEQ ID NO: 2937 - protein, 471 aa, Artificial Sequence
  Fusion Protein
HGEGTFTSDKSKQLAERLVKLFIEWLIAGGHSSGKPPPKGGGGGGGSGGGGSGGGGSADKTHTCPPCPAPELLGGPSVFLFPPKPKDTLMISRTPEVTCVVVDVSHEDPEVKFNWYVDGVEVHNAKTKPREEQYNNASRVVSVLTVLHQDWLNGKEYKCKVSNKALPAPIEKTISKAKGQPREPQVYTLPPSRDELTKNQVSLTCLVKGFYPSDIAVEWESNGQPENNYKTTPPVLDSDGSFFLYSKLTVDKSRWQQGNVFSCSVMHEALHNHYTQKSLSLSPGGGGSGSAHPIPDSSPLLQFGGQVRQRYLYTDDACQTEAHLEIREDGTVGGAADQSPESLLQLKALKPGVIQILGVKTSRFLCQRPDGALYGSLHFDPEACSFRELLLEDGYNVYQSEAHGLPLHLCGNKSPHRDPAPRGPARFLPLPGLPPAPPEPPGILAPQPPDVGSSDPLSMVGSQGRSPSYAS

SEQ ID NO: 2938 - protein, 472 aa, Artificial Sequence
  Fusion Protein
HGEGTFTSDKSKQLAERLVKLFIEWLIAGGHSSGKPPPKGGGGGGGSGGGGSGGGGSADKTHTCPPCPAPELLGGPSVFLFPPKPKDTLMISRTPEVTCVVVDVSHEDPEVKFNWYVDGVEVHNAKTKPREEQYNNASRVVSVLTVLHQDWLNGKEYKCKVSNKALPAPIEKTISKAKGQPREPQVYTLPPSRDELTKNQVSLTCLVKGFYPSDIAVEWESNGQPENNYKTTPPVLDSDGSFFLYSKLTVDKSRWQQGNVFSCSVMHEALHNHYTQKSLSLSPGGGGSGSAHPIPDSSPLLQFGGQVRQRYLYTDDACQTEAHLEIREDGTVGGAADQSPESLLQLKALKPGVIQILGVKTSRFLCQRPDGALYGSLHFDPEACSFRELLLEDGYNVYQSEAHGLPLHLCGNKSPHRDPAPRGPARFLPLPGLPPAPPEPPGILAPQPPDVGSSDPLSMVYPSQGRSPSYAS

SEQ ID NO: 2939 - protein, 474 aa, Artificial Sequence
  Fusion Protein
HGEGTFTSDKSKQLAERLVKLFIEWLIAGGHSSGKPPPKGGGGGGGSGGGGSGGGGSAESKYGPPCPPCPAPEFEGGPSVFLFPPKPKDTLMISRTPEVTCVVVDVSQEDPEVQFNWYVDGVEVHNAKTKPREEQFNSTYRVVSVLTVLHQDWLNGKEYKCKVSNKGLPSSIEKTISKAKGQPREPQVYTLPPSQEEMTKNQVSLTCLVKGFYPSDIAVEWESNGQPENNYKTTPPVLDSDGSFFLYSRLTVDKSRWQEGNVFSCSVMHEALHNHYTQKSLSLSLGGGGSGSAHPIPDSSPLLQFGGQVRQRYLYTDDACQTEAHLEIREDGTVGGAADQSPESLLQLKALKPGVIQILGVKTSRFLCQRPDGALYGSLHFDPEACSFRELLLEDGYNVYQSEAHGLPLHLPGCKSPHRDPAPRGPARFLPLPGLPPAPPEPPGILAPQPPDVGSSDPLSMVYPSQGRSPSYAS

SEQ ID NO: 2940 - protein, 473 aa, Artificial Sequence
  Fusion Protein
HGEGTFTSDKSKQLAERLVKLFIEWLIAGGHSSGKPPPKGGGGGGGSGGGGSGGGGSAESKYGPPCPPCPAPEFEGGPSVFLFPPKPKDTLMISRTPEVTCVVVDVSQEDPEVQFNWYVDGVEVHNAKTKPREEQFNSTYRVVSVLTVLHQDWLNGKEYKCKVSNKGLPSSIEKTISKAKGQPREPQVYTLPPSQEEMTKNQVSLTCLVKGFYPSDIAVEWESNGQPENNYKTTPPVLDSDGSFFLYSRLTVDKSRWQEGNVFSCSVMHEALHNHYTQKSLSLSLGGGGSGSAHPIPDSSPLLQFGGQVRQRYLYTDDACQTEAHLEIREDGTVGGAADQSPESLLQLKALKPGVIQILGVKTSRFLCQRPDGALYGSLHFDPEACSFRELLLEDGYNVYQSEAHGLPLHLCGNKSPHRDPAPRGPARFLPLPGLPPAPPEPPGILAPQPPDVGSSDPLSMVGSQGRSPSYAS

SEQ ID NO: 2941 - protein, 474 aa, Artificial Sequence
  Fusion Protein
HGEGTFTSDKSKQLAERLVKLFIEWLIAGGHSSGKPPPKGGGGGGGSGGGGSGGGGSAESKYGPPCPPCPAPEFEGGPSVFLFPPKPKDTLMISRTPEVTCVVVDVSQEDPEVQFNWYVDGVEVHNAKTKPREEQFNSTYRVVSVLTVLHQDWLNGKEYKCKVSNKGLPSSIEKTISKAKGQPREPQVYTLPPSQEEMTKNQVSLTCLVKGFYPSDIAVEWESNGQPENNYKTTPPVLDSDGSFFLYSRLTVDKSRWQEGNVFSCSVMHEALHNHYTQKSLSLSLGGGGSGSAHPIPDSSPLLQFGGQVRQRYLYTDDACQTEAHLEIREDGTVGGAADQSPESLLQLKALKPGVIQILGVKTSRFLCQRPDGALYGSLHFDPEACSFRELLLEDGYNVYQSEAHGLPLHLCGNKSPHRDPAPRGPARFLPLPGLPPAPPEPPGILAPQPPDVGSSDPLSMVYPSQGRSPSYAS

SEQ ID NO: 2942 - protein, 471 aa, Artificial Sequence
  Fusion Protein
HGEGTFTSDKSKQLAERLAREFIEWLIAGGHSSGKPPPKGGGGGGGSGGGGSGGGGSADKTHTCPPCPAPEAAGGPSVFLFPPKPKDTLMISRTPEVTCVVVDVSHEDPEVKFNWYVDGVEVHNAKTKPREEQYNSTYRVVSVLTVLHQDWLNGKEYKCKVSNKALPAPIEKTISKAKGQPREPQVYTLPPSRDELTKNQVSLTCLVKGFYPSDIAVEWESNGQPENNYKTTPPVLDSDGSFFLYSKLTVDKSRWQQGNVFSCSVMHEALHNHYTQKSLSLSPGGGGSGSAHPIPDSSPLLQFGGQVRQRYLYTDDACQTEAHLEIREDGTVGGAADQSPESLLQLKALKPGVIQILGVKTSRFLCQRPDGALYGSLHFDPEACSFRELLLEDGYNVYQSEAHGLPLHLPGCKSPHRDPAPRGPARFLPLPGLPPAPPEPPGILAPQPPDVGSSDPLSMVGSQGRSPSYAS

SEQ ID NO: 2943 - protein, 472 aa, Artificial Sequence
  Fusion Protein
HGEGTFTSDKSKQLAERLAREFIEWLIAGGHSSGKPPPKGGGGGGGSGGGGSGGGGSADKTHTCPPCPAPEAAGGPSVFLFPPKPKDTLMISRTPEVTCVVVDVSHEDPEVKFNWYVDGVEVHNAKTKPREEQYNSTYRVVSVLTVLHQDWLNGKEYKCKVSNKALPAPIEKTISKAKGQPREPQVYTLPPSRDELTKNQVSLTCLVKGFYPSDIAVEWESNGQPENNYKTTPPVLDSDGSFFLYSKLTVDKSRWQQGNVFSCSVMHEALHNHYTQKSLSLSPGGGGSGSAHPIPDSSPLLQFGGQVRQRYLYTDDACQTEAHLEIREDGTVGGAADQSPESLLQLKALKPGVIQILGVKTSRFLCQRPDGALYGSLHFDPEACSFRELLLEDGYNVYQSEAHGLPLHLPGCKSPHRDPAPRGPARFLPLPGLPPAPPEPPGILAPQPPDVGSSDPLSMVYPSQGRSPSYAS

SEQ ID NO: 2944 - protein, 471 aa, Artificial Sequence
  Fusion Protein
HGEGTFTSDKSKQLAERLAREFIEWLIAGGHSSGKPPPKGGGGGGGSGGGGSGGGGSADKTHTCPPCPAPEAAGGPSVFLFPPKPKDTLMISRTPEVTCVVVDVSHEDPEVKFNWYVDGVEVHNAKTKPREEQYNSTYRVVSVLTVLHQDWLNGKEYKCKVSNKALPAPIEKTISKAKGQPREPQVYTLPPSRDELTKNQVSLTCLVKGFYPSDIAVEWESNGQPENNYKTTPPVLDSDGSFFLYSKLTVDKSRWQQGNVFSCSVMHEALHNHYTQKSLSLSPGGGGSGSAHPIPDSSPLLQFGGQVRQRYLYTDDACQTEAHLEIREDGTVGGAADQSPESLLQLKALKPGVIQILGVKTSRFLCQRPDGALYGSLHFDPEACSFRELLLEDGYNVYQSEAHGLPLHLCGNKSPHRDPAPRGPARFLPLPGLPPAPPEPPGILAPQPPDVGSSDPLSMVGSQGRSPSYAS

SEQ ID NO: 2945 - protein, 472 aa, Artificial Sequence
  Fusion Protein
HGEGTFTSDKSKQLAERLAREFIEWLIAGGHSSGKPPPKGGGGGGGSGGGGSGGGGSADKTHTCPPCPAPEAAGGPSVFLFPPKPKDTLMISRTPEVTCVVVDVSHEDPEVKFNWYVDGVEVHNAKTKPREEQYNSTYRVVSVLTVLHQDWLNGKEYKCKVSNKALPAPIEKTISKAKGQPREPQVYTLPPSRDELTKNQVSLTCLVKGFYPSDIAVEWESNGQPENNYKTTPPVLDSDGSFFLYSKLTVDKSRWQQGNVFSCSVMHEALHNHYTQKSLSLSPGGGGSGSAHPIPDSSPLLQFGGQVRQRYLYTDDACQTEAHLEIREDGTVGGAADQSPESLLQLKALKPGVIQILGVKTSRFLCQRPDGALYGSLHFDPEACSFRELLLEDGYNVYQSEAHGLPLHLCGNKSPHRDPAPRGPARFLPLPGLPPAPPEPPGILAPQPPDVGSSDPLSMVYPSQGRSPSYAS

SEQ ID NO: 2946 - protein, 471 aa, Artificial Sequence
  Fusion Protein
HGEGTFTSDKSKQLAERLAREFIEWLIAGGHSSGKPPPKGGGGGGGSGGGGSGGGGSADKTHTCPPCPAPELLGGPSVFLFPPKPKDTLMISRTPEVTCVVVDVSHEDPEVKFNWYVDGVEVHNAKTKPREEQYNNASRVVSVLTVLHQDWLNGKEYKCKVSNKALPAPIEKTISKAKGQPREPQVYTLPPSRDELTKNQVSLTCLVKGFYPSDIAVEWESNGQPENNYKTTPPVLDSDGSFFLYSKLTVDKSRWQQGNVFSCSVMHEALHNHYTQKSLSLSPGGGGSGSAHPIPDSSPLLQFGGQVRQRYLYTDDACQTEAHLEIREDGTVGGAADQSPESLLQLKALKPGVIQILGVKTSRFLCQRPDGALYGSLHFDPEACSFRELLLEDGYNVYQSEAHGLPLHLPGCKSPHRDPAPRGPARFLPLPGLPPAPPEPPGILAPQPPDVGSSDPLSMVGSQGRSPSYAS

SEQ ID NO: 2947 - protein, 472 aa, Artificial Sequence
  Fusion Protein
HGEGTFTSDKSKQLAERLAREFIEWLIAGGHSSGKPPPKGGGGGGGSGGGGSGGGGSADKTHTCPPCPAPELLGGPSVFLFPPKPKDTLMISRTPEVTCVVVDVSHEDPEVKFNWYVDGVEVHNAKTKPREEQYNNASRVVSVLTVLHQDWLNGKEYKCKVSNKALPAPIEKTISKAKGQPREPQVYTLPPSRDELTKNQVSLTCLVKGFYPSDIAVEWESNGQPENNYKTTPPVLDSDGSFFLYSKLTVDKSRWQQGNVFSCSVMHEALHNHYTQKSLSLSPGGGGSGSAHPIPDSSPLLQFGGQVRQRYLYTDDACQTEAHLEIREDGTVGGAADQSPESLLQLKALKPGVIQILGVKTSRFLCQRPDGALYGSLHFDPEACSFRELLLEDGYNVYQSEAHGLPLHLPGCKSPHRDPAPRGPARFLPLPGLPPAPPEPPGILAPQPPDVGSSDPLSMVYPSQGRSPSYAS

SEQ ID NO: 2948 - protein, 471 aa, Artificial Sequence
  Fusion Protein
HGEGTFTSDKSKQLAERLAREFIEWLIAGGHSSGKPPPKGGGGGGGSGGGGSGGGGSADKTHTCPPCPAPELLGGPSVFLFPPKPKDTLMISRTPEVTCVVVDVSHEDPEVKFNWYVDGVEVHNAKTKPREEQYNNASRVVSVLTVLHQDWLNGKEYKCKVSNKALPAPIEKTISKAKGQPREPQVYTLPPSRDELTKNQVSLTCLVKGFYPSDIAVEWESNGQPENNYKTTPPVLDSDGSFFLYSKLTVDKSRWQQGNVFSCSVMHEALHNHYTQKSLSLSPGGGGSGSAHPIPDSSPLLQFGGQVRQRYLYTDDACQTEAHLEIREDGTVGGAADQSPESLLQLKALKPGVIQILGVKTSRFLCQRPDGALYGSLHFDPEACSFRELLLEDGYNVYQSEAHGLPLHLCGNKSPHRDPAPRGPARFLPLPGLPPAPPEPPGILAPQPPDVGSSDPLSMVGSQGRSPSYAS

SEQ ID NO: 2949 - protein, 472 aa, Artificial Sequence
  Fusion Protein
HGEGTFTSDKSKQLAERLAREFIEWLIAGGHSSGKPPPKGGGGGGGSGGGGSGGGGSADKTHTCPPCPAPELLGGPSVFLFPPKPKDTLMISRTPEVTCVVVDVSHEDPEVKFNWYVDGVEVHNAKTKPREEQYNNASRVVSVLTVLHQDWLNGKEYKCKVSNKALPAPIEKTISKAKGQPREPQVYTLPPSRDELTKNQVSLTCLVKGFYPSDIAVEWESNGQPENNYKTTPPVLDSDGSFFLYSKLTVDKSRWQQGNVFSCSVMHEALHNHYTQKSLSLSPGGGGSGSAHPIPDSSPLLQFGGQVRQRYLYTDDACQTEAHLEIREDGTVGGAADQSPESLLQLKALKPGVIQILGVKTSRFLCQRPDGALYGSLHFDPEACSFRELLLEDGYNVYQSEAHGLPLHLCGNKSPHRDPAPRGPARFLPLPGLPPAPPEPPGILAPQPPDVGSSDPLSMVYPSQGRSPSYAS

SEQ ID NO: 2950 - protein, 474 aa, Artificial Sequence
  Fusion Protein
HGEGTFTSDKSKQLAERLAREFIEWLIAGGHSSGKPPPKGGGGGGGSGGGGSGGGGSAESKYGPPCPPCPAPEFEGGPSVFLFPPKPKDTLMISRTPEVTCVVVDVSQEDPEVQFNWYVDGVEVHNAKTKPREEQFNSTYRVVSVLTVLHQDWLNGKEYKCKVSNKGLPSSIEKTISKAKGQPREPQVYTLPPSQEEMTKNQVSLTCLVKGFYPSDIAVEWESNGQPENNYKTTPPVLDSDGSFFLYSRLTVDKSRWQEGNVFSCSVMHEALHNHYTQKSLSLSLGGGGSGSAHPIPDSSPLLQFGGQVRQRYLYTDDACQTEAHLEIREDGTVGGAADQSPESLLQLKALKPGVIQILGVKTSRFLCQRPDGALYGSLHFDPEACSFRELLLEDGYNVYQSEAHGLPLHLPGCKSPHRDPAPRGPARFLPLPGLPPAPPEPPGILAPQPPDVGSSDPLSMVYPSQGRSPSYAS

SEQ ID NO: 2951 - protein, 473 aa, Artificial Sequence
  Fusion Protein
HGEGTFTSDKSKQLAERLAREFIEWLIAGGHSSGKPPPKGGGGGGGSGGGGSGGGGSAESKYGPPCPPCPAPEFEGGPSVFLFPPKPKDTLMISRTPEVTCVVVDVSQEDPEVQFNWYVDGVEVHNAKTKPREEQFNSTYRVVSVLTVLHQDWLNGKEYKCKVSNKGLPSSIEKTISKAKGQPREPQVYTLPPSQEEMTKNQVSLTCLVKGFYPSDIAVEWESNGQPENNYKTTPPVLDSDGSFFLYSRLTVDKSRWQEGNVFSCSVMHEALHNHYTQKSLSLSLGGGGSGSAHPIPDSSPLLQFGGQVRQRYLYTDDACQTEAHLEIREDGTVGGAADQSPESLLQLKALKPGVIQILGVKTSRFLCQRPDGALYGSLHFDPEACSFRELLLEDGYNVYQSEAHGLPLHLCGNKSPHRDPAPRGPARFLPLPGLPPAPPEPPGILAPQPPDVGSSDPLSMVGSQGRSPSYAS

SEQ ID NO: 2952 - protein, 474 aa, Artificial Sequence
  Fusion Protein
HGEGTFTSDKSKQLAERLAREFIEWLIAGGHSSGKPPPKGGGGGGGSGGGGSGGGGSAESKYGPPCPPCPAPEFEGGPSVFLFPPKPKDTLMISRTPEVTCVVVDVSQEDPEVQFNWYVDGVEVHNAKTKPREEQFNSTYRVVSVLTVLHQDWLNGKEYKCKVSNKGLPSSIEKTISKAKGQPREPQVYTLPPSQEEMTKNQVSLTCLVKGFYPSDIAVEWESNGQPENNYKTTPPVLDSDGSFFLYSRLTVDKSRWQEGNVFSCSVMHEALHNHYTQKSLSLSLGGGGSGSAHPIPDSSPLLQFGGQVRQRYLYTDDACQTEAHLEIREDGTVGGAADQSPESLLQLKALKPGVIQILGVKTSRFLCQRPDGALYGSLHFDPEACSFRELLLEDGYNVYQSEAHGLPLHLCGNKSPHRDPAPRGPARFLPLPGLPPAPPEPPGILAPQPPDVGSSDPLSMVYPSQGRSPSYAS

SEQ ID NO: 2953 - protein, 471 aa, Artificial Sequence
  Fusion Protein
HGEGTFTSDKSKQLAERLAKLFIEWLIAGGHSSGKPPPKGGGGGGGSGGGGSGGGGSADKTHTCPPCPAPEAAGGPSVFLFPPKPKDTLMISRTPEVTCVVVDVSHEDPEVKFNWYVDGVEVHNAKTKPREEQYNSTYRVVSVLTVLHQDWLNGKEYKCKVSNKALPAPIEKTISKAKGQPREPQVYTLPPSRDELTKNQVSLTCLVKGFYPSDIAVEWESNGQPENNYKTTPPVLDSDGSFFLYSKLTVDKSRWQQGNVFSCSVMHEALHNHYTQKSLSLSPGGGGSGSAHPIPDSSPLLQFGGQVRQRYLYTDDACQTEAHLEIREDGTVGGAADQSPESLLQLKALKPGVIQILGVKTSRFLCQRPDGALYGSLHFDPEACSFRELLLEDGYNVYQSEAHGLPLHLPGCKSPHRDPAPRGPARFLPLPGLPPAPPEPPGILAPQPPDVGSSDPLSMVGSQGRSPSYAS

SEQ ID NO: 2954 - protein, 472 aa, Artificial Sequence
  Fusion Protein
HGEGTFTSDKSKQLAERLAKLFIEWLIAGGHSSGKPPPKGGGGGGGSGGGGSGGGGSADKTHTCPPCPAPEAAGGPSVFLFPPKPKDTLMISRTPEVTCVVVDVSHEDPEVKFNWYVDGVEVHNAKTKPREEQYNSTYRVVSVLTVLHQDWLNGKEYKCKVSNKALPAPIEKTISKAKGQPREPQVYTLPPSRDELTKNQVSLTCLVKGFYPSDIAVEWESNGQPENNYKTTPPVLDSDGSFFLYSKLTVDKSRWQQGNVFSCSVMHEALHNHYTQKSLSLSPGGGGSGSAHPIPDSSPLLQFGGQVRQRYLYTDDACQTEAHLEIREDGTVGGAADQSPESLLQLKALKPGVIQILGVKTSRFLCQRPDGALYGSLHFDPEACSFRELLLEDGYNVYQSEAHGLPLHLPGCKSPHRDPAPRGPARFLPLPGLPPAPPEPPGILAPQPPDVGSSDPLSMVYPSQGRSPSYAS

SEQ ID NO: 2955 - protein, 471 aa, Artificial Sequence
  Fusion Protein
HGEGTFTSDKSKQLAERLAKLFIEWLIAGGHSSGKPPPKGGGGGGGSGGGGSGGGGSADKTHTCPPCPAPEAAGGPSVFLFPPKPKDTLMISRTPEVTCVVVDVSHEDPEVKFNWYVDGVEVHNAKTKPREEQYNSTYRVVSVLTVLHQDWLNGKEYKCKVSNKALPAPIEKTISKAKGQPREPQVYTLPPSRDELTKNQVSLTCLVKGFYPSDIAVEWESNGQPENNYKTTPPVLDSDGSFFLYSKLTVDKSRWQQGNVFSCSVMHEALHNHYTQKSLSLSPGGGGSGSAHPIPDSSPLLQFGGQVRQRYLYTDDACQTEAHLEIREDGTVGGAADQSPESLLQLKALKPGVIQILGVKTSRFLCQRPDGALYGSLHFDPEACSFRELLLEDGYNVYQSEAHGLPLHLCGNKSPHRDPAPRGPARFLPLPGLPPAPPEPPGILAPQPPDVGSSDPLSMVGSQGRSPSYAS

SEQ ID NO: 2956 - protein, 472 aa, Artificial Sequence
  Fusion Protein
HGEGTFTSDKSKQLAERLAKLFIEWLIAGGHSSGKPPPKGGGGGGGSGGGGSGGGGSADKTHTCPPCPAPEAAGGPSVFLFPPKPKDTLMISRTPEVTCVVVDVSHEDPEVKFNWYVDGVEVHNAKTKPREEQYNSTYRVVSVLTVLHQDWLNGKEYKCKVSNKALPAPIEKTISKAKGQPREPQVYTLPPSRDELTKNQVSLTCLVKGFYPSDIAVEWESNGQPENNYKTTPPVLDSDGSFFLYSKLTVDKSRWQQGNVFSCSVMHEALHNHYTQKSLSLSPGGGGSGSAHPIPDSSPLLQFGGQVRQRYLYTDDACQTEAHLEIREDGTVGGAADQSPESLLQLKALKPGVIQILGVKTSRFLCQRPDGALYGSLHFDPEACSFRELLLEDGYNVYQSEAHGLPLHLCGNKSPHRDPAPRGPARFLPLPGLPPAPPEPPGILAPQPPDVGSSDPLSMVYPSQGRSPSYAS

SEQ ID NO: 2957 - protein, 471 aa, Artificial Sequence
  Fusion Protein
HGEGTFTSDKSKQLAERLAKLFIEWLIAGGHSSGKPPPKGGGGGGGSGGGGSGGGGSADKTHTCPPCPAPELLGGPSVFLFPPKPKDTLMISRTPEVTCVVVDVSHEDPEVKFNWYVDGVEVHNAKTKPREEQYNNASRVVSVLTVLHQDWLNGKEYKCKVSNKALPAPIEKTISKAKGQPREPQVYTLPPSRDELTKNQVSLTCLVKGFYPSDIAVEWESNGQPENNYKTTPPVLDSDGSFFLYSKLTVDKSRWQQGNVFSCSVMHEALHNHYTQKSLSLSPGGGGSGSAHPIPDSSPLLQFGGQVRQRYLYTDDACQTEAHLEIREDGTVGGAADQSPESLLQLKALKPGVIQILGVKTSRFLCQRPDGALYGSLHFDPEACSFRELLLEDGYNVYQSEAHGLPLHLPGCKSPHRDPAPRGPARFLPLPGLPPAPPEPPGILAPQPPDVGSSDPLSMVGSQGRSPSYAS

SEQ ID NO: 2958 - protein, 472 aa, Artificial Sequence
  Fusion Protein
HGEGTFTSDKSKQLAERLAKLFIEWLIAGGHSSGKPPPKGGGGGGGSGGGGSGGGGSADKTHTCPPCPAPELLGGPSVFLFPPKPKDTLMISRTPEVTCVVVDVSHEDPEVKFNWYVDGVEVHNAKTKPREEQYNNASRVVSVLTVLHQDWLNGKEYKCKVSNKALPAPIEKTISKAKGQPREPQVYTLPPSRDELTKNQVSLTCLVKGFYPSDIAVEWESNGQPENNYKTTPPVLDSDGSFFLYSKLTVDKSRWQQGNVFSCSVMHEALHNHYTQKSLSLSPGGGGSGSAHPIPDSSPLLQFGGQVRQRYLYTDDACQTEAHLEIREDGTVGGAADQSPESLLQLKALKPGVIQILGVKTSRFLCQRPDGALYGSLHFDPEACSFRELLLEDGYNVYQSEAHGLPLHLPGCKSPHRDPAPRGPARFLPLPGLPPAPPEPPGILAPQPPDVGSSDPLSMVYPSQGRSPSYAS

SEQ ID NO: 2959 - protein, 471 aa, Artificial Sequence
  Fusion Protein
HGEGTFTSDKSKQLAERLAKLFIEWLIAGGHSSGKPPPKGGGGGGGSGGGGSGGGGSADKTHTCPPCPAPELLGGPSVFLFPPKPKDTLMISRTPEVTCVVVDVSHEDPEVKFNWYVDGVEVHNAKTKPREEQYNNASRVVSVLTVLHQDWLNGKEYKCKVSNKALPAPIEKTISKAKGQPREPQVYTLPPSRDELTKNQVSLTCLVKGFYPSDIAVEWESNGQPENNYKTTPPVLDSDGSFFLYSKLTVDKSRWQQGNVFSCSVMHEALHNHYTQKSLSLSPGGGGSGSAHPIPDSSPLLQFGGQVRQRYLYTDDACQTEAHLEIREDGTVGGAADQSPESLLQLKALKPGVIQILGVKTSRFLCQRPDGALYGSLHFDPEACSFRELLLEDGYNVYQSEAHGLPLHLCGNKSPHRDPAPRGPARFLPLPGLPPAPPEPPGILAPQPPDVGSSDPLSMVGSQGRSPSYAS

SEQ ID NO: 2960 - protein, 472 aa, Artificial Sequence
  Fusion Protein
HGEGTFTSDKSKQLAERLAKLFIEWLIAGGHSSGKPPPKGGGGGGGSGGGGSGGGGSADKTHTCPPCPAPELLGGPSVFLFPPKPKDTLMISRTPEVTCVVVDVSHEDPEVKFNWYVDGVEVHNAKTKPREEQYNNASRVVSVLTVLHQDWLNGKEYKCKVSNKALPAPIEKTISKAKGQPREPQVYTLPPSRDELTKNQVSLTCLVKGFYPSDIAVEWESNGQPENNYKTTPPVLDSDGSFFLYSKLTVDKSRWQQGNVFSCSVMHEALHNHYTQKSLSLSPGGGGSGSAHPIPDSSPLLQFGGQVRQRYLYTDDACQTEAHLEIREDGTVGGAADQSPESLLQLKALKPGVIQILGVKTSRFLCQRPDGALYGSLHFDPEACSFRELLLEDGYNVYQSEAHGLPLHLCGNKSPHRDPAPRGPARFLPLPGLPPAPPEPPGILAPQPPDVGSSDPLSMVYPSQGRSPSYAS

SEQ ID NO: 2961 - protein, 474 aa, Artificial Sequence
  Fusion Protein
HGEGTFTSDKSKQLAERLAKLFIEWLIAGGHSSGKPPPKGGGGGGGSGGGGSGGGGSAESKYGPPCPPCPAPEFEGGPSVFLFPPKPKDTLMISRTPEVTCVVVDVSQEDPEVQFNWYVDGVEVHNAKTKPREEQFNSTYRVVSVLTVLHQDWLNGKEYKCKVSNKGLPSSIEKTISKAKGQPREPQVYTLPPSQEEMTKNQVSLTCLVKGFYPSDIAVEWESNGQPENNYKTTPPVLDSDGSFFLYSRLTVDKSRWQEGNVFSCSVMHEALHNHYTQKSLSLSLGGGGSGSAHPIPDSSPLLQFGGQVRQRYLYTDDACQTEAHLEIREDGTVGGAADQSPESLLQLKALKPGVIQILGVKTSRFLCQRPDGALYGSLHFDPEACSFRELLLEDGYNVYQSEAHGLPLHLPGCKSPHRDPAPRGPARFLPLPGLPPAPPEPPGILAPQPPDVGSSDPLSMVYPSQGRSPSYAS

SEQ ID NO: 2962 - protein, 473 aa, Artificial Sequence
  Fusion Protein
HGEGTFTSDKSKQLAERLAKLFIEWLIAGGHSSGKPPPKGGGGGGGSGGGGSGGGGSAESKYGPPCPPCPAPEFEGGPSVFLFPPKPKDTLMISRTPEVTCVVVDVSQEDPEVQFNWYVDGVEVHNAKTKPREEQFNSTYRVVSVLTVLHQDWLNGKEYKCKVSNKGLPSSIEKTISKAKGQPREPQVYTLPPSQEEMTKNQVSLTCLVKGFYPSDIAVEWESNGQPENNYKTTPPVLDSDGSFFLYSRLTVDKSRWQEGNVFSCSVMHEALHNHYTQKSLSLSLGGGGSGSAHPIPDSSPLLQFGGQVRQRYLYTDDACQTEAHLEIREDGTVGGAADQSPESLLQLKALKPGVIQILGVKTSRFLCQRPDGALYGSLHFDPEACSFRELLLEDGYNVYQSEAHGLPLHLCGNKSPHRDPAPRGPARFLPLPGLPPAPPEPPGILAPQPPDVGSSDPLSMVGSQGRSPSYAS

SEQ ID NO: 2963 - protein, 474 aa, Artificial Sequence
  Fusion Protein
HGEGTFTSDKSKQLAERLAKLFIEWLIAGGHSSGKPPPKGGGGGGGSGGGGSGGGGSAESKYGPPCPPCPAPEFEGGPSVFLFPPKPKDTLMISRTPEVTCVVVDVSQEDPEVQFNWYVDGVEVHNAKTKPREEQFNSTYRVVSVLTVLHQDWLNGKEYKCKVSNKGLPSSIEKTISKAKGQPREPQVYTLPPSQEEMTKNQVSLTCLVKGFYPSDIAVEWESNGQPENNYKTTPPVLDSDGSFFLYSRLTVDKSRWQEGNVFSCSVMHEALHNHYTQKSLSLSLGGGGSGSAHPIPDSSPLLQFGGQVRQRYLYTDDACQTEAHLEIREDGTVGGAADQSPESLLQLKALKPGVIQILGVKTSRFLCQRPDGALYGSLHFDPEACSFRELLLEDGYNVYQSEAHGLPLHLCGNKSPHRDPAPRGPARFLPLPGLPPAPPEPPGILAPQPPDVGSSDPLSMVYPSQGRSPSYAS

SEQ ID NO: 2964 - protein, 471 aa, Artificial Sequence
  Fusion Protein
HGEGTFTSDLSKQLAERLVRLFIEWLIKGGHSSGKPPPKGGGGGGGSGGGGSGGGGSADKTHTCPPCPAPEAAGGPSVFLFPPKPKDTLMISRTPEVTCVVVDVSHEDPEVKFNWYVDGVEVHNAKTKPREEQYNSTYRVVSVLTVLHQDWLNGKEYKCKVSNKALPAPIEKTISKAKGQPREPQVYTLPPSRDELTKNQVSLTCLVKGFYPSDIAVEWESNGQPENNYKTTPPVLDSDGSFFLYSKLTVDKSRWQQGNVFSCSVMHEALHNHYTQKSLSLSPGGGGSGSAHPIPDSSPLLQFGGQVRQRYLYTDDACQTEAHLEIREDGTVGGAADQSPESLLQLKALKPGVIQILGVKTSRFLCQRPDGALYGSLHFDPEACSFRELLLEDGYNVYQSEAHGLPLHLPGCKSPHRDPAPRGPARFLPLPGLPPAPPEPPGILAPQPPDVGSSDPLSMVGSQGRSPSYAS

SEQ ID NO: 2965 - protein, 472 aa, Artificial Sequence
  Fusion Protein
HGEGTFTSDLSKQLAERLVRLFIEWLIKGGHSSGKPPPKGGGGGGGSGGGGSGGGGSADKTHTCPPCPAPEAAGGPSVFLFPPKPKDTLMISRTPEVTCVVVDVSHEDPEVKFNWYVDGVEVHNAKTKPREEQYNSTYRVVSVLTVLHQDWLNGKEYKCKVSNKALPAPIEKTISKAKGQPREPQVYTLPPSRDELTKNQVSLTCLVKGFYPSDIAVEWESNGQPENNYKTTPPVLDSDGSFFLYSKLTVDKSRWQQGNVFSCSVMHEALHNHYTQKSLSLSPGGGGSGSAHPIPDSSPLLQFGGQVRQRYLYTDDACQTEAHLEIREDGTVGGAADQSPESLLQLKALKPGVIQILGVKTSRFLCQRPDGALYGSLHFDPEACSFRELLLEDGYNVYQSEAHGLPLHLPGCKSPHRDPAPRGPARFLPLPGLPPAPPEPPGILAPQPPDVGSSDPLSMVYPSQGRSPSYAS

SEQ ID NO: 2966 - protein, 471 aa, Artificial Sequence
  Fusion Protein
HGEGTFTSDLSKQLAERLVRLFIEWLIKGGHSSGKPPPKGGGGGGGSGGGGSGGGGSADKTHTCPPCPAPEAAGGPSVFLFPPKPKDTLMISRTPEVTCVVVDVSHEDPEVKFNWYVDGVEVHNAKTKPREEQYNSTYRVVSVLTVLHQDWLNGKEYKCKVSNKALPAPIEKTISKAKGQPREPQVYTLPPSRDELTKNQVSLTCLVKGFYPSDIAVEWESNGQPENNYKTTPPVLDSDGSFFLYSKLTVDKSRWQQGNVFSCSVMHEALHNHYTQKSLSLSPGGGGSGSAHPIPDSSPLLQFGGQVRQRYLYTDDACQTEAHLEIREDGTVGGAADQSPESLLQLKALKPGVIQILGVKTSRFLCQRPDGALYGSLHFDPEACSFRELLLEDGYNVYQSEAHGLPLHLCGNKSPHRDPAPRGPARFLPLPGLPPAPPEPPGILAPQPPDVGSSDPLSMVGSQGRSPSYAS

SEQ ID NO: 2967 - protein, 472 aa, Artificial Sequence
  Fusion Protein
HGEGTFTSDLSKQLAERLVRLFIEWLIKGGHSSGKPPPKGGGGGGGSGGGGSGGGGSADKTHTCPPCPAPEAAGGPSVFLFPPKPKDTLMISRTPEVTCVVVDVSHEDPEVKFNWYVDGVEVHNAKTKPREEQYNSTYRVVSVLTVLHQDWLNGKEYKCKVSNKALPAPIEKTISKAKGQPREPQVYTLPPSRDELTKNQVSLTCLVKGFYPSDIAVEWESNGQPENNYKTTPPVLDSDGSFFLYSKLTVDKSRWQQGNVFSCSVMHEALHNHYTQKSLSLSPGGGGSGSAHPIPDSSPLLQFGGQVRQRYLYTDDACQTEAHLEIREDGTVGGAADQSPESLLQLKALKPGVIQILGVKTSRFLCQRPDGALYGSLHFDPEACSFRELLLEDGYNVYQSEAHGLPLHLCGNKSPHRDPAPRGPARFLPLPGLPPAPPEPPGILAPQPPDVGSSDPLSMVYPSQGRSPSYAS

SEQ ID NO: 2968 - protein, 471 aa, Artificial Sequence
  Fusion Protein
HGEGTFTSDLSKQLAERLVRLFIEWLIKGGHSSGKPPPKGGGGGGGSGGGGSGGGGSADKTHTCPPCPAPELLGGPSVFLFPPKPKDTLMISRTPEVTCVVVDVSHEDPEVKFNWYVDGVEVHNAKTKPREEQYNNASRVVSVLTVLHQDWLNGKEYKCKVSNKALPAPIEKTISKAKGQPREPQVYTLPPSRDELTKNQVSLTCLVKGFYPSDIAVEWESNGQPENNYKTTPPVLDSDGSFFLYSKLTVDKSRWQQGNVFSCSVMHEALHNHYTQKSLSLSPGGGGSGSAHPIPDSSPLLQFGGQVRQRYLYTDDACQTEAHLEIREDGTVGGAADQSPESLLQLKALKPGVIQILGVKTSRFLCQRPDGALYGSLHFDPEACSFRELLLEDGYNVYQSEAHGLPLHLPGCKSPHRDPAPRGPARFLPLPGLPPAPPEPPGILAPQPPDVGSSDPLSMVGSQGRSPSYAS

SEQ ID NO: 2969 - protein, 472 aa, Artificial Sequence
  Fusion Protein
HGEGTFTSDLSKQLAERLVRLFIEWLIKGGHSSGKPPPKGGGGGGGSGGGGSGGGGSADKTHTCPPCPAPELLGGPSVFLFPPKPKDTLMISRTPEVTCVVVDVSHEDPEVKFNWYVDGVEVHNAKTKPREEQYNNASRVVSVLTVLHQDWLNGKEYKCKVSNKALPAPIEKTISKAKGQPREPQVYTLPPSRDELTKNQVSLTCLVKGFYPSDIAVEWESNGQPENNYKTTPPVLDSDGSFFLYSKLTVDKSRWQQGNVFSCSVMHEALHNHYTQKSLSLSPGGGGSGSAHPIPDSSPLLQFGGQVRQRYLYTDDACQTEAHLEIREDGTVGGAADQSPESLLQLKALKPGVIQILGVKTSRFLCQRPDGALYGSLHFDPEACSFRELLLEDGYNVYQSEAHGLPLHLPGCKSPHRDPAPRGPARFLPLPGLPPAPPEPPGILAPQPPDVGSSDPLSMVYPSQGRSPSYAS

SEQ ID NO: 2970 - protein, 471 aa, Artificial Sequence
  Fusion Protein
HGEGTFTSDLSKQLAERLVRLFIEWLIKGGHSSGKPPPKGGGGGGGSGGGGSGGGGSADKTHTCPPCPAPELLGGPSVFLFPPKPKDTLMISRTPEVTCVVVDVSHEDPEVKFNWYVDGVEVHNAKTKPREEQYNNASRVVSVLTVLHQDWLNGKEYKCKVSNKALPAPIEKTISKAKGQPREPQVYTLPPSRDELTKNQVSLTCLVKGFYPSDIAVEWESNGQPENNYKTTPPVLDSDGSFFLYSKLTVDKSRWQQGNVFSCSVMHEALHNHYTQKSLSLSPGGGGSGSAHPIPDSSPLLQFGGQVRQRYLYTDDACQTEAHLEIREDGTVGGAADQSPESLLQLKALKPGVIQILGVKTSRFLCQRPDGALYGSLHFDPEACSFRELLLEDGYNVYQSEAHGLPLHLCGNKSPHRDPAPRGPARFLPLPGLPPAPPEPPGILAPQPPDVGSSDPLSMVGSQGRSPSYAS

SEQ ID NO: 2971 - protein, 472 aa, Artificial Sequence
  Fusion Protein
HGEGTFTSDLSKQLAERLVRLFIEWLIKGGHSSGKPPPKGGGGGGGSGGGGSGGGGSADKTHTCPPCPAPELLGGPSVFLFPPKPKDTLMISRTPEVTCVVVDVSHEDPEVKFNWYVDGVEVHNAKTKPREEQYNNASRVVSVLTVLHQDWLNGKEYKCKVSNKALPAPIEKTISKAKGQPREPQVYTLPPSRDELTKNQVSLTCLVKGFYPSDIAVEWESNGQPENNYKTTPPVLDSDGSFFLYSKLTVDKSRWQQGNVFSCSVMHEALHNHYTQKSLSLSPGGGGSGSAHPIPDSSPLLQFGGQVRQRYLYTDDACQTEAHLEIREDGTVGGAADQSPESLLQLKALKPGVIQILGVKTSRFLCQRPDGALYGSLHFDPEACSFRELLLEDGYNVYQSEAHGLPLHLCGNKSPHRDPAPRGPARFLPLPGLPPAPPEPPGILAPQPPDVGSSDPLSMVYPSQGRSPSYAS

SEQ ID NO: 2972 - protein, 474 aa, Artificial Sequence
  Fusion Protein
HGEGTFTSDLSKQLAERLVRLFIEWLIKGGHSSGKPPPKGGGGGGGSGGGGSGGGGSAESKYGPPCPPCPAPEFEGGPSVFLFPPKPKDTLMISRTPEVTCVVVDVSQEDPEVQFNWYVDGVEVHNAKTKPREEQFNSTYRVVSVLTVLHQDWLNGKEYKCKVSNKGLPSSIEKTISKAKGQPREPQVYTLPPSQEEMTKNQVSLTCLVKGFYPSDIAVEWESNGQPENNYKTTPPVLDSDGSFFLYSRLTVDKSRWQEGNVFSCSVMHEALHNHYTQKSLSLSLGGGGSGSAHPIPDSSPLLQFGGQVRQRYLYTDDACQTEAHLEIREDGTVGGAADQSPESLLQLKALKPGVIQILGVKTSRFLCQRPDGALYGSLHFDPEACSFRELLLEDGYNVYQSEAHGLPLHLPGCKSPHRDPAPRGPARFLPLPGLPPAPPEPPGILAPQPPDVGSSDPLSMVYPSQGRSPSYAS

SEQ ID NO: 2973 - protein, 473 aa, Artificial Sequence
  Fusion Protein
HGEGTFTSDLSKQLAERLVRLFIEWLIKGGHSSGKPPPKGGGGGGGSGGGGSGGGGSAESKYGPPCPPCPAPEFEGGPSVFLFPPKPKDTLMISRTPEVTCVVVDVSQEDPEVQFNWYVDGVEVHNAKTKPREEQFNSTYRVVSVLTVLHQDWLNGKEYKCKVSNKGLPSSIEKTISKAKGQPREPQVYTLPPSQEEMTKNQVSLTCLVKGFYPSDIAVEWESNGQPENNYKTTPPVLDSDGSFFLYSRLTVDKSRWQEGNVFSCSVMHEALHNHYTQKSLSLSLGGGGSGSAHPIPDSSPLLQFGGQVRQRYLYTDDACQTEAHLEIREDGTVGGAADQSPESLLQLKALKPGVIQILGVKTSRFLCQRPDGALYGSLHFDPEACSFRELLLEDGYNVYQSEAHGLPLHLCGNKSPHRDPAPRGPARFLPLPGLPPAPPEPPGILAPQPPDVGSSDPLSMVGSQGRSPSYAS

SEQ ID NO: 2974 - protein, 474 aa, Artificial Sequence
  Fusion Protein
HGEGTFTSDLSKQLAERLVRLFIEWLIKGGHSSGKPPPKGGGGGGGSGGGGSGGGGSAESKYGPPCPPCPAPEFEGGPSVFLFPPKPKDTLMISRTPEVTCVVVDVSQEDPEVQFNWYVDGVEVHNAKTKPREEQFNSTYRVVSVLTVLHQDWLNGKEYKCKVSNKGLPSSIEKTISKAKGQPREPQVYTLPPSQEEMTKNQVSLTCLVKGFYPSDIAVEWESNGQPENNYKTTPPVLDSDGSFFLYSRLTVDKSRWQEGNVFSCSVMHEALHNHYTQKSLSLSLGGGGSGSAHPIPDSSPLLQFGGQVRQRYLYTDDACQTEAHLEIREDGTVGGAADQSPESLLQLKALKPGVIQILGVKTSRFLCQRPDGALYGSLHFDPEACSFRELLLEDGYNVYQSEAHGLPLHLCGNKSPHRDPAPRGPARFLPLPGLPPAPPEPPGILAPQPPDVGSSDPLSMVYPSQGRSPSYAS

SEQ ID NO: 2975 - protein, 471 aa, Artificial Sequence
  Fusion Protein
HGEGTFTSDLSIQLAKRLAQLFIEWLIKGGHSSGKPPPKGGGGGGGSGGGGSGGGGSADKTHTCPPCPAPEAAGGPSVFLFPPKPKDTLMISRTPEVTCVVVDVSHEDPEVKFNWYVDGVEVHNAKTKPREEQYNSTYRVVSVLTVLHQDWLNGKEYKCKVSNKALPAPIEKTISKAKGQPREPQVYTLPPSRDELTKNQVSLTCLVKGFYPSDIAVEWESNGQPENNYKTTPPVLDSDGSFFLYSKLTVDKSRWQQGNVFSCSVMHEALHNHYTQKSLSLSPGGGGSGSAHPIPDSSPLLQFGGQVRQRYLYTDDACQTEAHLEIREDGTVGGAADQSPESLLQLKALKPGVIQILGVKTSRFLCQRPDGALYGSLHFDPEACSFRELLLEDGYNVYQSEAHGLPLHLPGCKSPHRDPAPRGPARFLPLPGLPPAPPEPPGILAPQPPDVGSSDPLSMVGSQGRSPSYAS

SEQ ID NO: 2976 - protein, 472 aa, Artificial Sequence
  Fusion Protein
HGEGTFTSDLSIQLAKRLAQLFIEWLIKGGHSSGKPPPKGGGGGGGSGGGGSGGGGSADKTHTCPPCPAPEAAGGPSVFLFPPKPKDTLMISRTPEVTCVVVDVSHEDPEVKFNWYVDGVEVHNAKTKPREEQYNSTYRVVSVLTVLHQDWLNGKEYKCKVSNKALPAPIEKTISKAKGQPREPQVYTLPPSRDELTKNQVSLTCLVKGFYPSDIAVEWESNGQPENNYKTTPPVLDSDGSFFLYSKLTVDKSRWQQGNVFSCSVMHEALHNHYTQKSLSLSPGGGGSGSAHPIPDSSPLLQFGGQVRQRYLYTDDACQTEAHLEIREDGTVGGAADQSPESLLQLKALKPGVIQILGVKTSRFLCQRPDGALYGSLHFDPEACSFRELLLEDGYNVYQSEAHGLPLHLPGCKSPHRDPAPRGPARFLPLPGLPPAPPEPPGILAPQPPDVGSSDPLSMVYPSQGRSPSYAS

SEQ ID NO: 2977 - protein, 471 aa, Artificial Sequence
  Fusion Protein
HGEGTFTSDLSIQLAKRLAQLFIEWLIKGGHSSGKPPPKGGGGGGGSGGGGSGGGGSADKTHTCPPCPAPEAAGGPSVFLFPPKPKDTLMISRTPEVTCVVVDVSHEDPEVKFNWYVDGVEVHNAKTKPREEQYNSTYRVVSVLTVLHQDWLNGKEYKCKVSNKALPAPIEKTISKAKGQPREPQVYTLPPSRDELTKNQVSLTCLVKGFYPSDIAVEWESNGQPENNYKTTPPVLDSDGSFFLYSKLTVDKSRWQQGNVFSCSVMHEALHNHYTQKSLSLSPGGGGSGSAHPIPDSSPLLQFGGQVRQRYLYTDDACQTEAHLEIREDGTVGGAADQSPESLLQLKALKPGVIQILGVKTSRFLCQRPDGALYGSLHFDPEACSFRELLLEDGYNVYQSEAHGLPLHLCGNKSPHRDPAPRGPARFLPLPGLPPAPPEPPGILAPQPPDVGSSDPLSMVGSQGRSPSYAS

SEQ ID NO: 2978 - protein, 472 aa, Artificial Sequence
  Fusion Protein
HGEGTFTSDLSIQLAKRLAQLFIEWLIKGGHSSGKPPPKGGGGGGGSGGGGSGGGGSADKTHTCPPCPAPEAAGGPSVFLFPPKPKDTLMISRTPEVTCVVVDVSHEDPEVKFNWYVDGVEVHNAKTKPREEQYNSTYRVVSVLTVLHQDWLNGKEYKCKVSNKALPAPIEKTISKAKGQPREPQVYTLPPSRDELTKNQVSLTCLVKGFYPSDIAVEWESNGQPENNYKTTPPVLDSDGSFFLYSKLTVDKSRWQQGNVFSCSVMHEALHNHYTQKSLSLSPGGGGSGSAHPIPDSSPLLQFGGQVRQRYLYTDDACQTEAHLEIREDGTVGGAADQSPESLLQLKALKPGVIQILGVKTSRFLCQRPDGALYGSLHFDPEACSFRELLLEDGYNVYQSEAHGLPLHLCGNKSPHRDPAPRGPARFLPLPGLPPAPPEPPGILAPQPPDVGSSDPLSMVYPSQGRSPSYAS

SEQ ID NO: 2979 - protein, 471 aa, Artificial Sequence
  Fusion Protein
HGEGTFTSDLSIQLAKRLAQLFIEWLIKGGHSSGKPPPKGGGGGGGSGGGGSGGGGSADKTHTCPPCPAPELLGGPSVFLFPPKPKDTLMISRTPEVTCVVVDVSHEDPEVKFNWYVDGVEVHNAKTKPREEQYNNASRVVSVLTVLHQDWLNGKEYKCKVSNKALPAPIEKTISKAKGQPREPQVYTLPPSRDELTKNQVSLTCLVKGFYPSDIAVEWESNGQPENNYKTTPPVLDSDGSFFLYSKLTVDKSRWQQGNVFSCSVMHEALHNHYTQKSLSLSPGGGGSGSAHPIPDSSPLLQFGGQVRQRYLYTDDACQTEAHLEIREDGTVGGAADQSPESLLQLKALKPGVIQILGVKTSRFLCQRPDGALYGSLHFDPEACSFRELLLEDGYNVYQSEAHGLPLHLPGCKSPHRDPAPRGPARFLPLPGLPPAPPEPPGILAPQPPDVGSSDPLSMVGSQGRSPSYAS

SEQ ID NO: 2980 - protein, 472 aa, Artificial Sequence
  Fusion Protein
HGEGTFTSDLSIQLAKRLAQLFIEWLIKGGHSSGKPPPKGGGGGGGSGGGGSGGGGSADKTHTCPPCPAPELLGGPSVFLFPPKPKDTLMISRTPEVTCVVVDVSHEDPEVKFNWYVDGVEVHNAKTKPREEQYNNASRVVSVLTVLHQDWLNGKEYKCKVSNKALPAPIEKTISKAKGQPREPQVYTLPPSRDELTKNQVSLTCLVKGFYPSDIAVEWESNGQPENNYKTTPPVLDSDGSFFLYSKLTVDKSRWQQGNVFSCSVMHEALHNHYTQKSLSLSPGGGGSGSAHPIPDSSPLLQFGGQVRQRYLYTDDACQTEAHLEIREDGTVGGAADQSPESLLQLKALKPGVIQILGVKTSRFLCQRPDGALYGSLHFDPEACSFRELLLEDGYNVYQSEAHGLPLHLPGCKSPHRDPAPRGPARFLPLPGLPPAPPEPPGILAPQPPDVGSSDPLSMVYPSQGRSPSYAS

SEQ ID NO: 2981 - protein, 471 aa, Artificial Sequence
  Fusion Protein
HGEGTFTSDLSIQLAKRLAQLFIEWLIKGGHSSGKPPPKGGGGGGGSGGGGSGGGGSADKTHTCPPCPAPELLGGPSVFLFPPKPKDTLMISRTPEVTCVVVDVSHEDPEVKFNWYVDGVEVHNAKTKPREEQYNNASRVVSVLTVLHQDWLNGKEYKCKVSNKALPAPIEKTISKAKGQPREPQVYTLPPSRDELTKNQVSLTCLVKGFYPSDIAVEWESNGQPENNYKTTPPVLDSDGSFFLYSKLTVDKSRWQQGNVFSCSVMHEALHNHYTQKSLSLSPGGGGSGSAHPIPDSSPLLQFGGQVRQRYLYTDDACQTEAHLEIREDGTVGGAADQSPESLLQLKALKPGVIQILGVKTSRFLCQRPDGALYGSLHFDPEACSFRELLLEDGYNVYQSEAHGLPLHLCGNKSPHRDPAPRGPARFLPLPGLPPAPPEPPGILAPQPPDVGSSDPLSMVGSQGRSPSYAS

SEQ ID NO: 2982 - protein, 472 aa, Artificial Sequence
  Fusion Protein
HGEGTFTSDLSIQLAKRLAQLFIEWLIKGGHSSGKPPPKGGGGGGGSGGGGSGGGGSADKTHTCPPCPAPELLGGPSVFLFPPKPKDTLMISRTPEVTCVVVDVSHEDPEVKFNWYVDGVEVHNAKTKPREEQYNNASRVVSVLTVLHQDWLNGKEYKCKVSNKALPAPIEKTISKAKGQPREPQVYTLPPSRDELTKNQVSLTCLVKGFYPSDIAVEWESNGQPENNYKTTPPVLDSDGSFFLYSKLTVDKSRWQQGNVFSCSVMHEALHNHYTQKSLSLSPGGGGSGSAHPIPDSSPLLQFGGQVRQRYLYTDDACQTEAHLEIREDGTVGGAADQSPESLLQLKALKPGVIQILGVKTSRFLCQRPDGALYGSLHFDPEACSFRELLLEDGYNVYQSEAHGLPLHLCGNKSPHRDPAPRGPARFLPLPGLPPAPPEPPGILAPQPPDVGSSDPLSMVYPSQGRSPSYAS

SEQ ID NO: 2983 - protein, 474 aa, Artificial Sequence
  Fusion Protein
HGEGTFTSDLSIQLAKRLAQLFIEWLIKGGHSSGKPPPKGGGGGGGSGGGGSGGGGSAESKYGPPCPPCPAPEFEGGPSVFLFPPKPKDTLMISRTPEVTCVVVDVSQEDPEVQFNWYVDGVEVHNAKTKPREEQFNSTYRVVSVLTVLHQDWLNGKEYKCKVSNKGLPSSIEKTISKAKGQPREPQVYTLPPSQEEMTKNQVSLTCLVKGFYPSDIAVEWESNGQPENNYKTTPPVLDSDGSFFLYSRLTVDKSRWQEGNVFSCSVMHEALHNHYTQKSLSLSLGGGGSGSAHPIPDSSPLLQFGGQVRQRYLYTDDACQTEAHLEIREDGTVGGAADQSPESLLQLKALKPGVIQILGVKTSRFLCQRPDGALYGSLHFDPEACSFRELLLEDGYNVYQSEAHGLPLHLPGCKSPHRDPAPRGPARFLPLPGLPPAPPEPPGILAPQPPDVGSSDPLSMVYPSQGRSPSYAS

SEQ ID NO: 2984 - protein, 473 aa, Artificial Sequence
  Fusion Protein
HGEGTFTSDLSIQLAKRLAQLFIEWLIKGGHSSGKPPPKGGGGGGGSGGGGSGGGGSAESKYGPPCPPCPAPEFEGGPSVFLFPPKPKDTLMISRTPEVTCVVVDVSQEDPEVQFNWYVDGVEVHNAKTKPREEQFNSTYRVVSVLTVLHQDWLNGKEYKCKVSNKGLPSSIEKTISKAKGQPREPQVYTLPPSQEEMTKNQVSLTCLVKGFYPSDIAVEWESNGQPENNYKTTPPVLDSDGSFFLYSRLTVDKSRWQEGNVFSCSVMHEALHNHYTQKSLSLSLGGGGSGSAHPIPDSSPLLQFGGQVRQRYLYTDDACQTEAHLEIREDGTVGGAADQSPESLLQLKALKPGVIQILGVKTSRFLCQRPDGALYGSLHFDPEACSFRELLLEDGYNVYQSEAHGLPLHLCGNKSPHRDPAPRGPARFLPLPGLPPAPPEPPGILAPQPPDVGSSDPLSMVGSQGRSPSYAS

SEQ ID NO: 2985 - protein, 474 aa, Artificial Sequence
  Fusion Protein
HGEGTFTSDLSIQLAKRLAQLFIEWLIKGGHSSGKPPPKGGGGGGGSGGGGSGGGGSAESKYGPPCPPCPAPEFEGGPSVFLFPPKPKDTLMISRTPEVTCVVVDVSQEDPEVQFNWYVDGVEVHNAKTKPREEQFNSTYRVVSVLTVLHQDWLNGKEYKCKVSNKGLPSSIEKTISKAKGQPREPQVYTLPPSQEEMTKNQVSLTCLVKGFYPSDIAVEWESNGQPENNYKTTPPVLDSDGSFFLYSRLTVDKSRWQEGNVFSCSVMHEALHNHYTQKSLSLSLGGGGSGSAHPIPDSSPLLQFGGQVRQRYLYTDDACQTEAHLEIREDGTVGGAADQSPESLLQLKALKPGVIQILGVKTSRFLCQRPDGALYGSLHFDPEACSFRELLLEDGYNVYQSEAHGLPLHLCGNKSPHRDPAPRGPARFLPLPGLPPAPPEPPGILAPQPPDVGSSDPLSMVYPSQGRSPSYAS

SEQ ID NO: 2986 - protein, 471 aa, Artificial Sequence
  Fusion Protein
HGEGTFTSDKSKQLEKRAVRLFYEWLKAGGHSKIKPPPKGGGGGGGSGGGGSGGGGSADKTHTCPPCPAPEAAGGPSVFLFPPKPKDTLMISRTPEVTCVVVDVSHEDPEVKFNWYVDGVEVHNAKTKPREEQYNSTYRVVSVLTVLHQDWLNGKEYKCKVSNKALPAPIEKTISKAKGQPREPQVYTLPPSRDELTKNQVSLTCLVKGFYPSDIAVEWESNGQPENNYKTTPPVLDSDGSFFLYSKLTVDKSRWQQGNVFSCSVMHEALHNHYTQKSLSLSPGGGGSGSAHPIPDSSPLLQFGGQVRQRYLYTDDACQTEAHLEIREDGTVGGAADQSPESLLQLKALKPGVIQILGVKTSRFLCQRPDGALYGSLHFDPEACSFRELLLEDGYNVYQSEAHGLPLHLPGCKSPHRDPAPRGPARFLPLPGLPPAPPEPPGILAPQPPDVGSSDPLSMVGSQGRSPSYAS

SEQ ID NO: 2987 - protein, 472 aa, Artificial Sequence
  Fusion Protein
HGEGTFTSDKSKQLEKRAVRLFYEWLKAGGHSKIKPPPKGGGGGGGSGGGGSGGGGSADKTHTCPPCPAPEAAGGPSVFLFPPKPKDTLMISRTPEVTCVVVDVSHEDPEVKFNWYVDGVEVHNAKTKPREEQYNSTYRVVSVLTVLHQDWLNGKEYKCKVSNKALPAPIEKTISKAKGQPREPQVYTLPPSRDELTKNQVSLTCLVKGFYPSDIAVEWESNGQPENNYKTTPPVLDSDGSFFLYSKLTVDKSRWQQGNVFSCSVMHEALHNHYTQKSLSLSPGGGGSGSAHPIPDSSPLLQFGGQVRQRYLYTDDACQTEAHLEIREDGTVGGAADQSPESLLQLKALKPGVIQILGVKTSRFLCQRPDGALYGSLHFDPEACSFRELLLEDGYNVYQSEAHGLPLHLPGCKSPHRDPAPRGPARFLPLPGLPPAPPEPPGILAPQPPDVGSSDPLSMVYPSQGRSPSYAS

SEQ ID NO: 2988 - protein, 471 aa, Artificial Sequence
  Fusion Protein
HGEGTFTSDKSKQLEKRAVRLFYEWLKAGGHSKIKPPPKGGGGGGGSGGGGSGGGGSADKTHTCPPCPAPEAAGGPSVFLFPPKPKDTLMISRTPEVTCVVVDVSHEDPEVKFNWYVDGVEVHNAKTKPREEQYNSTYRVVSVLTVLHQDWLNGKEYKCKVSNKALPAPIEKTISKAKGQPREPQVYTLPPSRDELTKNQVSLTCLVKGFYPSDIAVEWESNGQPENNYKTTPPVLDSDGSFFLYSKLTVDKSRWQQGNVFSCSVMHEALHNHYTQKSLSLSPGGGGSGSAHPIPDSSPLLQFGGQVRQRYLYTDDACQTEAHLEIREDGTVGGAADQSPESLLQLKALKPGVIQILGVKTSRFLCQRPDGALYGSLHFDPEACSFRELLLEDGYNVYQSEAHGLPLHLCGNKSPHRDPAPRGPARFLPLPGLPPAPPEPPGILAPQPPDVGSSDPLSMVGSQGRSPSYAS

SEQ ID NO: 2989 - protein, 472 aa, Artificial Sequence
  Fusion Protein
HGEGTFTSDKSKQLEKRAVRLFYEWLKAGGHSKIKPPPKGGGGGGGSGGGGSGGGGSADKTHTCPPCPAPEAAGGPSVFLFPPKPKDTLMISRTPEVTCVVVDVSHEDPEVKFNWYVDGVEVHNAKTKPREEQYNSTYRVVSVLTVLHQDWLNGKEYKCKVSNKALPAPIEKTISKAKGQPREPQVYTLPPSRDELTKNQVSLTCLVKGFYPSDIAVEWESNGQPENNYKTTPPVLDSDGSFFLYSKLTVDKSRWQQGNVFSCSVMHEALHNHYTQKSLSLSPGGGGSGSAHPIPDSSPLLQFGGQVRQRYLYTDDACQTEAHLEIREDGTVGGAADQSPESLLQLKALKPGVIQILGVKTSRFLCQRPDGALYGSLHFDPEACSFRELLLEDGYNVYQSEAHGLPLHLCGNKSPHRDPAPRGPARFLPLPGLPPAPPEPPGILAPQPPDVGSSDPLSMVYPSQGRSPSYAS

SEQ ID NO: 2990 - protein, 471 aa, Artificial Sequence
  Fusion Protein
HGEGTFTSDKSKQLEKRAVRLFYEWLKAGGHSKIKPPPKGGGGGGGSGGGGSGGGGSADKTHTCPPCPAPELLGGPSVFLFPPKPKDTLMISRTPEVTCVVVDVSHEDPEVKFNWYVDGVEVHNAKTKPREEQYNNASRVVSVLTVLHQDWLNGKEYKCKVSNKALPAPIEKTISKAKGQPREPQVYTLPPSRDELTKNQVSLTCLVKGFYPSDIAVEWESNGQPENNYKTTPPVLDSDGSFFLYSKLTVDKSRWQQGNVFSCSVMHEALHNHYTQKSLSLSPGGGGSGSAHPIPDSSPLLQFGGQVRQRYLYTDDACQTEAHLEIREDGTVGGAADQSPESLLQLKALKPGVIQILGVKTSRFLCQRPDGALYGSLHFDPEACSFRELLLEDGYNVYQSEAHGLPLHLPGCKSPHRDPAPRGPARFLPLPGLPPAPPEPPGILAPQPPDVGSSDPLSMVGSQGRSPSYAS

SEQ ID NO: 2991 - protein, 472 aa, Artificial Sequence
  Fusion Protein
HGEGTFTSDKSKQLEKRAVRLFYEWLKAGGHSKIKPPPKGGGGGGGSGGGGSGGGGSADKTHTCPPCPAPELLGGPSVFLFPPKPKDTLMISRTPEVTCVVVDVSHEDPEVKFNWYVDGVEVHNAKTKPREEQYNNASRVVSVLTVLHQDWLNGKEYKCKVSNKALPAPIEKTISKAKGQPREPQVYTLPPSRDELTKNQVSLTCLVKGFYPSDIAVEWESNGQPENNYKTTPPVLDSDGSFFLYSKLTVDKSRWQQGNVFSCSVMHEALHNHYTQKSLSLSPGGGGSGSAHPIPDSSPLLQFGGQVRQRYLYTDDACQTEAHLEIREDGTVGGAADQSPESLLQLKALKPGVIQILGVKTSRFLCQRPDGALYGSLHFDPEACSFRELLLEDGYNVYQSEAHGLPLHLPGCKSPHRDPAPRGPARFLPLPGLPPAPPEPPGILAPQPPDVGSSDPLSMVYPSQGRSPSYAS

SEQ ID NO: 2992 - protein, 471 aa, Artificial Sequence
  Fusion Protein
HGEGTFTSDKSKQLEKRAVRLFYEWLKAGGHSKIKPPPKGGGGGGGSGGGGSGGGGSADKTHTCPPCPAPELLGGPSVFLFPPKPKDTLMISRTPEVTCVVVDVSHEDPEVKFNWYVDGVEVHNAKTKPREEQYNNASRVVSVLTVLHQDWLNGKEYKCKVSNKALPAPIEKTISKAKGQPREPQVYTLPPSRDELTKNQVSLTCLVKGFYPSDIAVEWESNGQPENNYKTTPPVLDSDGSFFLYSKLTVDKSRWQQGNVFSCSVMHEALHNHYTQKSLSLSPGGGGSGSAHPIPDSSPLLQFGGQVRQRYLYTDDACQTEAHLEIREDGTVGGAADQSPESLLQLKALKPGVIQILGVKTSRFLCQRPDGALYGSLHFDPEACSFRELLLEDGYNVYQSEAHGLPLHLCGNKSPHRDPAPRGPARFLPLPGLPPAPPEPPGILAPQPPDVGSSDPLSMVGSQGRSPSYAS

SEQ ID NO: 2993 - protein, 472 aa, Artificial Sequence
  Fusion Protein
HGEGTFTSDKSKQLEKRAVRLFYEWLKAGGHSKIKPPPKGGGGGGGSGGGGSGGGGSADKTHTCPPCPAPELLGGPSVFLFPPKPKDTLMISRTPEVTCVVVDVSHEDPEVKFNWYVDGVEVHNAKTKPREEQYNNASRVVSVLTVLHQDWLNGKEYKCKVSNKALPAPIEKTISKAKGQPREPQVYTLPPSRDELTKNQVSLTCLVKGFYPSDIAVEWESNGQPENNYKTTPPVLDSDGSFFLYSKLTVDKSRWQQGNVFSCSVMHEALHNHYTQKSLSLSPGGGGSGSAHPIPDSSPLLQFGGQVRQRYLYTDDACQTEAHLEIREDGTVGGAADQSPESLLQLKALKPGVIQILGVKTSRFLCQRPDGALYGSLHFDPEACSFRELLLEDGYNVYQSEAHGLPLHLCGNKSPHRDPAPRGPARFLPLPGLPPAPPEPPGILAPQPPDVGSSDPLSMVYPSQGRSPSYAS

SEQ ID NO: 2994 - protein, 473 aa, Artificial Sequence
  Fusion Protein
HGEGTFTSDKSKQLEKRAVRLFYEWLKAGGHSKIKPPPKGGGGGGGSGGGGSGGGGSAESKYGPPCPPCPAPEFEGGPSVFLFPPKPKDTLMISRTPEVTCVVVDVSQEDPEVQFNWYVDGVEVHNAKTKPREEQFNSTYRVVSVLTVLHQDWLNGKEYKCKVSNKGLPSSIEKTISKAKGQPREPQVYTLPPSQEEMTKNQVSLTCLVKGFYPSDIAVEWESNGQPENNYKTTPPVLDSDGSFFLYSRLTVDKSRWQEGNVFSCSVMHEALHNHYTQKSLSLSLGGGGSGSAHPIPDSSPLLQFGGQVRQRYLYTDDACQTEAHLEIREDGTVGGAADQSPESLLQLKALKPGVIQILGVKTSRFLCQRPDGALYGSLHFDPEACSFRELLLEDGYNVYQSEAHGLPLHLPGCKSPHRDPAPRGPARFLPLPGLPPAPPEPPGILAPQPPDVGSSDPLSMVGSQGRSPSYAS

SEQ ID NO: 2995 - protein, 474 aa, Artificial Sequence
  Fusion Protein
HGEGTFTSDKSKQLEKRAVRLFYEWLKAGGHSKIKPPPKGGGGGGGSGGGGSGGGGSAESKYGPPCPPCPAPEFEGGPSVFLFPPKPKDTLMISRTPEVTCVVVDVSQEDPEVQFNWYVDGVEVHNAKTKPREEQFNSTYRVVSVLTVLHQDWLNGKEYKCKVSNKGLPSSIEKTISKAKGQPREPQVYTLPPSQEEMTKNQVSLTCLVKGFYPSDIAVEWESNGQPENNYKTTPPVLDSDGSFFLYSRLTVDKSRWQEGNVFSCSVMHEALHNHYTQKSLSLSLGGGGSGSAHPIPDSSPLLQFGGQVRQRYLYTDDACQTEAHLEIREDGTVGGAADQSPESLLQLKALKPGVIQILGVKTSRFLCQRPDGALYGSLHFDPEACSFRELLLEDGYNVYQSEAHGLPLHLPGCKSPHRDPAPRGPARFLPLPGLPPAPPEPPGILAPQPPDVGSSDPLSMVYPSQGRSPSYAS

SEQ ID NO: 2996 - protein, 473 aa, Artificial Sequence
  Fusion Protein
HGEGTFTSDKSKQLEKRAVRLFYEWLKAGGHSKIKPPPKGGGGGGGSGGGGSGGGGSAESKYGPPCPPCPAPEFEGGPSVFLFPPKPKDTLMISRTPEVTCVVVDVSQEDPEVQFNWYVDGVEVHNAKTKPREEQFNSTYRVVSVLTVLHQDWLNGKEYKCKVSNKGLPSSIEKTISKAKGQPREPQVYTLPPSQEEMTKNQVSLTCLVKGFYPSDIAVEWESNGQPENNYKTTPPVLDSDGSFFLYSRLTVDKSRWQEGNVFSCSVMHEALHNHYTQKSLSLSLGGGGSGSAHPIPDSSPLLQFGGQVRQRYLYTDDACQTEAHLEIREDGTVGGAADQSPESLLQLKALKPGVIQILGVKTSRFLCQRPDGALYGSLHFDPEACSFRELLLEDGYNVYQSEAHGLPLHLCGNKSPHRDPAPRGPARFLPLPGLPPAPPEPPGILAPQPPDVGSSDPLSMVGSQGRSPSYAS

SEQ ID NO: 2997 - protein, 474 aa, Artificial Sequence
  Fusion Protein
HGEGTFTSDKSKQLEKRAVRLFYEWLKAGGHSKIKPPPKGGGGGGGSGGGGSGGGGSAESKYGPPCPPCPAPEFEGGPSVFLFPPKPKDTLMISRTPEVTCVVVDVSQEDPEVQFNWYVDGVEVHNAKTKPREEQFNSTYRVVSVLTVLHQDWLNGKEYKCKVSNKGLPSSIEKTISKAKGQPREPQVYTLPPSQEEMTKNQVSLTCLVKGFYPSDIAVEWESNGQPENNYKTTPPVLDSDGSFFLYSRLTVDKSRWQEGNVFSCSVMHEALHNHYTQKSLSLSLGGGGSGSAHPIPDSSPLLQFGGQVRQRYLYTDDACQTEAHLEIREDGTVGGAADQSPESLLQLKALKPGVIQILGVKTSRFLCQRPDGALYGSLHFDPEACSFRELLLEDGYNVYQSEAHGLPLHLCGNKSPHRDPAPRGPARFLPLPGLPPAPPEPPGILAPQPPDVGSSDPLSMVYPSQGRSPSYAS

SEQ ID NO: 2998 - protein, 471 aa, Artificial Sequence
  Fusion Protein
HGEGTFTSDKSKQLEKRAVRLFFEWLKAGGHSSIKPPPKGGGGGGGSGGGGSGGGGSADKTHTCPPCPAPEAAGGPSVFLFPPKPKDTLMISRTPEVTCVVVDVSHEDPEVKFNWYVDGVEVHNAKTKPREEQYNSTYRVVSVLTVLHQDWLNGKEYKCKVSNKALPAPIEKTISKAKGQPREPQVYTLPPSRDELTKNQVSLTCLVKGFYPSDIAVEWESNGQPENNYKTTPPVLDSDGSFFLYSKLTVDKSRWQQGNVFSCSVMHEALHNHYTQKSLSLSPGGGGSGSAHPIPDSSPLLQFGGQVRQRYLYTDDACQTEAHLEIREDGTVGGAADQSPESLLQLKALKPGVIQILGVKTSRFLCQRPDGALYGSLHFDPEACSFRELLLEDGYNVYQSEAHGLPLHLPGCKSPHRDPAPRGPARFLPLPGLPPAPPEPPGILAPQPPDVGSSDPLSMVGSQGRSPSYAS

SEQ ID NO: 2999 - protein, 472 aa, Artificial Sequence
  Fusion Protein
HGEGTFTSDKSKQLEKRAVRLFFEWLKAGGHSSIKPPPKGGGGGGGSGGGGSGGGGSADKTHTCPPCPAPEAAGGPSVFLFPPKPKDTLMISRTPEVTCVVVDVSHEDPEVKFNWYVDGVEVHNAKTKPREEQYNSTYRVVSVLTVLHQDWLNGKEYKCKVSNKALPAPIEKTISKAKGQPREPQVYTLPPSRDELTKNQVSLTCLVKGFYPSDIAVEWESNGQPENNYKTTPPVLDSDGSFFLYSKLTVDKSRWQQGNVFSCSVMHEALHNHYTQKSLSLSPGGGGSGSAHPIPDSSPLLQFGGQVRQRYLYTDDACQTEAHLEIREDGTVGGAADQSPESLLQLKALKPGVIQILGVKTSRFLCQRPDGALYGSLHFDPEACSFRELLLEDGYNVYQSEAHGLPLHLPGCKSPHRDPAPRGPARFLPLPGLPPAPPEPPGILAPQPPDVGSSDPLSMVYPSQGRSPSYAS

SEQ ID NO: 3000 - protein, 471 aa, Artificial Sequence
  Fusion Protein
HGEGTFTSDKSKQLEKRAVRLFFEWLKAGGHSSIKPPPKGGGGGGGSGGGGSGGGGSADKTHTCPPCPAPEAAGGPSVFLFPPKPKDTLMISRTPEVTCVVVDVSHEDPEVKFNWYVDGVEVHNAKTKPREEQYNSTYRVVSVLTVLHQDWLNGKEYKCKVSNKALPAPIEKTISKAKGQPREPQVYTLPPSRDELTKNQVSLTCLVKGFYPSDIAVEWESNGQPENNYKTTPPVLDSDGSFFLYSKLTVDKSRWQQGNVFSCSVMHEALHNHYTQKSLSLSPGGGGSGSAHPIPDSSPLLQFGGQVRQRYLYTDDACQTEAHLEIREDGTVGGAADQSPESLLQLKALKPGVIQILGVKTSRFLCQRPDGALYGSLHFDPEACSFRELLLEDGYNVYQSEAHGLPLHLCGNKSPHRDPAPRGPARFLPLPGLPPAPPEPPGILAPQPPDVGSSDPLSMVGSQGRSPSYAS

SEQ ID NO: 3001 - protein, 472 aa, Artificial Sequence
  Fusion Protein
HGEGTFTSDKSKQLEKRAVRLFFEWLKAGGHSSIKPPPKGGGGGGGSGGGGSGGGGSADKTHTCPPCPAPEAAGGPSVFLFPPKPKDTLMISRTPEVTCVVVDVSHEDPEVKFNWYVDGVEVHNAKTKPREEQYNSTYRVVSVLTVLHQDWLNGKEYKCKVSNKALPAPIEKTISKAKGQPREPQVYTLPPSRDELTKNQVSLTCLVKGFYPSDIAVEWESNGQPENNYKTTPPVLDSDGSFFLYSKLTVDKSRWQQGNVFSCSVMHEALHNHYTQKSLSLSPGGGGSGSAHPIPDSSPLLQFGGQVRQRYLYTDDACQTEAHLEIREDGTVGGAADQSPESLLQLKALKPGVIQILGVKTSRFLCQRPDGALYGSLHFDPEACSFRELLLEDGYNVYQSEAHGLPLHLCGNKSPHRDPAPRGPARFLPLPGLPPAPPEPPGILAPQPPDVGSSDPLSMVYPSQGRSPSYAS

SEQ ID NO: 3002 - protein, 471 aa, Artificial Sequence
  Fusion Protein
HGEGTFTSDKSKQLEKRAVRLFFEWLKAGGHSSIKPPPKGGGGGGGSGGGGSGGGGSADKTHTCPPCPAPELLGGPSVFLFPPKPKDTLMISRTPEVTCVVVDVSHEDPEVKFNWYVDGVEVHNAKTKPREEQYNNASRVVSVLTVLHQDWLNGKEYKCKVSNKALPAPIEKTISKAKGQPREPQVYTLPPSRDELTKNQVSLTCLVKGFYPSDIAVEWESNGQPENNYKTTPPVLDSDGSFFLYSKLTVDKSRWQQGNVFSCSVMHEALHNHYTQKSLSLSPGGGGSGSAHPIPDSSPLLQFGGQVRQRYLYTDDACQTEAHLEIREDGTVGGAADQSPESLLQLKALKPGVIQILGVKTSRFLCQRPDGALYGSLHFDPEACSFRELLLEDGYNVYQSEAHGLPLHLPGCKSPHRDPAPRGPARFLPLPGLPPAPPEPPGILAPQPPDVGSSDPLSMVGSQGRSPSYAS

SEQ ID NO: 3003 - protein, 472 aa, Artificial Sequence
  Fusion Protein
HGEGTFTSDKSKQLEKRAVRLFFEWLKAGGHSSIKPPPKGGGGGGGSGGGGSGGGGSADKTHTCPPCPAPELLGGPSVFLFPPKPKDTLMISRTPEVTCVVVDVSHEDPEVKFNWYVDGVEVHNAKTKPREEQYNNASRVVSVLTVLHQDWLNGKEYKCKVSNKALPAPIEKTISKAKGQPREPQVYTLPPSRDELTKNQVSLTCLVKGFYPSDIAVEWESNGQPENNYKTTPPVLDSDGSFFLYSKLTVDKSRWQQGNVFSCSVMHEALHNHYTQKSLSLSPGGGGSGSAHPIPDSSPLLQFGGQVRQRYLYTDDACQTEAHLEIREDGTVGGAADQSPESLLQLKALKPGVIQILGVKTSRFLCQRPDGALYGSLHFDPEACSFRELLLEDGYNVYQSEAHGLPLHLPGCKSPHRDPAPRGPARFLPLPGLPPAPPEPPGILAPQPPDVGSSDPLSMVYPSQGRSPSYAS

SEQ ID NO: 3004 - protein, 471 aa, Artificial Sequence
  Fusion Protein
HGEGTFTSDKSKQLEKRAVRLFFEWLKAGGHSSIKPPPKGGGGGGGSGGGGSGGGGSADKTHTCPPCPAPELLGGPSVFLFPPKPKDTLMISRTPEVTCVVVDVSHEDPEVKFNWYVDGVEVHNAKTKPREEQYNNASRVVSVLTVLHQDWLNGKEYKCKVSNKALPAPIEKTISKAKGQPREPQVYTLPPSRDELTKNQVSLTCLVKGFYPSDIAVEWESNGQPENNYKTTPPVLDSDGSFFLYSKLTVDKSRWQQGNVFSCSVMHEALHNHYTQKSLSLSPGGGGSGSAHPIPDSSPLLQFGGQVRQRYLYTDDACQTEAHLEIREDGTVGGAADQSPESLLQLKALKPGVIQILGVKTSRFLCQRPDGALYGSLHFDPEACSFRELLLEDGYNVYQSEAHGLPLHLCGNKSPHRDPAPRGPARFLPLPGLPPAPPEPPGILAPQPPDVGSSDPLSMVGSQGRSPSYAS

SEQ ID NO: 3005 - protein, 472 aa, Artificial Sequence
  Fusion Protein
HGEGTFTSDKSKQLEKRAVRLFFEWLKAGGHSSIKPPPKGGGGGGGSGGGGSGGGGSADKTHTCPPCPAPELLGGPSVFLFPPKPKDTLMISRTPEVTCVVVDVSHEDPEVKFNWYVDGVEVHNAKTKPREEQYNNASRVVSVLTVLHQDWLNGKEYKCKVSNKALPAPIEKTISKAKGQPREPQVYTLPPSRDELTKNQVSLTCLVKGFYPSDIAVEWESNGQPENNYKTTPPVLDSDGSFFLYSKLTVDKSRWQQGNVFSCSVMHEALHNHYTQKSLSLSPGGGGSGSAHPIPDSSPLLQFGGQVRQRYLYTDDACQTEAHLEIREDGTVGGAADQSPESLLQLKALKPGVIQILGVKTSRFLCQRPDGALYGSLHFDPEACSFRELLLEDGYNVYQSEAHGLPLHLCGNKSPHRDPAPRGPARFLPLPGLPPAPPEPPGILAPQPPDVGSSDPLSMVYPSQGRSPSYAS

SEQ ID NO: 3006 - protein, 473 aa, Artificial Sequence
  Fusion Protein
HGEGTFTSDKSKQLEKRAVRLFFEWLKAGGHSSIKPPPKGGGGGGGSGGGGSGGGGSAESKYGPPCPPCPAPEFEGGPSVFLFPPKPKDTLMISRTPEVTCVVVDVSQEDPEVQFNWYVDGVEVHNAKTKPREEQFNSTYRVVSVLTVLHQDWLNGKEYKCKVSNKGLPSSIEKTISKAKGQPREPQVYTLPPSQEEMTKNQVSLTCLVKGFYPSDIAVEWESNGQPENNYKTTPPVLDSDGSFFLYSRLTVDKSRWQEGNVFSCSVMHEALHNHYTQKSLSLSLGGGGSGSAHPIPDSSPLLQFGGQVRQRYLYTDDACQTEAHLEIREDGTVGGAADQSPESLLQLKALKPGVIQILGVKTSRFLCQRPDGALYGSLHFDPEACSFRELLLEDGYNVYQSEAHGLPLHLPGCKSPHRDPAPRGPARFLPLPGLPPAPPEPPGILAPQPPDVGSSDPLSMVGSQGRSPSYAS

SEQ ID NO: 3007 - protein, 474 aa, Artificial Sequence
  Fusion Protein
HGEGTFTSDKSKQLEKRAVRLFFEWLKAGGHSSIKPPPKGGGGGGGSGGGGSGGGGSAESKYGPPCPPCPAPEFEGGPSVFLFPPKPKDTLMISRTPEVTCVVVDVSQEDPEVQFNWYVDGVEVHNAKTKPREEQFNSTYRVVSVLTVLHQDWLNGKEYKCKVSNKGLPSSIEKTISKAKGQPREPQVYTLPPSQEEMTKNQVSLTCLVKGFYPSDIAVEWESNGQPENNYKTTPPVLDSDGSFFLYSRLTVDKSRWQEGNVFSCSVMHEALHNHYTQKSLSLSLGGGGSGSAHPIPDSSPLLQFGGQVRQRYLYTDDACQTEAHLEIREDGTVGGAADQSPESLLQLKALKPGVIQILGVKTSRFLCQRPDGALYGSLHFDPEACSFRELLLEDGYNVYQSEAHGLPLHLPGCKSPHRDPAPRGPARFLPLPGLPPAPPEPPGILAPQPPDVGSSDPLSMVYPSQGRSPSYAS

SEQ ID NO: 3008 - protein, 473 aa, Artificial Sequence
  Fusion Protein
HGEGTFTSDKSKQLEKRAVRLFFEWLKAGGHSSIKPPPKGGGGGGGSGGGGSGGGGSAESKYGPPCPPCPAPEFEGGPSVFLFPPKPKDTLMISRTPEVTCVVVDVSQEDPEVQFNWYVDGVEVHNAKTKPREEQFNSTYRVVSVLTVLHQDWLNGKEYKCKVSNKGLPSSIEKTISKAKGQPREPQVYTLPPSQEEMTKNQVSLTCLVKGFYPSDIAVEWESNGQPENNYKTTPPVLDSDGSFFLYSRLTVDKSRWQEGNVFSCSVMHEALHNHYTQKSLSLSLGGGGSGSAHPIPDSSPLLQFGGQVRQRYLYTDDACQTEAHLEIREDGTVGGAADQSPESLLQLKALKPGVIQILGVKTSRFLCQRPDGALYGSLHFDPEACSFRELLLEDGYNVYQSEAHGLPLHLCGNKSPHRDPAPRGPARFLPLPGLPPAPPEPPGILAPQPPDVGSSDPLSMVGSQGRSPSYAS

SEQ ID NO: 3009 - protein, 474 aa, Artificial Sequence
  Fusion Protein
HGEGTFTSDKSKQLEKRAVRLFFEWLKAGGHSSIKPPPKGGGGGGGSGGGGSGGGGSAESKYGPPCPPCPAPEFEGGPSVFLFPPKPKDTLMISRTPEVTCVVVDVSQEDPEVQFNWYVDGVEVHNAKTKPREEQFNSTYRVVSVLTVLHQDWLNGKEYKCKVSNKGLPSSIEKTISKAKGQPREPQVYTLPPSQEEMTKNQVSLTCLVKGFYPSDIAVEWESNGQPENNYKTTPPVLDSDGSFFLYSRLTVDKSRWQEGNVFSCSVMHEALHNHYTQKSLSLSLGGGGSGSAHPIPDSSPLLQFGGQVRQRYLYTDDACQTEAHLEIREDGTVGGAADQSPESLLQLKALKPGVIQILGVKTSRFLCQRPDGALYGSLHFDPEACSFRELLLEDGYNVYQSEAHGLPLHLCGNKSPHRDPAPRGPARFLPLPGLPPAPPEPPGILAPQPPDVGSSDPLSMVYPSQGRSPSYAS

SEQ ID NO: 3010 - protein, 471 aa, Artificial Sequence
  Fusion Protein
HGEGTFTSDKSKQLEKRLARLFYEWLLAGGHSKIKPPPKGGGGGGGSGGGGSGGGGSADKTHTCPPCPAPEAAGGPSVFLFPPKPKDTLMISRTPEVTCVVVDVSHEDPEVKFNWYVDGVEVHNAKTKPREEQYNSTYRVVSVLTVLHQDWLNGKEYKCKVSNKALPAPIEKTISKAKGQPREPQVYTLPPSRDELTKNQVSLTCLVKGFYPSDIAVEWESNGQPENNYKTTPPVLDSDGSFFLYSKLTVDKSRWQQGNVFSCSVMHEALHNHYTQKSLSLSPGGGGSGSAHPIPDSSPLLQFGGQVRQRYLYTDDACQTEAHLEIREDGTVGGAADQSPESLLQLKALKPGVIQILGVKTSRFLCQRPDGALYGSLHFDPEACSFRELLLEDGYNVYQSEAHGLPLHLPGCKSPHRDPAPRGPARFLPLPGLPPAPPEPPGILAPQPPDVGSSDPLSMVGSQGRSPSYAS

SEQ ID NO: 3011 - protein, 472 aa, Artificial Sequence
  Fusion Protein
HGEGTFTSDKSKQLEKRLARLFYEWLLAGGHSKIKPPPKGGGGGGGSGGGGSGGGGSADKTHTCPPCPAPEAAGGPSVFLFPPKPKDTLMISRTPEVTCVVVDVSHEDPEVKFNWYVDGVEVHNAKTKPREEQYNSTYRVVSVLTVLHQDWLNGKEYKCKVSNKALPAPIEKTISKAKGQPREPQVYTLPPSRDELTKNQVSLTCLVKGFYPSDIAVEWESNGQPENNYKTTPPVLDSDGSFFLYSKLTVDKSRWQQGNVFSCSVMHEALHNHYTQKSLSLSPGGGGSGSAHPIPDSSPLLQFGGQVRQRYLYTDDACQTEAHLEIREDGTVGGAADQSPESLLQLKALKPGVIQILGVKTSRFLCQRPDGALYGSLHFDPEACSFRELLLEDGYNVYQSEAHGLPLHLPGCKSPHRDPAPRGPARFLPLPGLPPAPPEPPGILAPQPPDVGSSDPLSMVYPSQGRSPSYAS

SEQ ID NO: 3012 - protein, 471 aa, Artificial Sequence
  Fusion Protein
HGEGTFTSDKSKQLEKRLARLFYEWLLAGGHSKIKPPPKGGGGGGGSGGGGSGGGGSADKTHTCPPCPAPEAAGGPSVFLFPPKPKDTLMISRTPEVTCVVVDVSHEDPEVKFNWYVDGVEVHNAKTKPREEQYNSTYRVVSVLTVLHQDWLNGKEYKCKVSNKALPAPIEKTISKAKGQPREPQVYTLPPSRDELTKNQVSLTCLVKGFYPSDIAVEWESNGQPENNYKTTPPVLDSDGSFFLYSKLTVDKSRWQQGNVFSCSVMHEALHNHYTQKSLSLSPGGGGSGSAHPIPDSSPLLQFGGQVRQRYLYTDDACQTEAHLEIREDGTVGGAADQSPESLLQLKALKPGVIQILGVKTSRFLCQRPDGALYGSLHFDPEACSFRELLLEDGYNVYQSEAHGLPLHLCGNKSPHRDPAPRGPARFLPLPGLPPAPPEPPGILAPQPPDVGSSDPLSMVGSQGRSPSYAS

SEQ ID NO: 3013 - protein, 472 aa, Artificial Sequence
  Fusion Protein
HGEGTFTSDKSKQLEKRLARLFYEWLLAGGHSKIKPPPKGGGGGGGSGGGGSGGGGSADKTHTCPPCPAPEAAGGPSVFLFPPKPKDTLMISRTPEVTCVVVDVSHEDPEVKFNWYVDGVEVHNAKTKPREEQYNSTYRVVSVLTVLHQDWLNGKEYKCKVSNKALPAPIEKTISKAKGQPREPQVYTLPPSRDELTKNQVSLTCLVKGFYPSDIAVEWESNGQPENNYKTTPPVLDSDGSFFLYSKLTVDKSRWQQGNVFSCSVMHEALHNHYTQKSLSLSPGGGGSGSAHPIPDSSPLLQFGGQVRQRYLYTDDACQTEAHLEIREDGTVGGAADQSPESLLQLKALKPGVIQILGVKTSRFLCQRPDGALYGSLHFDPEACSFRELLLEDGYNVYQSEAHGLPLHLCGNKSPHRDPAPRGPARFLPLPGLPPAPPEPPGILAPQPPDVGSSDPLSMVYPSQGRSPSYAS

SEQ ID NO: 3014 - protein, 471 aa, Artificial Sequence
  Fusion Protein
HGEGTFTSDKSKQLEKRLARLFYEWLLAGGHSKIKPPPKGGGGGGGSGGGGSGGGGSADKTHTCPPCPAPELLGGPSVFLFPPKPKDTLMISRTPEVTCVVVDVSHEDPEVKFNWYVDGVEVHNAKTKPREEQYNNASRVVSVLTVLHQDWLNGKEYKCKVSNKALPAPIEKTISKAKGQPREPQVYTLPPSRDELTKNQVSLTCLVKGFYPSDIAVEWESNGQPENNYKTTPPVLDSDGSFFLYSKLTVDKSRWQQGNVFSCSVMHEALHNHYTQKSLSLSPGGGGSGSAHPIPDSSPLLQFGGQVRQRYLYTDDACQTEAHLEIREDGTVGGAADQSPESLLQLKALKPGVIQILGVKTSRFLCQRPDGALYGSLHFDPEACSFRELLLEDGYNVYQSEAHGLPLHLPGCKSPHRDPAPRGPARFLPLPGLPPAPPEPPGILAPQPPDVGSSDPLSMVGSQGRSPSYAS

SEQ ID NO: 3015 - protein, 472 aa, Artificial Sequence
  Fusion Protein
HGEGTFTSDKSKQLEKRLARLFYEWLLAGGHSKIKPPPKGGGGGGGSGGGGSGGGGSADKTHTCPPCPAPELLGGPSVFLFPPKPKDTLMISRTPEVTCVVVDVSHEDPEVKFNWYVDGVEVHNAKTKPREEQYNNASRVVSVLTVLHQDWLNGKEYKCKVSNKALPAPIEKTISKAKGQPREPQVYTLPPSRDELTKNQVSLTCLVKGFYPSDIAVEWESNGQPENNYKTTPPVLDSDGSFFLYSKLTVDKSRWQQGNVFSCSVMHEALHNHYTQKSLSLSPGGGGSGSAHPIPDSSPLLQFGGQVRQRYLYTDDACQTEAHLEIREDGTVGGAADQSPESLLQLKALKPGVIQILGVKTSRFLCQRPDGALYGSLHFDPEACSFRELLLEDGYNVYQSEAHGLPLHLPGCKSPHRDPAPRGPARFLPLPGLPPAPPEPPGILAPQPPDVGSSDPLSMVYPSQGRSPSYAS

SEQ ID NO: 3016 - protein, 471 aa, Artificial Sequence
  Fusion Protein
HGEGTFTSDKSKQLEKRLARLFYEWLLAGGHSKIKPPPKGGGGGGGSGGGGSGGGGSADKTHTCPPCPAPELLGGPSVFLFPPKPKDTLMISRTPEVTCVVVDVSHEDPEVKFNWYVDGVEVHNAKTKPREEQYNNASRVVSVLTVLHQDWLNGKEYKCKVSNKALPAPIEKTISKAKGQPREPQVYTLPPSRDELTKNQVSLTCLVKGFYPSDIAVEWESNGQPENNYKTTPPVLDSDGSFFLYSKLTVDKSRWQQGNVFSCSVMHEALHNHYTQKSLSLSPGGGGSGSAHPIPDSSPLLQFGGQVRQRYLYTDDACQTEAHLEIREDGTVGGAADQSPESLLQLKALKPGVIQILGVKTSRFLCQRPDGALYGSLHFDPEACSFRELLLEDGYNVYQSEAHGLPLHLCGNKSPHRDPAPRGPARFLPLPGLPPAPPEPPGILAPQPPDVGSSDPLSMVGSQGRSPSYAS

SEQ ID NO: 3017 - protein, 472 aa, Artificial Sequence
  Fusion Protein
HGEGTFTSDKSKQLEKRLARLFYEWLLAGGHSKIKPPPKGGGGGGGSGGGGSGGGGSADKTHTCPPCPAPELLGGPSVFLFPPKPKDTLMISRTPEVTCVVVDVSHEDPEVKFNWYVDGVEVHNAKTKPREEQYNNASRVVSVLTVLHQDWLNGKEYKCKVSNKALPAPIEKTISKAKGQPREPQVYTLPPSRDELTKNQVSLTCLVKGFYPSDIAVEWESNGQPENNYKTTPPVLDSDGSFFLYSKLTVDKSRWQQGNVFSCSVMHEALHNHYTQKSLSLSPGGGGSGSAHPIPDSSPLLQFGGQVRQRYLYTDDACQTEAHLEIREDGTVGGAADQSPESLLQLKALKPGVIQILGVKTSRFLCQRPDGALYGSLHFDPEACSFRELLLEDGYNVYQSEAHGLPLHLCGNKSPHRDPAPRGPARFLPLPGLPPAPPEPPGILAPQPPDVGSSDPLSMVYPSQGRSPSYAS

SEQ ID NO: 3018 - protein, 473 aa, Artificial Sequence
  Fusion Protein
HGEGTFTSDKSKQLEKRLARLFYEWLLAGGHSKIKPPPKGGGGGGGSGGGGSGGGGSAESKYGPPCPPCPAPEFEGGPSVFLFPPKPKDTLMISRTPEVTCVVVDVSQEDPEVQFNWYVDGVEVHNAKTKPREEQFNSTYRVVSVLTVLHQDWLNGKEYKCKVSNKGLPSSIEKTISKAKGQPREPQVYTLPPSQEEMTKNQVSLTCLVKGFYPSDIAVEWESNGQPENNYKTTPPVLDSDGSFFLYSRLTVDKSRWQEGNVFSCSVMHEALHNHYTQKSLSLSLGGGGSGSAHPIPDSSPLLQFGGQVRQRYLYTDDACQTEAHLEIREDGTVGGAADQSPESLLQLKALKPGVIQILGVKTSRFLCQRPDGALYGSLHFDPEACSFRELLLEDGYNVYQSEAHGLPLHLPGCKSPHRDPAPRGPARFLPLPGLPPAPPEPPGILAPQPPDVGSSDPLSMVGSQGRSPSYAS

SEQ ID NO: 3019 - protein, 474 aa, Artificial Sequence
  Fusion Protein
HGEGTFTSDKSKQLEKRLARLFYEWLLAGGHSKIKPPPKGGGGGGGSGGGGSGGGGSAESKYGPPCPPCPAPEFEGGPSVFLFPPKPKDTLMISRTPEVTCVVVDVSQEDPEVQFNWYVDGVEVHNAKTKPREEQFNSTYRVVSVLTVLHQDWLNGKEYKCKVSNKGLPSSIEKTISKAKGQPREPQVYTLPPSQEEMTKNQVSLTCLVKGFYPSDIAVEWESNGQPENNYKTTPPVLDSDGSFFLYSRLTVDKSRWQEGNVFSCSVMHEALHNHYTQKSLSLSLGGGGSGSAHPIPDSSPLLQFGGQVRQRYLYTDDACQTEAHLEIREDGTVGGAADQSPESLLQLKALKPGVIQILGVKTSRFLCQRPDGALYGSLHFDPEACSFRELLLEDGYNVYQSEAHGLPLHLPGCKSPHRDPAPRGPARFLPLPGLPPAPPEPPGILAPQPPDVGSSDPLSMVYPSQGRSPSYAS

SEQ ID NO: 3020 - protein, 473 aa, Artificial Sequence
  Fusion Protein
HGEGTFTSDKSKQLEKRLARLFYEWLLAGGHSKIKPPPKGGGGGGGSGGGGSGGGGSAESKYGPPCPPCPAPEFEGGPSVFLFPPKPKDTLMISRTPEVTCVVVDVSQEDPEVQFNWYVDGVEVHNAKTKPREEQFNSTYRVVSVLTVLHQDWLNGKEYKCKVSNKGLPSSIEKTISKAKGQPREPQVYTLPPSQEEMTKNQVSLTCLVKGFYPSDIAVEWESNGQPENNYKTTPPVLDSDGSFFLYSRLTVDKSRWQEGNVFSCSVMHEALHNHYTQKSLSLSLGGGGSGSAHPIPDSSPLLQFGGQVRQRYLYTDDACQTEAHLEIREDGTVGGAADQSPESLLQLKALKPGVIQILGVKTSRFLCQRPDGALYGSLHFDPEACSFRELLLEDGYNVYQSEAHGLPLHLCGNKSPHRDPAPRGPARFLPLPGLPPAPPEPPGILAPQPPDVGSSDPLSMVGSQGRSPSYAS

SEQ ID NO: 3021 - protein, 474 aa, Artificial Sequence
  Fusion Protein
HGEGTFTSDKSKQLEKRLARLFYEWLLAGGHSKIKPPPKGGGGGGGSGGGGSGGGGSAESKYGPPCPPCPAPEFEGGPSVFLFPPKPKDTLMISRTPEVTCVVVDVSQEDPEVQFNWYVDGVEVHNAKTKPREEQFNSTYRVVSVLTVLHQDWLNGKEYKCKVSNKGLPSSIEKTISKAKGQPREPQVYTLPPSQEEMTKNQVSLTCLVKGFYPSDIAVEWESNGQPENNYKTTPPVLDSDGSFFLYSRLTVDKSRWQEGNVFSCSVMHEALHNHYTQKSLSLSLGGGGSGSAHPIPDSSPLLQFGGQVRQRYLYTDDACQTEAHLEIREDGTVGGAADQSPESLLQLKALKPGVIQILGVKTSRFLCQRPDGALYGSLHFDPEACSFRELLLEDGYNVYQSEAHGLPLHLCGNKSPHRDPAPRGPARFLPLPGLPPAPPEPPGILAPQPPDVGSSDPLSMVYPSQGRSPSYAS

SEQ ID NO: 3022 - protein, 471 aa, Artificial Sequence
  Fusion Protein
HGEGTFTSDKSKQLEKRLARLFYEWLKAGGHSSIRPPPKGGGGGGGSGGGGSGGGGSADKTHTCPPCPAPEAAGGPSVFLFPPKPKDTLMISRTPEVTCVVVDVSHEDPEVKFNWYVDGVEVHNAKTKPREEQYNSTYRVVSVLTVLHQDWLNGKEYKCKVSNKALPAPIEKTISKAKGQPREPQVYTLPPSRDELTKNQVSLTCLVKGFYPSDIAVEWESNGQPENNYKTTPPVLDSDGSFFLYSKLTVDKSRWQQGNVFSCSVMHEALHNHYTQKSLSLSPGGGGSGSAHPIPDSSPLLQFGGQVRQRYLYTDDACQTEAHLEIREDGTVGGAADQSPESLLQLKALKPGVIQILGVKTSRFLCQRPDGALYGSLHFDPEACSFRELLLEDGYNVYQSEAHGLPLHLPGCKSPHRDPAPRGPARFLPLPGLPPAPPEPPGILAPQPPDVGSSDPLSMVGSQGRSPSYAS

SEQ ID NO: 3023 - protein, 472 aa, Artificial Sequence
  Fusion Protein
HGEGTFTSDKSKQLEKRLARLFYEWLKAGGHSSIRPPPKGGGGGGGSGGGGSGGGGSADKTHTCPPCPAPEAAGGPSVFLFPPKPKDTLMISRTPEVTCVVVDVSHEDPEVKFNWYVDGVEVHNAKTKPREEQYNSTYRVVSVLTVLHQDWLNGKEYKCKVSNKALPAPIEKTISKAKGQPREPQVYTLPPSRDELTKNQVSLTCLVKGFYPSDIAVEWESNGQPENNYKTTPPVLDSDGSFFLYSKLTVDKSRWQQGNVFSCSVMHEALHNHYTQKSLSLSPGGGGSGSAHPIPDSSPLLQFGGQVRQRYLYTDDACQTEAHLEIREDGTVGGAADQSPESLLQLKALKPGVIQILGVKTSRFLCQRPDGALYGSLHFDPEACSFRELLLEDGYNVYQSEAHGLPLHLPGCKSPHRDPAPRGPARFLPLPGLPPAPPEPPGILAPQPPDVGSSDPLSMVYPSQGRSPSYAS

SEQ ID NO: 3024 - protein, 471 aa, Artificial Sequence
  Fusion Protein
HGEGTFTSDKSKQLEKRLARLFYEWLKAGGHSSIRPPPKGGGGGGGSGGGGSGGGGSADKTHTCPPCPAPEAAGGPSVFLFPPKPKDTLMISRTPEVTCVVVDVSHEDPEVKFNWYVDGVEVHNAKTKPREEQYNSTYRVVSVLTVLHQDWLNGKEYKCKVSNKALPAPIEKTISKAKGQPREPQVYTLPPSRDELTKNQVSLTCLVKGFYPSDIAVEWESNGQPENNYKTTPPVLDSDGSFFLYSKLTVDKSRWQQGNVFSCSVMHEALHNHYTQKSLSLSPGGGGSGSAHPIPDSSPLLQFGGQVRQRYLYTDDACQTEAHLEIREDGTVGGAADQSPESLLQLKALKPGVIQILGVKTSRFLCQRPDGALYGSLHFDPEACSFRELLLEDGYNVYQSEAHGLPLHLCGNKSPHRDPAPRGPARFLPLPGLPPAPPEPPGILAPQPPDVGSSDPLSMVGSQGRSPSYAS

SEQ ID NO: 3025 - protein, 472 aa, Artificial Sequence
  Fusion Protein
HGEGTFTSDKSKQLEKRLARLFYEWLKAGGHSSIRPPPKGGGGGGGSGGGGSGGGGSADKTHTCPPCPAPEAAGGPSVFLFPPKPKDTLMISRTPEVTCVVVDVSHEDPEVKFNWYVDGVEVHNAKTKPREEQYNSTYRVVSVLTVLHQDWLNGKEYKCKVSNKALPAPIEKTISKAKGQPREPQVYTLPPSRDELTKNQVSLTCLVKGFYPSDIAVEWESNGQPENNYKTTPPVLDSDGSFFLYSKLTVDKSRWQQGNVFSCSVMHEALHNHYTQKSLSLSPGGGGSGSAHPIPDSSPLLQFGGQVRQRYLYTDDACQTEAHLEIREDGTVGGAADQSPESLLQLKALKPGVIQILGVKTSRFLCQRPDGALYGSLHFDPEACSFRELLLEDGYNVYQSEAHGLPLHLCGNKSPHRDPAPRGPARFLPLPGLPPAPPEPPGILAPQPPDVGSSDPLSMVYPSQGRSPSYAS

SEQ ID NO: 3026 - protein, 471 aa, Artificial Sequence
  Fusion Protein
HGEGTFTSDKSKQLEKRLARLFYEWLKAGGHSSIRPPPKGGGGGGGSGGGGSGGGGSADKTHTCPPCPAPELLGGPSVFLFPPKPKDTLMISRTPEVTCVVVDVSHEDPEVKFNWYVDGVEVHNAKTKPREEQYNNASRVVSVLTVLHQDWLNGKEYKCKVSNKALPAPIEKTISKAKGQPREPQVYTLPPSRDELTKNQVSLTCLVKGFYPSDIAVEWESNGQPENNYKTTPPVLDSDGSFFLYSKLTVDKSRWQQGNVFSCSVMHEALHNHYTQKSLSLSPGGGGSGSAHPIPDSSPLLQFGGQVRQRYLYTDDACQTEAHLEIREDGTVGGAADQSPESLLQLKALKPGVIQILGVKTSRFLCQRPDGALYGSLHFDPEACSFRELLLEDGYNVYQSEAHGLPLHLPGCKSPHRDPAPRGPARFLPLPGLPPAPPEPPGILAPQPPDVGSSDPLSMVGSQGRSPSYAS

SEQ ID NO: 3027 - protein, 472 aa, Artificial Sequence
  Fusion Protein
HGEGTFTSDKSKQLEKRLARLFYEWLKAGGHSSIRPPPKGGGGGGGSGGGGSGGGGSADKTHTCPPCPAPELLGGPSVFLFPPKPKDTLMISRTPEVTCVVVDVSHEDPEVKFNWYVDGVEVHNAKTKPREEQYNNASRVVSVLTVLHQDWLNGKEYKCKVSNKALPAPIEKTISKAKGQPREPQVYTLPPSRDELTKNQVSLTCLVKGFYPSDIAVEWESNGQPENNYKTTPPVLDSDGSFFLYSKLTVDKSRWQQGNVFSCSVMHEALHNHYTQKSLSLSPGGGGSGSAHPIPDSSPLLQFGGQVRQRYLYTDDACQTEAHLEIREDGTVGGAADQSPESLLQLKALKPGVIQILGVKTSRFLCQRPDGALYGSLHFDPEACSFRELLLEDGYNVYQSEAHGLPLHLPGCKSPHRDPAPRGPARFLPLPGLPPAPPEPPGILAPQPPDVGSSDPLSMVYPSQGRSPSYAS

SEQ ID NO: 3028 - protein, 471 aa, Artificial Sequence
  Fusion Protein
HGEGTFTSDKSKQLEKRLARLFYEWLKAGGHSSIRPPPKGGGGGGGSGGGGSGGGGSADKTHTCPPCPAPELLGGPSVFLFPPKPKDTLMISRTPEVTCVVVDVSHEDPEVKFNWYVDGVEVHNAKTKPREEQYNNASRVVSVLTVLHQDWLNGKEYKCKVSNKALPAPIEKTISKAKGQPREPQVYTLPPSRDELTKNQVSLTCLVKGFYPSDIAVEWESNGQPENNYKTTPPVLDSDGSFFLYSKLTVDKSRWQQGNVFSCSVMHEALHNHYTQKSLSLSPGGGGSGSAHPIPDSSPLLQFGGQVRQRYLYTDDACQTEAHLEIREDGTVGGAADQSPESLLQLKALKPGVIQILGVKTSRFLCQRPDGALYGSLHFDPEACSFRELLLEDGYNVYQSEAHGLPLHLCGNKSPHRDPAPRGPARFLPLPGLPPAPPEPPGILAPQPPDVGSSDPLSMVGSQGRSPSYAS

SEQ ID NO: 3029 - protein, 472 aa, Artificial Sequence
  Fusion Protein
HGEGTFTSDKSKQLEKRLARLFYEWLKAGGHSSIRPPPKGGGGGGGSGGGGSGGGGSADKTHTCPPCPAPELLGGPSVFLFPPKPKDTLMISRTPEVTCVVVDVSHEDPEVKFNWYVDGVEVHNAKTKPREEQYNNASRVVSVLTVLHQDWLNGKEYKCKVSNKALPAPIEKTISKAKGQPREPQVYTLPPSRDELTKNQVSLTCLVKGFYPSDIAVEWESNGQPENNYKTTPPVLDSDGSFFLYSKLTVDKSRWQQGNVFSCSVMHEALHNHYTQKSLSLSPGGGGSGSAHPIPDSSPLLQFGGQVRQRYLYTDDACQTEAHLEIREDGTVGGAADQSPESLLQLKALKPGVIQILGVKTSRFLCQRPDGALYGSLHFDPEACSFRELLLEDGYNVYQSEAHGLPLHLCGNKSPHRDPAPRGPARFLPLPGLPPAPPEPPGILAPQPPDVGSSDPLSMVYPSQGRSPSYAS

SEQ ID NO: 3030 - protein, 473 aa, Artificial Sequence
  Fusion Protein
HGEGTFTSDKSKQLEKRLARLFYEWLKAGGHSSIRPPPKGGGGGGGSGGGGSGGGGSAESKYGPPCPPCPAPEFEGGPSVFLFPPKPKDTLMISRTPEVTCVVVDVSQEDPEVQFNWYVDGVEVHNAKTKPREEQFNSTYRVVSVLTVLHQDWLNGKEYKCKVSNKGLPSSIEKTISKAKGQPREPQVYTLPPSQEEMTKNQVSLTCLVKGFYPSDIAVEWESNGQPENNYKTTPPVLDSDGSFFLYSRLTVDKSRWQEGNVFSCSVMHEALHNHYTQKSLSLSLGGGGSGSAHPIPDSSPLLQFGGQVRQRYLYTDDACQTEAHLEIREDGTVGGAADQSPESLLQLKALKPGVIQILGVKTSRFLCQRPDGALYGSLHFDPEACSFRELLLEDGYNVYQSEAHGLPLHLPGCKSPHRDPAPRGPARFLPLPGLPPAPPEPPGILAPQPPDVGSSDPLSMVGSQGRSPSYAS

SEQ ID NO: 3031 - protein, 474 aa, Artificial Sequence
  Fusion Protein
HGEGTFTSDKSKQLEKRLARLFYEWLKAGGHSSIRPPPKGGGGGGGSGGGGSGGGGSAESKYGPPCPPCPAPEFEGGPSVFLFPPKPKDTLMISRTPEVTCVVVDVSQEDPEVQFNWYVDGVEVHNAKTKPREEQFNSTYRVVSVLTVLHQDWLNGKEYKCKVSNKGLPSSIEKTISKAKGQPREPQVYTLPPSQEEMTKNQVSLTCLVKGFYPSDIAVEWESNGQPENNYKTTPPVLDSDGSFFLYSRLTVDKSRWQEGNVFSCSVMHEALHNHYTQKSLSLSLGGGGSGSAHPIPDSSPLLQFGGQVRQRYLYTDDACQTEAHLEIREDGTVGGAADQSPESLLQLKALKPGVIQILGVKTSRFLCQRPDGALYGSLHFDPEACSFRELLLEDGYNVYQSEAHGLPLHLPGCKSPHRDPAPRGPARFLPLPGLPPAPPEPPGILAPQPPDVGSSDPLSMVYPSQGRSPSYAS

SEQ ID NO: 3032 - protein, 473 aa, Artificial Sequence
  Fusion Protein
HGEGTFTSDKSKQLEKRLARLFYEWLKAGGHSSIRPPPKGGGGGGGSGGGGSGGGGSAESKYGPPCPPCPAPEFEGGPSVFLFPPKPKDTLMISRTPEVTCVVVDVSQEDPEVQFNWYVDGVEVHNAKTKPREEQFNSTYRVVSVLTVLHQDWLNGKEYKCKVSNKGLPSSIEKTISKAKGQPREPQVYTLPPSQEEMTKNQVSLTCLVKGFYPSDIAVEWESNGQPENNYKTTPPVLDSDGSFFLYSRLTVDKSRWQEGNVFSCSVMHEALHNHYTQKSLSLSLGGGGSGSAHPIPDSSPLLQFGGQVRQRYLYTDDACQTEAHLEIREDGTVGGAADQSPESLLQLKALKPGVIQILGVKTSRFLCQRPDGALYGSLHFDPEACSFRELLLEDGYNVYQSEAHGLPLHLCGNKSPHRDPAPRGPARFLPLPGLPPAPPEPPGILAPQPPDVGSSDPLSMVGSQGRSPSYAS

SEQ ID NO: 3033 - protein, 474 aa, Artificial Sequence
  Fusion Protein
HGEGTFTSDKSKQLEKRLARLFYEWLKAGGHSSIRPPPKGGGGGGGSGGGGSGGGGSAESKYGPPCPPCPAPEFEGGPSVFLFPPKPKDTLMISRTPEVTCVVVDVSQEDPEVQFNWYVDGVEVHNAKTKPREEQFNSTYRVVSVLTVLHQDWLNGKEYKCKVSNKGLPSSIEKTISKAKGQPREPQVYTLPPSQEEMTKNQVSLTCLVKGFYPSDIAVEWESNGQPENNYKTTPPVLDSDGSFFLYSRLTVDKSRWQEGNVFSCSVMHEALHNHYTQKSLSLSLGGGGSGSAHPIPDSSPLLQFGGQVRQRYLYTDDACQTEAHLEIREDGTVGGAADQSPESLLQLKALKPGVIQILGVKTSRFLCQRPDGALYGSLHFDPEACSFRELLLEDGYNVYQSEAHGLPLHLCGNKSPHRDPAPRGPARFLPLPGLPPAPPEPPGILAPQPPDVGSSDPLSMVYPSQGRSPSYAS

SEQ ID NO: 3034 - protein, 471 aa, Artificial Sequence
  Fusion Protein
HGEGTFTSDKSKQLEKRLARLFYEWLKAGGHSSIKPPPKGGGGGGGSGGGGSGGGGSADKTHTCPPCPAPEAAGGPSVFLFPPKPKDTLMISRTPEVTCVVVDVSHEDPEVKFNWYVDGVEVHNAKTKPREEQYNSTYRVVSVLTVLHQDWLNGKEYKCKVSNKALPAPIEKTISKAKGQPREPQVYTLPPSRDELTKNQVSLTCLVKGFYPSDIAVEWESNGQPENNYKTTPPVLDSDGSFFLYSKLTVDKSRWQQGNVFSCSVMHEALHNHYTQKSLSLSPGGGGSGSAHPIPDSSPLLQFGGQVRQRYLYTDDACQTEAHLEIREDGTVGGAADQSPESLLQLKALKPGVIQILGVKTSRFLCQRPDGALYGSLHFDPEACSFRELLLEDGYNVYQSEAHGLPLHLPGCKSPHRDPAPRGPARFLPLPGLPPAPPEPPGILAPQPPDVGSSDPLSMVGSQGRSPSYAS

SEQ ID NO: 3035 - protein, 472 aa, Artificial Sequence
  Fusion Protein
HGEGTFTSDKSKQLEKRLARLFYEWLKAGGHSSIKPPPKGGGGGGGSGGGGSGGGGSADKTHTCPPCPAPEAAGGPSVFLFPPKPKDTLMISRTPEVTCVVVDVSHEDPEVKFNWYVDGVEVHNAKTKPREEQYNSTYRVVSVLTVLHQDWLNGKEYKCKVSNKALPAPIEKTISKAKGQPREPQVYTLPPSRDELTKNQVSLTCLVKGFYPSDIAVEWESNGQPENNYKTTPPVLDSDGSFFLYSKLTVDKSRWQQGNVFSCSVMHEALHNHYTQKSLSLSPGGGGSGSAHPIPDSSPLLQFGGQVRQRYLYTDDACQTEAHLEIREDGTVGGAADQSPESLLQLKALKPGVIQILGVKTSRFLCQRPDGALYGSLHFDPEACSFRELLLEDGYNVYQSEAHGLPLHLPGCKSPHRDPAPRGPARFLPLPGLPPAPPEPPGILAPQPPDVGSSDPLSMVYPSQGRSPSYAS

SEQ ID NO: 3036 - protein, 471 aa, Artificial Sequence
  Fusion Protein
HGEGTFTSDKSKQLEKRLARLFYEWLKAGGHSSIKPPPKGGGGGGGSGGGGSGGGGSADKTHTCPPCPAPEAAGGPSVFLFPPKPKDTLMISRTPEVTCVVVDVSHEDPEVKFNWYVDGVEVHNAKTKPREEQYNSTYRVVSVLTVLHQDWLNGKEYKCKVSNKALPAPIEKTISKAKGQPREPQVYTLPPSRDELTKNQVSLTCLVKGFYPSDIAVEWESNGQPENNYKTTPPVLDSDGSFFLYSKLTVDKSRWQQGNVFSCSVMHEALHNHYTQKSLSLSPGGGGSGSAHPIPDSSPLLQFGGQVRQRYLYTDDACQTEAHLEIREDGTVGGAADQSPESLLQLKALKPGVIQILGVKTSRFLCQRPDGALYGSLHFDPEACSFRELLLEDGYNVYQSEAHGLPLHLCGNKSPHRDPAPRGPARFLPLPGLPPAPPEPPGILAPQPPDVGSSDPLSMVGSQGRSPSYAS

SEQ ID NO: 3037 - protein, 472 aa, Artificial Sequence
  Fusion Protein
HGEGTFTSDKSKQLEKRLARLFYEWLKAGGHSSIKPPPKGGGGGGGSGGGGSGGGGSADKTHTCPPCPAPEAAGGPSVFLFPPKPKDTLMISRTPEVTCVVVDVSHEDPEVKFNWYVDGVEVHNAKTKPREEQYNSTYRVVSVLTVLHQDWLNGKEYKCKVSNKALPAPIEKTISKAKGQPREPQVYTLPPSRDELTKNQVSLTCLVKGFYPSDIAVEWESNGQPENNYKTTPPVLDSDGSFFLYSKLTVDKSRWQQGNVFSCSVMHEALHNHYTQKSLSLSPGGGGSGSAHPIPDSSPLLQFGGQVRQRYLYTDDACQTEAHLEIREDGTVGGAADQSPESLLQLKALKPGVIQILGVKTSRFLCQRPDGALYGSLHFDPEACSFRELLLEDGYNVYQSEAHGLPLHLCGNKSPHRDPAPRGPARFLPLPGLPPAPPEPPGILAPQPPDVGSSDPLSMVYPSQGRSPSYAS

SEQ ID NO: 3038 - protein, 471 aa, Artificial Sequence
  Fusion Protein
HGEGTFTSDKSKQLEKRLARLFYEWLKAGGHSSIKPPPKGGGGGGGSGGGGSGGGGSADKTHTCPPCPAPELLGGPSVFLFPPKPKDTLMISRTPEVTCVVVDVSHEDPEVKFNWYVDGVEVHNAKTKPREEQYNNASRVVSVLTVLHQDWLNGKEYKCKVSNKALPAPIEKTISKAKGQPREPQVYTLPPSRDELTKNQVSLTCLVKGFYPSDIAVEWESNGQPENNYKTTPPVLDSDGSFFLYSKLTVDKSRWQQGNVFSCSVMHEALHNHYTQKSLSLSPGGGGSGSAHPIPDSSPLLQFGGQVRQRYLYTDDACQTEAHLEIREDGTVGGAADQSPESLLQLKALKPGVIQILGVKTSRFLCQRPDGALYGSLHFDPEACSFRELLLEDGYNVYQSEAHGLPLHLPGCKSPHRDPAPRGPARFLPLPGLPPAPPEPPGILAPQPPDVGSSDPLSMVGSQGRSPSYAS

SEQ ID NO: 3039 - protein, 472 aa, Artificial Sequence
  Fusion Protein
HGEGTFTSDKSKQLEKRLARLFYEWLKAGGHSSIKPPPKGGGGGGGSGGGGSGGGGSADKTHTCPPCPAPELLGGPSVFLFPPKPKDTLMISRTPEVTCVVVDVSHEDPEVKFNWYVDGVEVHNAKTKPREEQYNNASRVVSVLTVLHQDWLNGKEYKCKVSNKALPAPIEKTISKAKGQPREPQVYTLPPSRDELTKNQVSLTCLVKGFYPSDIAVEWESNGQPENNYKTTPPVLDSDGSFFLYSKLTVDKSRWQQGNVFSCSVMHEALHNHYTQKSLSLSPGGGGSGSAHPIPDSSPLLQFGGQVRQRYLYTDDACQTEAHLEIREDGTVGGAADQSPESLLQLKALKPGVIQILGVKTSRFLCQRPDGALYGSLHFDPEACSFRELLLEDGYNVYQSEAHGLPLHLPGCKSPHRDPAPRGPARFLPLPGLPPAPPEPPGILAPQPPDVGSSDPLSMVYPSQGRSPSYAS

SEQ ID NO: 3040 - protein, 471 aa, Artificial Sequence
  Fusion Protein
HGEGTFTSDKSKQLEKRLARLFYEWLKAGGHSSIKPPPKGGGGGGGSGGGGSGGGGSADKTHTCPPCPAPELLGGPSVFLFPPKPKDTLMISRTPEVTCVVVDVSHEDPEVKFNWYVDGVEVHNAKTKPREEQYNNASRVVSVLTVLHQDWLNGKEYKCKVSNKALPAPIEKTISKAKGQPREPQVYTLPPSRDELTKNQVSLTCLVKGFYPSDIAVEWESNGQPENNYKTTPPVLDSDGSFFLYSKLTVDKSRWQQGNVFSCSVMHEALHNHYTQKSLSLSPGGGGSGSAHPIPDSSPLLQFGGQVRQRYLYTDDACQTEAHLEIREDGTVGGAADQSPESLLQLKALKPGVIQILGVKTSRFLCQRPDGALYGSLHFDPEACSFRELLLEDGYNVYQSEAHGLPLHLCGNKSPHRDPAPRGPARFLPLPGLPPAPPEPPGILAPQPPDVGSSDPLSMVGSQGRSPSYAS

SEQ ID NO: 3041 - protein, 472 aa, Artificial Sequence
  Fusion Protein
HGEGTFTSDKSKQLEKRLARLFYEWLKAGGHSSIKPPPKGGGGGGGSGGGGSGGGGSADKTHTCPPCPAPELLGGPSVFLFPPKPKDTLMISRTPEVTCVVVDVSHEDPEVKFNWYVDGVEVHNAKTKPREEQYNNASRVVSVLTVLHQDWLNGKEYKCKVSNKALPAPIEKTISKAKGQPREPQVYTLPPSRDELTKNQVSLTCLVKGFYPSDIAVEWESNGQPENNYKTTPPVLDSDGSFFLYSKLTVDKSRWQQGNVFSCSVMHEALHNHYTQKSLSLSPGGGGSGSAHPIPDSSPLLQFGGQVRQRYLYTDDACQTEAHLEIREDGTVGGAADQSPESLLQLKALKPGVIQILGVKTSRFLCQRPDGALYGSLHFDPEACSFRELLLEDGYNVYQSEAHGLPLHLCGNKSPHRDPAPRGPARFLPLPGLPPAPPEPPGILAPQPPDVGSSDPLSMVYPSQGRSPSYAS

SEQ ID NO: 3042 - protein, 473 aa, Artificial Sequence
  Fusion Protein
HGEGTFTSDKSKQLEKRLARLFYEWLKAGGHSSIKPPPKGGGGGGGSGGGGSGGGGSAESKYGPPCPPCPAPEFEGGPSVFLFPPKPKDTLMISRTPEVTCVVVDVSQEDPEVQFNWYVDGVEVHNAKTKPREEQFNSTYRVVSVLTVLHQDWLNGKEYKCKVSNKGLPSSIEKTISKAKGQPREPQVYTLPPSQEEMTKNQVSLTCLVKGFYPSDIAVEWESNGQPENNYKTTPPVLDSDGSFFLYSRLTVDKSRWQEGNVFSCSVMHEALHNHYTQKSLSLSLGGGGSGSAHPIPDSSPLLQFGGQVRQRYLYTDDACQTEAHLEIREDGTVGGAADQSPESLLQLKALKPGVIQILGVKTSRFLCQRPDGALYGSLHFDPEACSFRELLLEDGYNVYQSEAHGLPLHLPGCKSPHRDPAPRGPARFLPLPGLPPAPPEPPGILAPQPPDVGSSDPLSMVGSQGRSPSYAS

SEQ ID NO: 3043 - protein, 474 aa, Artificial Sequence
  Fusion Protein
HGEGTFTSDKSKQLEKRLARLFYEWLKAGGHSSIKPPPKGGGGGGGSGGGGSGGGGSAESKYGPPCPPCPAPEFEGGPSVFLFPPKPKDTLMISRTPEVTCVVVDVSQEDPEVQFNWYVDGVEVHNAKTKPREEQFNSTYRVVSVLTVLHQDWLNGKEYKCKVSNKGLPSSIEKTISKAKGQPREPQVYTLPPSQEEMTKNQVSLTCLVKGFYPSDIAVEWESNGQPENNYKTTPPVLDSDGSFFLYSRLTVDKSRWQEGNVFSCSVMHEALHNHYTQKSLSLSLGGGGSGSAHPIPDSSPLLQFGGQVRQRYLYTDDACQTEAHLEIREDGTVGGAADQSPESLLQLKALKPGVIQILGVKTSRFLCQRPDGALYGSLHFDPEACSFRELLLEDGYNVYQSEAHGLPLHLPGCKSPHRDPAPRGPARFLPLPGLPPAPPEPPGILAPQPPDVGSSDPLSMVYPSQGRSPSYAS

SEQ ID NO: 3044 - protein, 473 aa, Artificial Sequence
  Fusion Protein
HGEGTFTSDKSKQLEKRLARLFYEWLKAGGHSSIKPPPKGGGGGGGSGGGGSGGGGSAESKYGPPCPPCPAPEFEGGPSVFLFPPKPKDTLMISRTPEVTCVVVDVSQEDPEVQFNWYVDGVEVHNAKTKPREEQFNSTYRVVSVLTVLHQDWLNGKEYKCKVSNKGLPSSIEKTISKAKGQPREPQVYTLPPSQEEMTKNQVSLTCLVKGFYPSDIAVEWESNGQPENNYKTTPPVLDSDGSFFLYSRLTVDKSRWQEGNVFSCSVMHEALHNHYTQKSLSLSLGGGGSGSAHPIPDSSPLLQFGGQVRQRYLYTDDACQTEAHLEIREDGTVGGAADQSPESLLQLKALKPGVIQILGVKTSRFLCQRPDGALYGSLHFDPEACSFRELLLEDGYNVYQSEAHGLPLHLCGNKSPHRDPAPRGPARFLPLPGLPPAPPEPPGILAPQPPDVGSSDPLSMVGSQGRSPSYAS

SEQ ID NO: 3045 - protein, 474 aa, Artificial Sequence
  Fusion Protein
HGEGTFTSDKSKQLEKRLARLFYEWLKAGGHSSIKPPPKGGGGGGGSGGGGSGGGGSAESKYGPPCPPCPAPEFEGGPSVFLFPPKPKDTLMISRTPEVTCVVVDVSQEDPEVQFNWYVDGVEVHNAKTKPREEQFNSTYRVVSVLTVLHQDWLNGKEYKCKVSNKGLPSSIEKTISKAKGQPREPQVYTLPPSQEEMTKNQVSLTCLVKGFYPSDIAVEWESNGQPENNYKTTPPVLDSDGSFFLYSRLTVDKSRWQEGNVFSCSVMHEALHNHYTQKSLSLSLGGGGSGSAHPIPDSSPLLQFGGQVRQRYLYTDDACQTEAHLEIREDGTVGGAADQSPESLLQLKALKPGVIQILGVKTSRFLCQRPDGALYGSLHFDPEACSFRELLLEDGYNVYQSEAHGLPLHLCGNKSPHRDPAPRGPARFLPLPGLPPAPPEPPGILAPQPPDVGSSDPLSMVYPSQGRSPSYAS

SEQ ID NO: 3046 - protein, 471 aa, Artificial Sequence
  Fusion Protein
HGEGTFTSDKSKQLEKRLARLFYEWLKAGGHKKGKPPPKGGGGGGGSGGGGSGGGGSADKTHTCPPCPAPEAAGGPSVFLFPPKPKDTLMISRTPEVTCVVVDVSHEDPEVKFNWYVDGVEVHNAKTKPREEQYNSTYRVVSVLTVLHQDWLNGKEYKCKVSNKALPAPIEKTISKAKGQPREPQVYTLPPSRDELTKNQVSLTCLVKGFYPSDIAVEWESNGQPENNYKTTPPVLDSDGSFFLYSKLTVDKSRWQQGNVFSCSVMHEALHNHYTQKSLSLSPGGGGSGSAHPIPDSSPLLQFGGQVRQRYLYTDDACQTEAHLEIREDGTVGGAADQSPESLLQLKALKPGVIQILGVKTSRFLCQRPDGALYGSLHFDPEACSFRELLLEDGYNVYQSEAHGLPLHLPGCKSPHRDPAPRGPARFLPLPGLPPAPPEPPGILAPQPPDVGSSDPLSMVGSQGRSPSYAS

SEQ ID NO: 3047 - protein, 472 aa, Artificial Sequence
  Fusion Protein
HGEGTFTSDKSKQLEKRLARLFYEWLKAGGHKKGKPPPKGGGGGGGSGGGGSGGGGSADKTHTCPPCPAPEAAGGPSVFLFPPKPKDTLMISRTPEVTCVVVDVSHEDPEVKFNWYVDGVEVHNAKTKPREEQYNSTYRVVSVLTVLHQDWLNGKEYKCKVSNKALPAPIEKTISKAKGQPREPQVYTLPPSRDELTKNQVSLTCLVKGFYPSDIAVEWESNGQPENNYKTTPPVLDSDGSFFLYSKLTVDKSRWQQGNVFSCSVMHEALHNHYTQKSLSLSPGGGGSGSAHPIPDSSPLLQFGGQVRQRYLYTDDACQTEAHLEIREDGTVGGAADQSPESLLQLKALKPGVIQILGVKTSRFLCQRPDGALYGSLHFDPEACSFRELLLEDGYNVYQSEAHGLPLHLPGCKSPHRDPAPRGPARFLPLPGLPPAPPEPPGILAPQPPDVGSSDPLSMVYPSQGRSPSYAS

SEQ ID NO: 3048 - protein, 471 aa, Artificial Sequence
  Fusion Protein
HGEGTFTSDKSKQLEKRLARLFYEWLKAGGHKKGKPPPKGGGGGGGSGGGGSGGGGSADKTHTCPPCPAPEAAGGPSVFLFPPKPKDTLMISRTPEVTCVVVDVSHEDPEVKFNWYVDGVEVHNAKTKPREEQYNSTYRVVSVLTVLHQDWLNGKEYKCKVSNKALPAPIEKTISKAKGQPREPQVYTLPPSRDELTKNQVSLTCLVKGFYPSDIAVEWESNGQPENNYKTTPPVLDSDGSFFLYSKLTVDKSRWQQGNVFSCSVMHEALHNHYTQKSLSLSPGGGGSGSAHPIPDSSPLLQFGGQVRQRYLYTDDACQTEAHLEIREDGTVGGAADQSPESLLQLKALKPGVIQILGVKTSRFLCQRPDGALYGSLHFDPEACSFRELLLEDGYNVYQSEAHGLPLHLCGNKSPHRDPAPRGPARFLPLPGLPPAPPEPPGILAPQPPDVGSSDPLSMVGSQGRSPSYAS

SEQ ID NO: 3049 - protein, 472 aa, Artificial Sequence
  Fusion Protein
HGEGTFTSDKSKQLEKRLARLFYEWLKAGGHKKGKPPPKGGGGGGGSGGGGSGGGGSADKTHTCPPCPAPEAAGGPSVFLFPPKPKDTLMISRTPEVTCVVVDVSHEDPEVKFNWYVDGVEVHNAKTKPREEQYNSTYRVVSVLTVLHQDWLNGKEYKCKVSNKALPAPIEKTISKAKGQPREPQVYTLPPSRDELTKNQVSLTCLVKGFYPSDIAVEWESNGQPENNYKTTPPVLDSDGSFFLYSKLTVDKSRWQQGNVFSCSVMHEALHNHYTQKSLSLSPGGGGSGSAHPIPDSSPLLQFGGQVRQRYLYTDDACQTEAHLEIREDGTVGGAADQSPESLLQLKALKPGVIQILGVKTSRFLCQRPDGALYGSLHFDPEACSFRELLLEDGYNVYQSEAHGLPLHLCGNKSPHRDPAPRGPARFLPLPGLPPAPPEPPGILAPQPPDVGSSDPLSMVYPSQGRSPSYAS

SEQ ID NO: 3050 - protein, 471 aa, Artificial Sequence
  Fusion Protein
HGEGTFTSDKSKQLEKRLARLFYEWLKAGGHKKGKPPPKGGGGGGGSGGGGSGGGGSADKTHTCPPCPAPELLGGPSVFLFPPKPKDTLMISRTPEVTCVVVDVSHEDPEVKFNWYVDGVEVHNAKTKPREEQYNNASRVVSVLTVLHQDWLNGKEYKCKVSNKALPAPIEKTISKAKGQPREPQVYTLPPSRDELTKNQVSLTCLVKGFYPSDIAVEWESNGQPENNYKTTPPVLDSDGSFFLYSKLTVDKSRWQQGNVFSCSVMHEALHNHYTQKSLSLSPGGGGSGSAHPIPDSSPLLQFGGQVRQRYLYTDDACQTEAHLEIREDGTVGGAADQSPESLLQLKALKPGVIQILGVKTSRFLCQRPDGALYGSLHFDPEACSFRELLLEDGYNVYQSEAHGLPLHLPGCKSPHRDPAPRGPARFLPLPGLPPAPPEPPGILAPQPPDVGSSDPLSMVGSQGRSPSYAS

SEQ ID NO: 3051 - protein, 472 aa, Artificial Sequence
  Fusion Protein
HGEGTFTSDKSKQLEKRLARLFYEWLKAGGHKKGKPPPKGGGGGGGSGGGGSGGGGSADKTHTCPPCPAPELLGGPSVFLFPPKPKDTLMISRTPEVTCVVVDVSHEDPEVKFNWYVDGVEVHNAKTKPREEQYNNASRVVSVLTVLHQDWLNGKEYKCKVSNKALPAPIEKTISKAKGQPREPQVYTLPPSRDELTKNQVSLTCLVKGFYPSDIAVEWESNGQPENNYKTTPPVLDSDGSFFLYSKLTVDKSRWQQGNVFSCSVMHEALHNHYTQKSLSLSPGGGGSGSAHPIPDSSPLLQFGGQVRQRYLYTDDACQTEAHLEIREDGTVGGAADQSPESLLQLKALKPGVIQILGVKTSRFLCQRPDGALYGSLHFDPEACSFRELLLEDGYNVYQSEAHGLPLHLPGCKSPHRDPAPRGPARFLPLPGLPPAPPEPPGILAPQPPDVGSSDPLSMVYPSQGRSPSYAS

SEQ ID NO: 3052 - protein, 471 aa, Artificial Sequence
  Fusion Protein
HGEGTFTSDKSKQLEKRLARLFYEWLKAGGHKKGKPPPKGGGGGGGSGGGGSGGGGSADKTHTCPPCPAPELLGGPSVFLFPPKPKDTLMISRTPEVTCVVVDVSHEDPEVKFNWYVDGVEVHNAKTKPREEQYNNASRVVSVLTVLHQDWLNGKEYKCKVSNKALPAPIEKTISKAKGQPREPQVYTLPPSRDELTKNQVSLTCLVKGFYPSDIAVEWESNGQPENNYKTTPPVLDSDGSFFLYSKLTVDKSRWQQGNVFSCSVMHEALHNHYTQKSLSLSPGGGGSGSAHPIPDSSPLLQFGGQVRQRYLYTDDACQTEAHLEIREDGTVGGAADQSPESLLQLKALKPGVIQILGVKTSRFLCQRPDGALYGSLHFDPEACSFRELLLEDGYNVYQSEAHGLPLHLCGNKSPHRDPAPRGPARFLPLPGLPPAPPEPPGILAPQPPDVGSSDPLSMVGSQGRSPSYAS

SEQ ID NO: 3053 - protein, 472 aa, Artificial Sequence
  Fusion Protein
HGEGTFTSDKSKQLEKRLARLFYEWLKAGGHKKGKPPPKGGGGGGGSGGGGSGGGGSADKTHTCPPCPAPELLGGPSVFLFPPKPKDTLMISRTPEVTCVVVDVSHEDPEVKFNWYVDGVEVHNAKTKPREEQYNNASRVVSVLTVLHQDWLNGKEYKCKVSNKALPAPIEKTISKAKGQPREPQVYTLPPSRDELTKNQVSLTCLVKGFYPSDIAVEWESNGQPENNYKTTPPVLDSDGSFFLYSKLTVDKSRWQQGNVFSCSVMHEALHNHYTQKSLSLSPGGGGSGSAHPIPDSSPLLQFGGQVRQRYLYTDDACQTEAHLEIREDGTVGGAADQSPESLLQLKALKPGVIQILGVKTSRFLCQRPDGALYGSLHFDPEACSFRELLLEDGYNVYQSEAHGLPLHLCGNKSPHRDPAPRGPARFLPLPGLPPAPPEPPGILAPQPPDVGSSDPLSMVYPSQGRSPSYAS

SEQ ID NO: 3054 - protein, 473 aa, Artificial Sequence
  Fusion Protein
HGEGTFTSDKSKQLEKRLARLFYEWLKAGGHKKGKPPPKGGGGGGGSGGGGSGGGGSAESKYGPPCPPCPAPEFEGGPSVFLFPPKPKDTLMISRTPEVTCVVVDVSQEDPEVQFNWYVDGVEVHNAKTKPREEQFNSTYRVVSVLTVLHQDWLNGKEYKCKVSNKGLPSSIEKTISKAKGQPREPQVYTLPPSQEEMTKNQVSLTCLVKGFYPSDIAVEWESNGQPENNYKTTPPVLDSDGSFFLYSRLTVDKSRWQEGNVFSCSVMHEALHNHYTQKSLSLSLGGGGSGSAHPIPDSSPLLQFGGQVRQRYLYTDDACQTEAHLEIREDGTVGGAADQSPESLLQLKALKPGVIQILGVKTSRFLCQRPDGALYGSLHFDPEACSFRELLLEDGYNVYQSEAHGLPLHLPGCKSPHRDPAPRGPARFLPLPGLPPAPPEPPGILAPQPPDVGSSDPLSMVGSQGRSPSYAS

SEQ ID NO: 3055 - protein, 474 aa, Artificial Sequence
  Fusion Protein
HGEGTFTSDKSKQLEKRLARLFYEWLKAGGHKKGKPPPKGGGGGGGSGGGGSGGGGSAESKYGPPCPPCPAPEFEGGPSVFLFPPKPKDTLMISRTPEVTCVVVDVSQEDPEVQFNWYVDGVEVHNAKTKPREEQFNSTYRVVSVLTVLHQDWLNGKEYKCKVSNKGLPSSIEKTISKAKGQPREPQVYTLPPSQEEMTKNQVSLTCLVKGFYPSDIAVEWESNGQPENNYKTTPPVLDSDGSFFLYSRLTVDKSRWQEGNVFSCSVMHEALHNHYTQKSLSLSLGGGGSGSAHPIPDSSPLLQFGGQVRQRYLYTDDACQTEAHLEIREDGTVGGAADQSPESLLQLKALKPGVIQILGVKTSRFLCQRPDGALYGSLHFDPEACSFRELLLEDGYNVYQSEAHGLPLHLPGCKSPHRDPAPRGPARFLPLPGLPPAPPEPPGILAPQPPDVGSSDPLSMVYPSQGRSPSYAS

SEQ ID NO: 3056 - protein, 473 aa, Artificial Sequence
  Fusion Protein
HGEGTFTSDKSKQLEKRLARLFYEWLKAGGHKKGKPPPKGGGGGGGSGGGGSGGGGSAESKYGPPCPPCPAPEFEGGPSVFLFPPKPKDTLMISRTPEVTCVVVDVSQEDPEVQFNWYVDGVEVHNAKTKPREEQFNSTYRVVSVLTVLHQDWLNGKEYKCKVSNKGLPSSIEKTISKAKGQPREPQVYTLPPSQEEMTKNQVSLTCLVKGFYPSDIAVEWESNGQPENNYKTTPPVLDSDGSFFLYSRLTVDKSRWQEGNVFSCSVMHEALHNHYTQKSLSLSLGGGGSGSAHPIPDSSPLLQFGGQVRQRYLYTDDACQTEAHLEIREDGTVGGAADQSPESLLQLKALKPGVIQILGVKTSRFLCQRPDGALYGSLHFDPEACSFRELLLEDGYNVYQSEAHGLPLHLCGNKSPHRDPAPRGPARFLPLPGLPPAPPEPPGILAPQPPDVGSSDPLSMVGSQGRSPSYAS

SEQ ID NO: 3057 - protein, 474 aa, Artificial Sequence
  Fusion Protein
HGEGTFTSDKSKQLEKRLARLFYEWLKAGGHKKGKPPPKGGGGGGGSGGGGSGGGGSAESKYGPPCPPCPAPEFEGGPSVFLFPPKPKDTLMISRTPEVTCVVVDVSQEDPEVQFNWYVDGVEVHNAKTKPREEQFNSTYRVVSVLTVLHQDWLNGKEYKCKVSNKGLPSSIEKTISKAKGQPREPQVYTLPPSQEEMTKNQVSLTCLVKGFYPSDIAVEWESNGQPENNYKTTPPVLDSDGSFFLYSRLTVDKSRWQEGNVFSCSVMHEALHNHYTQKSLSLSLGGGGSGSAHPIPDSSPLLQFGGQVRQRYLYTDDACQTEAHLEIREDGTVGGAADQSPESLLQLKALKPGVIQILGVKTSRFLCQRPDGALYGSLHFDPEACSFRELLLEDGYNVYQSEAHGLPLHLCGNKSPHRDPAPRGPARFLPLPGLPPAPPEPPGILAPQPPDVGSSDPLSMVYPSQGRSPSYAS

SEQ ID NO: 3058 - protein, 471 aa, Artificial Sequence
  Fusion Protein
HGEGTFTSDKSKQLEKRLARLFYEWLKAGGHSKIKPPPKGGGGGGGSGGGGSGGGGSADKTHTCPPCPAPEAAGGPSVFLFPPKPKDTLMISRTPEVTCVVVDVSHEDPEVKFNWYVDGVEVHNAKTKPREEQYNSTYRVVSVLTVLHQDWLNGKEYKCKVSNKALPAPIEKTISKAKGQPREPQVYTLPPSRDELTKNQVSLTCLVKGFYPSDIAVEWESNGQPENNYKTTPPVLDSDGSFFLYSKLTVDKSRWQQGNVFSCSVMHEALHNHYTQKSLSLSPGGGGSGSAHPIPDSSPLLQFGGQVRQRYLYTDDACQTEAHLEIREDGTVGGAADQSPESLLQLKALKPGVIQILGVKTSRFLCQRPDGALYGSLHFDPEACSFRELLLEDGYNVYQSEAHGLPLHLPGCKSPHRDPAPRGPARFLPLPGLPPAPPEPPGILAPQPPDVGSSDPLSMVGSQGRSPSYAS

SEQ ID NO: 3059 - protein, 472 aa, Artificial Sequence
  Fusion Protein
HGEGTFTSDKSKQLEKRLARLFYEWLKAGGHSKIKPPPKGGGGGGGSGGGGSGGGGSADKTHTCPPCPAPEAAGGPSVFLFPPKPKDTLMISRTPEVTCVVVDVSHEDPEVKFNWYVDGVEVHNAKTKPREEQYNSTYRVVSVLTVLHQDWLNGKEYKCKVSNKALPAPIEKTISKAKGQPREPQVYTLPPSRDELTKNQVSLTCLVKGFYPSDIAVEWESNGQPENNYKTTPPVLDSDGSFFLYSKLTVDKSRWQQGNVFSCSVMHEALHNHYTQKSLSLSPGGGGSGSAHPIPDSSPLLQFGGQVRQRYLYTDDACQTEAHLEIREDGTVGGAADQSPESLLQLKALKPGVIQILGVKTSRFLCQRPDGALYGSLHFDPEACSFRELLLEDGYNVYQSEAHGLPLHLPGCKSPHRDPAPRGPARFLPLPGLPPAPPEPPGILAPQPPDVGSSDPLSMVYPSQGRSPSYAS

SEQ ID NO: 3060 - protein, 471 aa, Artificial Sequence
  Fusion Protein
HGEGTFTSDKSKQLEKRLARLFYEWLKAGGHSKIKPPPKGGGGGGGSGGGGSGGGGSADKTHTCPPCPAPEAAGGPSVFLFPPKPKDTLMISRTPEVTCVVVDVSHEDPEVKFNWYVDGVEVHNAKTKPREEQYNSTYRVVSVLTVLHQDWLNGKEYKCKVSNKALPAPIEKTISKAKGQPREPQVYTLPPSRDELTKNQVSLTCLVKGFYPSDIAVEWESNGQPENNYKTTPPVLDSDGSFFLYSKLTVDKSRWQQGNVFSCSVMHEALHNHYTQKSLSLSPGGGGSGSAHPIPDSSPLLQFGGQVRQRYLYTDDACQTEAHLEIREDGTVGGAADQSPESLLQLKALKPGVIQILGVKTSRFLCQRPDGALYGSLHFDPEACSFRELLLEDGYNVYQSEAHGLPLHLCGNKSPHRDPAPRGPARFLPLPGLPPAPPEPPGILAPQPPDVGSSDPLSMVGSQGRSPSYAS

SEQ ID NO: 3061 - protein, 472 aa, Artificial Sequence
  Fusion Protein
HGEGTFTSDKSKQLEKRLARLFYEWLKAGGHSKIKPPPKGGGGGGGSGGGGSGGGGSADKTHTCPPCPAPEAAGGPSVFLFPPKPKDTLMISRTPEVTCVVVDVSHEDPEVKFNWYVDGVEVHNAKTKPREEQYNSTYRVVSVLTVLHQDWLNGKEYKCKVSNKALPAPIEKTISKAKGQPREPQVYTLPPSRDELTKNQVSLTCLVKGFYPSDIAVEWESNGQPENNYKTTPPVLDSDGSFFLYSKLTVDKSRWQQGNVFSCSVMHEALHNHYTQKSLSLSPGGGGSGSAHPIPDSSPLLQFGGQVRQRYLYTDDACQTEAHLEIREDGTVGGAADQSPESLLQLKALKPGVIQILGVKTSRFLCQRPDGALYGSLHFDPEACSFRELLLEDGYNVYQSEAHGLPLHLCGNKSPHRDPAPRGPARFLPLPGLPPAPPEPPGILAPQPPDVGSSDPLSMVYPSQGRSPSYAS

SEQ ID NO: 3062 - protein, 471 aa, Artificial Sequence
  Fusion Protein
HGEGTFTSDKSKQLEKRLARLFYEWLKAGGHSKIKPPPKGGGGGGGSGGGGSGGGGSADKTHTCPPCPAPELLGGPSVFLFPPKPKDTLMISRTPEVTCVVVDVSHEDPEVKFNWYVDGVEVHNAKTKPREEQYNNASRVVSVLTVLHQDWLNGKEYKCKVSNKALPAPIEKTISKAKGQPREPQVYTLPPSRDELTKNQVSLTCLVKGFYPSDIAVEWESNGQPENNYKTTPPVLDSDGSFFLYSKLTVDKSRWQQGNVFSCSVMHEALHNHYTQKSLSLSPGGGGSGSAHPIPDSSPLLQFGGQVRQRYLYTDDACQTEAHLEIREDGTVGGAADQSPESLLQLKALKPGVIQILGVKTSRFLCQRPDGALYGSLHFDPEACSFRELLLEDGYNVYQSEAHGLPLHLPGCKSPHRDPAPRGPARFLPLPGLPPAPPEPPGILAPQPPDVGSSDPLSMVGSQGRSPSYAS

SEQ ID NO: 3063 - protein, 472 aa, Artificial Sequence
  Fusion Protein
HGEGTFTSDKSKQLEKRLARLFYEWLKAGGHSKIKPPPKGGGGGGGSGGGGSGGGGSADKTHTCPPCPAPELLGGPSVFLFPPKPKDTLMISRTPEVTCVVVDVSHEDPEVKFNWYVDGVEVHNAKTKPREEQYNNASRVVSVLTVLHQDWLNGKEYKCKVSNKALPAPIEKTISKAKGQPREPQVYTLPPSRDELTKNQVSLTCLVKGFYPSDIAVEWESNGQPENNYKTTPPVLDSDGSFFLYSKLTVDKSRWQQGNVFSCSVMHEALHNHYTQKSLSLSPGGGGSGSAHPIPDSSPLLQFGGQVRQRYLYTDDACQTEAHLEIREDGTVGGAADQSPESLLQLKALKPGVIQILGVKTSRFLCQRPDGALYGSLHFDPEACSFRELLLEDGYNVYQSEAHGLPLHLPGCKSPHRDPAPRGPARFLPLPGLPPAPPEPPGILAPQPPDVGSSDPLSMVYPSQGRSPSYAS

SEQ ID NO: 3064 - protein, 471 aa, Artificial Sequence
  Fusion Protein
HGEGTFTSDKSKQLEKRLARLFYEWLKAGGHSKIKPPPKGGGGGGGSGGGGSGGGGSADKTHTCPPCPAPELLGGPSVFLFPPKPKDTLMISRTPEVTCVVVDVSHEDPEVKFNWYVDGVEVHNAKTKPREEQYNNASRVVSVLTVLHQDWLNGKEYKCKVSNKALPAPIEKTISKAKGQPREPQVYTLPPSRDELTKNQVSLTCLVKGFYPSDIAVEWESNGQPENNYKTTPPVLDSDGSFFLYSKLTVDKSRWQQGNVFSCSVMHEALHNHYTQKSLSLSPGGGGSGSAHPIPDSSPLLQFGGQVRQRYLYTDDACQTEAHLEIREDGTVGGAADQSPESLLQLKALKPGVIQILGVKTSRFLCQRPDGALYGSLHFDPEACSFRELLLEDGYNVYQSEAHGLPLHLCGNKSPHRDPAPRGPARFLPLPGLPPAPPEPPGILAPQPPDVGSSDPLSMVGSQGRSPSYAS

SEQ ID NO: 3065 - protein, 472 aa, Artificial Sequence
  Fusion Protein
HGEGTFTSDKSKQLEKRLARLFYEWLKAGGHSKIKPPPKGGGGGGGSGGGGSGGGGSADKTHTCPPCPAPELLGGPSVFLFPPKPKDTLMISRTPEVTCVVVDVSHEDPEVKFNWYVDGVEVHNAKTKPREEQYNNASRVVSVLTVLHQDWLNGKEYKCKVSNKALPAPIEKTISKAKGQPREPQVYTLPPSRDELTKNQVSLTCLVKGFYPSDIAVEWESNGQPENNYKTTPPVLDSDGSFFLYSKLTVDKSRWQQGNVFSCSVMHEALHNHYTQKSLSLSPGGGGSGSAHPIPDSSPLLQFGGQVRQRYLYTDDACQTEAHLEIREDGTVGGAADQSPESLLQLKALKPGVIQILGVKTSRFLCQRPDGALYGSLHFDPEACSFRELLLEDGYNVYQSEAHGLPLHLCGNKSPHRDPAPRGPARFLPLPGLPPAPPEPPGILAPQPPDVGSSDPLSMVYPSQGRSPSYAS

SEQ ID NO: 3066 - protein, 473 aa, Artificial Sequence
  Fusion Protein
HGEGTFTSDKSKQLEKRLARLFYEWLKAGGHSKIKPPPKGGGGGGGSGGGGSGGGGSAESKYGPPCPPCPAPEFEGGPSVFLFPPKPKDTLMISRTPEVTCVVVDVSQEDPEVQFNWYVDGVEVHNAKTKPREEQFNSTYRVVSVLTVLHQDWLNGKEYKCKVSNKGLPSSIEKTISKAKGQPREPQVYTLPPSQEEMTKNQVSLTCLVKGFYPSDIAVEWESNGQPENNYKTTPPVLDSDGSFFLYSRLTVDKSRWQEGNVFSCSVMHEALHNHYTQKSLSLSLGGGGSGSAHPIPDSSPLLQFGGQVRQRYLYTDDACQTEAHLEIREDGTVGGAADQSPESLLQLKALKPGVIQILGVKTSRFLCQRPDGALYGSLHFDPEACSFRELLLEDGYNVYQSEAHGLPLHLPGCKSPHRDPAPRGPARFLPLPGLPPAPPEPPGILAPQPPDVGSSDPLSMVGSQGRSPSYAS

SEQ ID NO: 3067 - protein, 474 aa, Artificial Sequence
  Fusion Protein
HGEGTFTSDKSKQLEKRLARLFYEWLKAGGHSKIKPPPKGGGGGGGSGGGGSGGGGSAESKYGPPCPPCPAPEFEGGPSVFLFPPKPKDTLMISRTPEVTCVVVDVSQEDPEVQFNWYVDGVEVHNAKTKPREEQFNSTYRVVSVLTVLHQDWLNGKEYKCKVSNKGLPSSIEKTISKAKGQPREPQVYTLPPSQEEMTKNQVSLTCLVKGFYPSDIAVEWESNGQPENNYKTTPPVLDSDGSFFLYSRLTVDKSRWQEGNVFSCSVMHEALHNHYTQKSLSLSLGGGGSGSAHPIPDSSPLLQFGGQVRQRYLYTDDACQTEAHLEIREDGTVGGAADQSPESLLQLKALKPGVIQILGVKTSRFLCQRPDGALYGSLHFDPEACSFRELLLEDGYNVYQSEAHGLPLHLPGCKSPHRDPAPRGPARFLPLPGLPPAPPEPPGILAPQPPDVGSSDPLSMVYPSQGRSPSYAS

SEQ ID NO: 3068 - protein, 473 aa, Artificial Sequence
  Fusion Protein
HGEGTFTSDKSKQLEKRLARLFYEWLKAGGHSKIKPPPKGGGGGGGSGGGGSGGGGSAESKYGPPCPPCPAPEFEGGPSVFLFPPKPKDTLMISRTPEVTCVVVDVSQEDPEVQFNWYVDGVEVHNAKTKPREEQFNSTYRVVSVLTVLHQDWLNGKEYKCKVSNKGLPSSIEKTISKAKGQPREPQVYTLPPSQEEMTKNQVSLTCLVKGFYPSDIAVEWESNGQPENNYKTTPPVLDSDGSFFLYSRLTVDKSRWQEGNVFSCSVMHEALHNHYTQKSLSLSLGGGGSGSAHPIPDSSPLLQFGGQVRQRYLYTDDACQTEAHLEIREDGTVGGAADQSPESLLQLKALKPGVIQILGVKTSRFLCQRPDGALYGSLHFDPEACSFRELLLEDGYNVYQSEAHGLPLHLCGNKSPHRDPAPRGPARFLPLPGLPPAPPEPPGILAPQPPDVGSSDPLSMVGSQGRSPSYAS

SEQ ID NO: 3069 - protein, 474 aa, Artificial Sequence
  Fusion Protein
HGEGTFTSDKSKQLEKRLARLFYEWLKAGGHSKIKPPPKGGGGGGGSGGGGSGGGGSAESKYGPPCPPCPAPEFEGGPSVFLFPPKPKDTLMISRTPEVTCVVVDVSQEDPEVQFNWYVDGVEVHNAKTKPREEQFNSTYRVVSVLTVLHQDWLNGKEYKCKVSNKGLPSSIEKTISKAKGQPREPQVYTLPPSQEEMTKNQVSLTCLVKGFYPSDIAVEWESNGQPENNYKTTPPVLDSDGSFFLYSRLTVDKSRWQEGNVFSCSVMHEALHNHYTQKSLSLSLGGGGSGSAHPIPDSSPLLQFGGQVRQRYLYTDDACQTEAHLEIREDGTVGGAADQSPESLLQLKALKPGVIQILGVKTSRFLCQRPDGALYGSLHFDPEACSFRELLLEDGYNVYQSEAHGLPLHLCGNKSPHRDPAPRGPARFLPLPGLPPAPPEPPGILAPQPPDVGSSDPLSMVYPSQGRSPSYAS

SEQ ID NO: 3070 - protein, 471 aa, Artificial Sequence
  Fusion Protein
HGEGTFTSDKSKQLEKRLARLFYEWLKAGGHSKGKPPPKGGGGGGGSGGGGSGGGGSADKTHTCPPCPAPEAAGGPSVFLFPPKPKDTLMISRTPEVTCVVVDVSHEDPEVKFNWYVDGVEVHNAKTKPREEQYNSTYRVVSVLTVLHQDWLNGKEYKCKVSNKALPAPIEKTISKAKGQPREPQVYTLPPSRDELTKNQVSLTCLVKGFYPSDIAVEWESNGQPENNYKTTPPVLDSDGSFFLYSKLTVDKSRWQQGNVFSCSVMHEALHNHYTQKSLSLSPGGGGSGSAHPIPDSSPLLQFGGQVRQRYLYTDDACQTEAHLEIREDGTVGGAADQSPESLLQLKALKPGVIQILGVKTSRFLCQRPDGALYGSLHFDPEACSFRELLLEDGYNVYQSEAHGLPLHLPGCKSPHRDPAPRGPARFLPLPGLPPAPPEPPGILAPQPPDVGSSDPLSMVGSQGRSPSYAS

SEQ ID NO: 3071 - protein, 472 aa, Artificial Sequence
  Fusion Protein
HGEGTFTSDKSKQLEKRLARLFYEWLKAGGHSKGKPPPKGGGGGGGSGGGGSGGGGSADKTHTCPPCPAPEAAGGPSVFLFPPKPKDTLMISRTPEVTCVVVDVSHEDPEVKFNWYVDGVEVHNAKTKPREEQYNSTYRVVSVLTVLHQDWLNGKEYKCKVSNKALPAPIEKTISKAKGQPREPQVYTLPPSRDELTKNQVSLTCLVKGFYPSDIAVEWESNGQPENNYKTTPPVLDSDGSFFLYSKLTVDKSRWQQGNVFSCSVMHEALHNHYTQKSLSLSPGGGGSGSAHPIPDSSPLLQFGGQVRQRYLYTDDACQTEAHLEIREDGTVGGAADQSPESLLQLKALKPGVIQILGVKTSRFLCQRPDGALYGSLHFDPEACSFRELLLEDGYNVYQSEAHGLPLHLPGCKSPHRDPAPRGPARFLPLPGLPPAPPEPPGILAPQPPDVGSSDPLSMVYPSQGRSPSYAS

SEQ ID NO: 3072 - protein, 471 aa, Artificial Sequence
  Fusion Protein
HGEGTFTSDKSKQLEKRLARLFYEWLKAGGHSKGKPPPKGGGGGGGSGGGGSGGGGSADKTHTCPPCPAPEAAGGPSVFLFPPKPKDTLMISRTPEVTCVVVDVSHEDPEVKFNWYVDGVEVHNAKTKPREEQYNSTYRVVSVLTVLHQDWLNGKEYKCKVSNKALPAPIEKTISKAKGQPREPQVYTLPPSRDELTKNQVSLTCLVKGFYPSDIAVEWESNGQPENNYKTTPPVLDSDGSFFLYSKLTVDKSRWQQGNVFSCSVMHEALHNHYTQKSLSLSPGGGGSGSAHPIPDSSPLLQFGGQVRQRYLYTDDACQTEAHLEIREDGTVGGAADQSPESLLQLKALKPGVIQILGVKTSRFLCQRPDGALYGSLHFDPEACSFRELLLEDGYNVYQSEAHGLPLHLCGNKSPHRDPAPRGPARFLPLPGLPPAPPEPPGILAPQPPDVGSSDPLSMVGSQGRSPSYAS

SEQ ID NO: 3073 - protein, 472 aa, Artificial Sequence
  Fusion Protein
HGEGTFTSDKSKQLEKRLARLFYEWLKAGGHSKGKPPPKGGGGGGGSGGGGSGGGGSADKTHTCPPCPAPEAAGGPSVFLFPPKPKDTLMISRTPEVTCVVVDVSHEDPEVKFNWYVDGVEVHNAKTKPREEQYNSTYRVVSVLTVLHQDWLNGKEYKCKVSNKALPAPIEKTISKAKGQPREPQVYTLPPSRDELTKNQVSLTCLVKGFYPSDIAVEWESNGQPENNYKTTPPVLDSDGSFFLYSKLTVDKSRWQQGNVFSCSVMHEALHNHYTQKSLSLSPGGGGSGSAHPIPDSSPLLQFGGQVRQRYLYTDDACQTEAHLEIREDGTVGGAADQSPESLLQLKALKPGVIQILGVKTSRFLCQRPDGALYGSLHFDPEACSFRELLLEDGYNVYQSEAHGLPLHLCGNKSPHRDPAPRGPARFLPLPGLPPAPPEPPGILAPQPPDVGSSDPLSMVYPSQGRSPSYAS

SEQ ID NO: 3074 - protein, 471 aa, Artificial Sequence
  Fusion Protein
HGEGTFTSDKSKQLEKRLARLFYEWLKAGGHSKGKPPPKGGGGGGGSGGGGSGGGGSADKTHTCPPCPAPELLGGPSVFLFPPKPKDTLMISRTPEVTCVVVDVSHEDPEVKFNWYVDGVEVHNAKTKPREEQYNNASRVVSVLTVLHQDWLNGKEYKCKVSNKALPAPIEKTISKAKGQPREPQVYTLPPSRDELTKNQVSLTCLVKGFYPSDIAVEWESNGQPENNYKTTPPVLDSDGSFFLYSKLTVDKSRWQQGNVFSCSVMHEALHNHYTQKSLSLSPGGGGSGSAHPIPDSSPLLQFGGQVRQRYLYTDDACQTEAHLEIREDGTVGGAADQSPESLLQLKALKPGVIQILGVKTSRFLCQRPDGALYGSLHFDPEACSFRELLLEDGYNVYQSEAHGLPLHLPGCKSPHRDPAPRGPARFLPLPGLPPAPPEPPGILAPQPPDVGSSDPLSMVGSQGRSPSYAS

SEQ ID NO: 3075 - protein, 472 aa, Artificial Sequence
  Fusion Protein
HGEGTFTSDKSKQLEKRLARLFYEWLKAGGHSKGKPPPKGGGGGGGSGGGGSGGGGSADKTHTCPPCPAPELLGGPSVFLFPPKPKDTLMISRTPEVTCVVVDVSHEDPEVKFNWYVDGVEVHNAKTKPREEQYNNASRVVSVLTVLHQDWLNGKEYKCKVSNKALPAPIEKTISKAKGQPREPQVYTLPPSRDELTKNQVSLTCLVKGFYPSDIAVEWESNGQPENNYKTTPPVLDSDGSFFLYSKLTVDKSRWQQGNVFSCSVMHEALHNHYTQKSLSLSPGGGGSGSAHPIPDSSPLLQFGGQVRQRYLYTDDACQTEAHLEIREDGTVGGAADQSPESLLQLKALKPGVIQILGVKTSRFLCQRPDGALYGSLHFDPEACSFRELLLEDGYNVYQSEAHGLPLHLPGCKSPHRDPAPRGPARFLPLPGLPPAPPEPPGILAPQPPDVGSSDPLSMVYPSQGRSPSYAS

SEQ ID NO: 3076 - protein, 471 aa, Artificial Sequence
  Fusion Protein
HGEGTFTSDKSKQLEKRLARLFYEWLKAGGHSKGKPPPKGGGGGGGSGGGGSGGGGSADKTHTCPPCPAPELLGGPSVFLFPPKPKDTLMISRTPEVTCVVVDVSHEDPEVKFNWYVDGVEVHNAKTKPREEQYNNASRVVSVLTVLHQDWLNGKEYKCKVSNKALPAPIEKTISKAKGQPREPQVYTLPPSRDELTKNQVSLTCLVKGFYPSDIAVEWESNGQPENNYKTTPPVLDSDGSFFLYSKLTVDKSRWQQGNVFSCSVMHEALHNHYTQKSLSLSPGGGGSGSAHPIPDSSPLLQFGGQVRQRYLYTDDACQTEAHLEIREDGTVGGAADQSPESLLQLKALKPGVIQILGVKTSRFLCQRPDGALYGSLHFDPEACSFRELLLEDGYNVYQSEAHGLPLHLCGNKSPHRDPAPRGPARFLPLPGLPPAPPEPPGILAPQPPDVGSSDPLSMVGSQGRSPSYAS

SEQ ID NO: 3077 - protein, 472 aa, Artificial Sequence
  Fusion Protein
HGEGTFTSDKSKQLEKRLARLFYEWLKAGGHSKGKPPPKGGGGGGGSGGGGSGGGGSADKTHTCPPCPAPELLGGPSVFLFPPKPKDTLMISRTPEVTCVVVDVSHEDPEVKFNWYVDGVEVHNAKTKPREEQYNNASRVVSVLTVLHQDWLNGKEYKCKVSNKALPAPIEKTISKAKGQPREPQVYTLPPSRDELTKNQVSLTCLVKGFYPSDIAVEWESNGQPENNYKTTPPVLDSDGSFFLYSKLTVDKSRWQQGNVFSCSVMHEALHNHYTQKSLSLSPGGGGSGSAHPIPDSSPLLQFGGQVRQRYLYTDDACQTEAHLEIREDGTVGGAADQSPESLLQLKALKPGVIQILGVKTSRFLCQRPDGALYGSLHFDPEACSFRELLLEDGYNVYQSEAHGLPLHLCGNKSPHRDPAPRGPARFLPLPGLPPAPPEPPGILAPQPPDVGSSDPLSMVYPSQGRSPSYAS

SEQ ID NO: 3078 - protein, 473 aa, Artificial Sequence
  Fusion Protein
HGEGTFTSDKSKQLEKRLARLFYEWLKAGGHSKGKPPPKGGGGGGGSGGGGSGGGGSAESKYGPPCPPCPAPEFEGGPSVFLFPPKPKDTLMISRTPEVTCVVVDVSQEDPEVQFNWYVDGVEVHNAKTKPREEQFNSTYRVVSVLTVLHQDWLNGKEYKCKVSNKGLPSSIEKTISKAKGQPREPQVYTLPPSQEEMTKNQVSLTCLVKGFYPSDIAVEWESNGQPENNYKTTPPVLDSDGSFFLYSRLTVDKSRWQEGNVFSCSVMHEALHNHYTQKSLSLSLGGGGSGSAHPIPDSSPLLQFGGQVRQRYLYTDDACQTEAHLEIREDGTVGGAADQSPESLLQLKALKPGVIQILGVKTSRFLCQRPDGALYGSLHFDPEACSFRELLLEDGYNVYQSEAHGLPLHLPGCKSPHRDPAPRGPARFLPLPGLPPAPPEPPGILAPQPPDVGSSDPLSMVGSQGRSPSYAS

SEQ ID NO: 3079 - protein, 474 aa, Artificial Sequence
  Fusion Protein
HGEGTFTSDKSKQLEKRLARLFYEWLKAGGHSKGKPPPKGGGGGGGSGGGGSGGGGSAESKYGPPCPPCPAPEFEGGPSVFLFPPKPKDTLMISRTPEVTCVVVDVSQEDPEVQFNWYVDGVEVHNAKTKPREEQFNSTYRVVSVLTVLHQDWLNGKEYKCKVSNKGLPSSIEKTISKAKGQPREPQVYTLPPSQEEMTKNQVSLTCLVKGFYPSDIAVEWESNGQPENNYKTTPPVLDSDGSFFLYSRLTVDKSRWQEGNVFSCSVMHEALHNHYTQKSLSLSLGGGGSGSAHPIPDSSPLLQFGGQVRQRYLYTDDACQTEAHLEIREDGTVGGAADQSPESLLQLKALKPGVIQILGVKTSRFLCQRPDGALYGSLHFDPEACSFRELLLEDGYNVYQSEAHGLPLHLPGCKSPHRDPAPRGPARFLPLPGLPPAPPEPPGILAPQPPDVGSSDPLSMVYPSQGRSPSYAS

SEQ ID NO: 3080 - protein, 473 aa, Artificial Sequence
  Fusion Protein
HGEGTFTSDKSKQLEKRLARLFYEWLKAGGHSKGKPPPKGGGGGGGSGGGGSGGGGSAESKYGPPCPPCPAPEFEGGPSVFLFPPKPKDTLMISRTPEVTCVVVDVSQEDPEVQFNWYVDGVEVHNAKTKPREEQFNSTYRVVSVLTVLHQDWLNGKEYKCKVSNKGLPSSIEKTISKAKGQPREPQVYTLPPSQEEMTKNQVSLTCLVKGFYPSDIAVEWESNGQPENNYKTTPPVLDSDGSFFLYSRLTVDKSRWQEGNVFSCSVMHEALHNHYTQKSLSLSLGGGGSGSAHPIPDSSPLLQFGGQVRQRYLYTDDACQTEAHLEIREDGTVGGAADQSPESLLQLKALKPGVIQILGVKTSRFLCQRPDGALYGSLHFDPEACSFRELLLEDGYNVYQSEAHGLPLHLCGNKSPHRDPAPRGPARFLPLPGLPPAPPEPPGILAPQPPDVGSSDPLSMVGSQGRSPSYAS

SEQ ID NO: 3081 - protein, 474 aa, Artificial Sequence
  Fusion Protein
HGEGTFTSDKSKQLEKRLARLFYEWLKAGGHSKGKPPPKGGGGGGGSGGGGSGGGGSAESKYGPPCPPCPAPEFEGGPSVFLFPPKPKDTLMISRTPEVTCVVVDVSQEDPEVQFNWYVDGVEVHNAKTKPREEQFNSTYRVVSVLTVLHQDWLNGKEYKCKVSNKGLPSSIEKTISKAKGQPREPQVYTLPPSQEEMTKNQVSLTCLVKGFYPSDIAVEWESNGQPENNYKTTPPVLDSDGSFFLYSRLTVDKSRWQEGNVFSCSVMHEALHNHYTQKSLSLSLGGGGSGSAHPIPDSSPLLQFGGQVRQRYLYTDDACQTEAHLEIREDGTVGGAADQSPESLLQLKALKPGVIQILGVKTSRFLCQRPDGALYGSLHFDPEACSFRELLLEDGYNVYQSEAHGLPLHLCGNKSPHRDPAPRGPARFLPLPGLPPAPPEPPGILAPQPPDVGSSDPLSMVYPSQGRSPSYAS

SEQ ID NO: 3082 - protein, 471 aa, Artificial Sequence
  Fusion Protein
HGEGTFTSDKSKQLEKRLARLFYEWLKAGGPSSIKPPPKGGGGGGGSGGGGSGGGGSADKTHTCPPCPAPEAAGGPSVFLFPPKPKDTLMISRTPEVTCVVVDVSHEDPEVKFNWYVDGVEVHNAKTKPREEQYNSTYRVVSVLTVLHQDWLNGKEYKCKVSNKALPAPIEKTISKAKGQPREPQVYTLPPSRDELTKNQVSLTCLVKGFYPSDIAVEWESNGQPENNYKTTPPVLDSDGSFFLYSKLTVDKSRWQQGNVFSCSVMHEALHNHYTQKSLSLSPGGGGSGSAHPIPDSSPLLQFGGQVRQRYLYTDDACQTEAHLEIREDGTVGGAADQSPESLLQLKALKPGVIQILGVKTSRFLCQRPDGALYGSLHFDPEACSFRELLLEDGYNVYQSEAHGLPLHLPGCKSPHRDPAPRGPARFLPLPGLPPAPPEPPGILAPQPPDVGSSDPLSMVGSQGRSPSYAS

SEQ ID NO: 3083 - protein, 472 aa, Artificial Sequence
  Fusion Protein
HGEGTFTSDKSKQLEKRLARLFYEWLKAGGPSSIKPPPKGGGGGGGSGGGGSGGGGSADKTHTCPPCPAPEAAGGPSVFLFPPKPKDTLMISRTPEVTCVVVDVSHEDPEVKFNWYVDGVEVHNAKTKPREEQYNSTYRVVSVLTVLHQDWLNGKEYKCKVSNKALPAPIEKTISKAKGQPREPQVYTLPPSRDELTKNQVSLTCLVKGFYPSDIAVEWESNGQPENNYKTTPPVLDSDGSFFLYSKLTVDKSRWQQGNVFSCSVMHEALHNHYTQKSLSLSPGGGGSGSAHPIPDSSPLLQFGGQVRQRYLYTDDACQTEAHLEIREDGTVGGAADQSPESLLQLKALKPGVIQILGVKTSRFLCQRPDGALYGSLHFDPEACSFRELLLEDGYNVYQSEAHGLPLHLPGCKSPHRDPAPRGPARFLPLPGLPPAPPEPPGILAPQPPDVGSSDPLSMVYPSQGRSPSYAS

SEQ ID NO: 3084 - protein, 471 aa, Artificial Sequence
  Fusion Protein
HGEGTFTSDKSKQLEKRLARLFYEWLKAGGPSSIKPPPKGGGGGGGSGGGGSGGGGSADKTHTCPPCPAPEAAGGPSVFLFPPKPKDTLMISRTPEVTCVVVDVSHEDPEVKFNWYVDGVEVHNAKTKPREEQYNSTYRVVSVLTVLHQDWLNGKEYKCKVSNKALPAPIEKTISKAKGQPREPQVYTLPPSRDELTKNQVSLTCLVKGFYPSDIAVEWESNGQPENNYKTTPPVLDSDGSFFLYSKLTVDKSRWQQGNVFSCSVMHEALHNHYTQKSLSLSPGGGGSGSAHPIPDSSPLLQFGGQVRQRYLYTDDACQTEAHLEIREDGTVGGAADQSPESLLQLKALKPGVIQILGVKTSRFLCQRPDGALYGSLHFDPEACSFRELLLEDGYNVYQSEAHGLPLHLCGNKSPHRDPAPRGPARFLPLPGLPPAPPEPPGILAPQPPDVGSSDPLSMVGSQGRSPSYAS

SEQ ID NO: 3085 - protein, 472 aa, Artificial Sequence
  Fusion Protein
HGEGTFTSDKSKQLEKRLARLFYEWLKAGGPSSIKPPPKGGGGGGGSGGGGSGGGGSADKTHTCPPCPAPEAAGGPSVFLFPPKPKDTLMISRTPEVTCVVVDVSHEDPEVKFNWYVDGVEVHNAKTKPREEQYNSTYRVVSVLTVLHQDWLNGKEYKCKVSNKALPAPIEKTISKAKGQPREPQVYTLPPSRDELTKNQVSLTCLVKGFYPSDIAVEWESNGQPENNYKTTPPVLDSDGSFFLYSKLTVDKSRWQQGNVFSCSVMHEALHNHYTQKSLSLSPGGGGSGSAHPIPDSSPLLQFGGQVRQRYLYTDDACQTEAHLEIREDGTVGGAADQSPESLLQLKALKPGVIQILGVKTSRFLCQRPDGALYGSLHFDPEACSFRELLLEDGYNVYQSEAHGLPLHLCGNKSPHRDPAPRGPARFLPLPGLPPAPPEPPGILAPQPPDVGSSDPLSMVYPSQGRSPSYAS

SEQ ID NO: 3086 - protein, 471 aa, Artificial Sequence
  Fusion Protein
HGEGTFTSDKSKQLEKRLARLFYEWLKAGGPSSIKPPPKGGGGGGGSGGGGSGGGGSADKTHTCPPCPAPELLGGPSVFLFPPKPKDTLMISRTPEVTCVVVDVSHEDPEVKFNWYVDGVEVHNAKTKPREEQYNNASRVVSVLTVLHQDWLNGKEYKCKVSNKALPAPIEKTISKAKGQPREPQVYTLPPSRDELTKNQVSLTCLVKGFYPSDIAVEWESNGQPENNYKTTPPVLDSDGSFFLYSKLTVDKSRWQQGNVFSCSVMHEALHNHYTQKSLSLSPGGGGSGSAHPIPDSSPLLQFGGQVRQRYLYTDDACQTEAHLEIREDGTVGGAADQSPESLLQLKALKPGVIQILGVKTSRFLCQRPDGALYGSLHFDPEACSFRELLLEDGYNVYQSEAHGLPLHLPGCKSPHRDPAPRGPARFLPLPGLPPAPPEPPGILAPQPPDVGSSDPLSMVGSQGRSPSYAS

SEQ ID NO: 3087 - protein, 472 aa, Artificial Sequence
  Fusion Protein
HGEGTFTSDKSKQLEKRLARLFYEWLKAGGPSSIKPPPKGGGGGGGSGGGGSGGGGSADKTHTCPPCPAPELLGGPSVFLFPPKPKDTLMISRTPEVTCVVVDVSHEDPEVKFNWYVDGVEVHNAKTKPREEQYNNASRVVSVLTVLHQDWLNGKEYKCKVSNKALPAPIEKTISKAKGQPREPQVYTLPPSRDELTKNQVSLTCLVKGFYPSDIAVEWESNGQPENNYKTTPPVLDSDGSFFLYSKLTVDKSRWQQGNVFSCSVMHEALHNHYTQKSLSLSPGGGGSGSAHPIPDSSPLLQFGGQVRQRYLYTDDACQTEAHLEIREDGTVGGAADQSPESLLQLKALKPGVIQILGVKTSRFLCQRPDGALYGSLHFDPEACSFRELLLEDGYNVYQSEAHGLPLHLPGCKSPHRDPAPRGPARFLPLPGLPPAPPEPPGILAPQPPDVGSSDPLSMVYPSQGRSPSYAS

SEQ ID NO: 3088 - protein, 471 aa, Artificial Sequence
  Fusion Protein
HGEGTFTSDKSKQLEKRLARLFYEWLKAGGPSSIKPPPKGGGGGGGSGGGGSGGGGSADKTHTCPPCPAPELLGGPSVFLFPPKPKDTLMISRTPEVTCVVVDVSHEDPEVKFNWYVDGVEVHNAKTKPREEQYNNASRVVSVLTVLHQDWLNGKEYKCKVSNKALPAPIEKTISKAKGQPREPQVYTLPPSRDELTKNQVSLTCLVKGFYPSDIAVEWESNGQPENNYKTTPPVLDSDGSFFLYSKLTVDKSRWQQGNVFSCSVMHEALHNHYTQKSLSLSPGGGGSGSAHPIPDSSPLLQFGGQVRQRYLYTDDACQTEAHLEIREDGTVGGAADQSPESLLQLKALKPGVIQILGVKTSRFLCQRPDGALYGSLHFDPEACSFRELLLEDGYNVYQSEAHGLPLHLCGNKSPHRDPAPRGPARFLPLPGLPPAPPEPPGILAPQPPDVGSSDPLSMVGSQGRSPSYAS

SEQ ID NO: 3089 - protein, 472 aa, Artificial Sequence
  Fusion Protein
HGEGTFTSDKSKQLEKRLARLFYEWLKAGGPSSIKPPPKGGGGGGGSGGGGSGGGGSADKTHTCPPCPAPELLGGPSVFLFPPKPKDTLMISRTPEVTCVVVDVSHEDPEVKFNWYVDGVEVHNAKTKPREEQYNNASRVVSVLTVLHQDWLNGKEYKCKVSNKALPAPIEKTISKAKGQPREPQVYTLPPSRDELTKNQVSLTCLVKGFYPSDIAVEWESNGQPENNYKTTPPVLDSDGSFFLYSKLTVDKSRWQQGNVFSCSVMHEALHNHYTQKSLSLSPGGGGSGSAHPIPDSSPLLQFGGQVRQRYLYTDDACQTEAHLEIREDGTVGGAADQSPESLLQLKALKPGVIQILGVKTSRFLCQRPDGALYGSLHFDPEACSFRELLLEDGYNVYQSEAHGLPLHLCGNKSPHRDPAPRGPARFLPLPGLPPAPPEPPGILAPQPPDVGSSDPLSMVYPSQGRSPSYAS

SEQ ID NO: 3090 - protein, 473 aa, Artificial Sequence
  Fusion Protein
HGEGTFTSDKSKQLEKRLARLFYEWLKAGGPSSIKPPPKGGGGGGGSGGGGSGGGGSAESKYGPPCPPCPAPEFEGGPSVFLFPPKPKDTLMISRTPEVTCVVVDVSQEDPEVQFNWYVDGVEVHNAKTKPREEQFNSTYRVVSVLTVLHQDWLNGKEYKCKVSNKGLPSSIEKTISKAKGQPREPQVYTLPPSQEEMTKNQVSLTCLVKGFYPSDIAVEWESNGQPENNYKTTPPVLDSDGSFFLYSRLTVDKSRWQEGNVFSCSVMHEALHNHYTQKSLSLSLGGGGSGSAHPIPDSSPLLQFGGQVRQRYLYTDDACQTEAHLEIREDGTVGGAADQSPESLLQLKALKPGVIQILGVKTSRFLCQRPDGALYGSLHFDPEACSFRELLLEDGYNVYQSEAHGLPLHLPGCKSPHRDPAPRGPARFLPLPGLPPAPPEPPGILAPQPPDVGSSDPLSMVGSQGRSPSYAS

SEQ ID NO: 3091 - protein, 474 aa, Artificial Sequence
  Fusion Protein
HGEGTFTSDKSKQLEKRLARLFYEWLKAGGPSSIKPPPKGGGGGGGSGGGGSGGGGSAESKYGPPCPPCPAPEFEGGPSVFLFPPKPKDTLMISRTPEVTCVVVDVSQEDPEVQFNWYVDGVEVHNAKTKPREEQFNSTYRVVSVLTVLHQDWLNGKEYKCKVSNKGLPSSIEKTISKAKGQPREPQVYTLPPSQEEMTKNQVSLTCLVKGFYPSDIAVEWESNGQPENNYKTTPPVLDSDGSFFLYSRLTVDKSRWQEGNVFSCSVMHEALHNHYTQKSLSLSLGGGGSGSAHPIPDSSPLLQFGGQVRQRYLYTDDACQTEAHLEIREDGTVGGAADQSPESLLQLKALKPGVIQILGVKTSRFLCQRPDGALYGSLHFDPEACSFRELLLEDGYNVYQSEAHGLPLHLPGCKSPHRDPAPRGPARFLPLPGLPPAPPEPPGILAPQPPDVGSSDPLSMVYPSQGRSPSYAS

SEQ ID NO: 3092 - protein, 473 aa, Artificial Sequence
  Fusion Protein
HGEGTFTSDKSKQLEKRLARLFYEWLKAGGPSSIKPPPKGGGGGGGSGGGGSGGGGSAESKYGPPCPPCPAPEFEGGPSVFLFPPKPKDTLMISRTPEVTCVVVDVSQEDPEVQFNWYVDGVEVHNAKTKPREEQFNSTYRVVSVLTVLHQDWLNGKEYKCKVSNKGLPSSIEKTISKAKGQPREPQVYTLPPSQEEMTKNQVSLTCLVKGFYPSDIAVEWESNGQPENNYKTTPPVLDSDGSFFLYSRLTVDKSRWQEGNVFSCSVMHEALHNHYTQKSLSLSLGGGGSGSAHPIPDSSPLLQFGGQVRQRYLYTDDACQTEAHLEIREDGTVGGAADQSPESLLQLKALKPGVIQILGVKTSRFLCQRPDGALYGSLHFDPEACSFRELLLEDGYNVYQSEAHGLPLHLCGNKSPHRDPAPRGPARFLPLPGLPPAPPEPPGILAPQPPDVGSSDPLSMVGSQGRSPSYAS

SEQ ID NO: 3093 - protein, 474 aa, Artificial Sequence
  Fusion Protein
HGEGTFTSDKSKQLEKRLARLFYEWLKAGGPSSIKPPPKGGGGGGGSGGGGSGGGGSAESKYGPPCPPCPAPEFEGGPSVFLFPPKPKDTLMISRTPEVTCVVVDVSQEDPEVQFNWYVDGVEVHNAKTKPREEQFNSTYRVVSVLTVLHQDWLNGKEYKCKVSNKGLPSSIEKTISKAKGQPREPQVYTLPPSQEEMTKNQVSLTCLVKGFYPSDIAVEWESNGQPENNYKTTPPVLDSDGSFFLYSRLTVDKSRWQEGNVFSCSVMHEALHNHYTQKSLSLSLGGGGSGSAHPIPDSSPLLQFGGQVRQRYLYTDDACQTEAHLEIREDGTVGGAADQSPESLLQLKALKPGVIQILGVKTSRFLCQRPDGALYGSLHFDPEACSFRELLLEDGYNVYQSEAHGLPLHLCGNKSPHRDPAPRGPARFLPLPGLPPAPPEPPGILAPQPPDVGSSDPLSMVYPSQGRSPSYAS

SEQ ID NO: 3094 - protein, 471 aa, Artificial Sequence
  Fusion Protein
HGEGTFTSDKSKQLEKRLARLFYEWLKAGGPSKGKPPPKGGGGGGGSGGGGSGGGGSADKTHTCPPCPAPEAAGGPSVFLFPPKPKDTLMISRTPEVTCVVVDVSHEDPEVKFNWYVDGVEVHNAKTKPREEQYNSTYRVVSVLTVLHQDWLNGKEYKCKVSNKALPAPIEKTISKAKGQPREPQVYTLPPSRDELTKNQVSLTCLVKGFYPSDIAVEWESNGQPENNYKTTPPVLDSDGSFFLYSKLTVDKSRWQQGNVFSCSVMHEALHNHYTQKSLSLSPGGGGSGSAHPIPDSSPLLQFGGQVRQRYLYTDDACQTEAHLEIREDGTVGGAADQSPESLLQLKALKPGVIQILGVKTSRFLCQRPDGALYGSLHFDPEACSFRELLLEDGYNVYQSEAHGLPLHLPGCKSPHRDPAPRGPARFLPLPGLPPAPPEPPGILAPQPPDVGSSDPLSMVGSQGRSPSYAS

SEQ ID NO: 3095 - protein, 472 aa, Artificial Sequence
  Fusion Protein
HGEGTFTSDKSKQLEKRLARLFYEWLKAGGPSKGKPPPKGGGGGGGSGGGGSGGGGSADKTHTCPPCPAPEAAGGPSVFLFPPKPKDTLMISRTPEVTCVVVDVSHEDPEVKFNWYVDGVEVHNAKTKPREEQYNSTYRVVSVLTVLHQDWLNGKEYKCKVSNKALPAPIEKTISKAKGQPREPQVYTLPPSRDELTKNQVSLTCLVKGFYPSDIAVEWESNGQPENNYKTTPPVLDSDGSFFLYSKLTVDKSRWQQGNVFSCSVMHEALHNHYTQKSLSLSPGGGGSGSAHPIPDSSPLLQFGGQVRQRYLYTDDACQTEAHLEIREDGTVGGAADQSPESLLQLKALKPGVIQILGVKTSRFLCQRPDGALYGSLHFDPEACSFRELLLEDGYNVYQSEAHGLPLHLPGCKSPHRDPAPRGPARFLPLPGLPPAPPEPPGILAPQPPDVGSSDPLSMVYPSQGRSPSYAS

SEQ ID NO: 3096 - protein, 471 aa, Artificial Sequence
  Fusion Protein
HGEGTFTSDKSKQLEKRLARLFYEWLKAGGPSKGKPPPKGGGGGGGSGGGGSGGGGSADKTHTCPPCPAPEAAGGPSVFLFPPKPKDTLMISRTPEVTCVVVDVSHEDPEVKFNWYVDGVEVHNAKTKPREEQYNSTYRVVSVLTVLHQDWLNGKEYKCKVSNKALPAPIEKTISKAKGQPREPQVYTLPPSRDELTKNQVSLTCLVKGFYPSDIAVEWESNGQPENNYKTTPPVLDSDGSFFLYSKLTVDKSRWQQGNVFSCSVMHEALHNHYTQKSLSLSPGGGGSGSAHPIPDSSPLLQFGGQVRQRYLYTDDACQTEAHLEIREDGTVGGAADQSPESLLQLKALKPGVIQILGVKTSRFLCQRPDGALYGSLHFDPEACSFRELLLEDGYNVYQSEAHGLPLHLCGNKSPHRDPAPRGPARFLPLPGLPPAPPEPPGILAPQPPDVGSSDPLSMVGSQGRSPSYAS

SEQ ID NO: 3097 - protein, 472 aa, Artificial Sequence
  Fusion Protein
HGEGTFTSDKSKQLEKRLARLFYEWLKAGGPSKGKPPPKGGGGGGGSGGGGSGGGGSADKTHTCPPCPAPEAAGGPSVFLFPPKPKDTLMISRTPEVTCVVVDVSHEDPEVKFNWYVDGVEVHNAKTKPREEQYNSTYRVVSVLTVLHQDWLNGKEYKCKVSNKALPAPIEKTISKAKGQPREPQVYTLPPSRDELTKNQVSLTCLVKGFYPSDIAVEWESNGQPENNYKTTPPVLDSDGSFFLYSKLTVDKSRWQQGNVFSCSVMHEALHNHYTQKSLSLSPGGGGSGSAHPIPDSSPLLQFGGQVRQRYLYTDDACQTEAHLEIREDGTVGGAADQSPESLLQLKALKPGVIQILGVKTSRFLCQRPDGALYGSLHFDPEACSFRELLLEDGYNVYQSEAHGLPLHLCGNKSPHRDPAPRGPARFLPLPGLPPAPPEPPGILAPQPPDVGSSDPLSMVYPSQGRSPSYAS

SEQ ID NO: 3098 - protein, 471 aa, Artificial Sequence
  Fusion Protein
HGEGTFTSDKSKQLEKRLARLFYEWLKAGGPSKGKPPPKGGGGGGGSGGGGSGGGGSADKTHTCPPCPAPELLGGPSVFLFPPKPKDTLMISRTPEVTCVVVDVSHEDPEVKFNWYVDGVEVHNAKTKPREEQYNNASRVVSVLTVLHQDWLNGKEYKCKVSNKALPAPIEKTISKAKGQPREPQVYTLPPSRDELTKNQVSLTCLVKGFYPSDIAVEWESNGQPENNYKTTPPVLDSDGSFFLYSKLTVDKSRWQQGNVFSCSVMHEALHNHYTQKSLSLSPGGGGSGSAHPIPDSSPLLQFGGQVRQRYLYTDDACQTEAHLEIREDGTVGGAADQSPESLLQLKALKPGVIQILGVKTSRFLCQRPDGALYGSLHFDPEACSFRELLLEDGYNVYQSEAHGLPLHLPGCKSPHRDPAPRGPARFLPLPGLPPAPPEPPGILAPQPPDVGSSDPLSMVGSQGRSPSYAS

SEQ ID NO: 3099 - protein, 472 aa, Artificial Sequence
  Fusion Protein
HGEGTFTSDKSKQLEKRLARLFYEWLKAGGPSKGKPPPKGGGGGGGSGGGGSGGGGSADKTHTCPPCPAPELLGGPSVFLFPPKPKDTLMISRTPEVTCVVVDVSHEDPEVKFNWYVDGVEVHNAKTKPREEQYNNASRVVSVLTVLHQDWLNGKEYKCKVSNKALPAPIEKTISKAKGQPREPQVYTLPPSRDELTKNQVSLTCLVKGFYPSDIAVEWESNGQPENNYKTTPPVLDSDGSFFLYSKLTVDKSRWQQGNVFSCSVMHEALHNHYTQKSLSLSPGGGGSGSAHPIPDSSPLLQFGGQVRQRYLYTDDACQTEAHLEIREDGTVGGAADQSPESLLQLKALKPGVIQILGVKTSRFLCQRPDGALYGSLHFDPEACSFRELLLEDGYNVYQSEAHGLPLHLPGCKSPHRDPAPRGPARFLPLPGLPPAPPEPPGILAPQPPDVGSSDPLSMVYPSQGRSPSYAS

SEQ ID NO: 3100 - protein, 471 aa, Artificial Sequence
  Fusion Protein
HGEGTFTSDKSKQLEKRLARLFYEWLKAGGPSKGKPPPKGGGGGGGSGGGGSGGGGSADKTHTCPPCPAPELLGGPSVFLFPPKPKDTLMISRTPEVTCVVVDVSHEDPEVKFNWYVDGVEVHNAKTKPREEQYNNASRVVSVLTVLHQDWLNGKEYKCKVSNKALPAPIEKTISKAKGQPREPQVYTLPPSRDELTKNQVSLTCLVKGFYPSDIAVEWESNGQPENNYKTTPPVLDSDGSFFLYSKLTVDKSRWQQGNVFSCSVMHEALHNHYTQKSLSLSPGGGGSGSAHPIPDSSPLLQFGGQVRQRYLYTDDACQTEAHLEIREDGTVGGAADQSPESLLQLKALKPGVIQILGVKTSRFLCQRPDGALYGSLHFDPEACSFRELLLEDGYNVYQSEAHGLPLHLCGNKSPHRDPAPRGPARFLPLPGLPPAPPEPPGILAPQPPDVGSSDPLSMVGSQGRSPSYAS

SEQ ID NO: 3101 - protein, 472 aa, Artificial Sequence
  Fusion Protein
HGEGTFTSDKSKQLEKRLARLFYEWLKAGGPSKGKPPPKGGGGGGGSGGGGSGGGGSADKTHTCPPCPAPELLGGPSVFLFPPKPKDTLMISRTPEVTCVVVDVSHEDPEVKFNWYVDGVEVHNAKTKPREEQYNNASRVVSVLTVLHQDWLNGKEYKCKVSNKALPAPIEKTISKAKGQPREPQVYTLPPSRDELTKNQVSLTCLVKGFYPSDIAVEWESNGQPENNYKTTPPVLDSDGSFFLYSKLTVDKSRWQQGNVFSCSVMHEALHNHYTQKSLSLSPGGGGSGSAHPIPDSSPLLQFGGQVRQRYLYTDDACQTEAHLEIREDGTVGGAADQSPESLLQLKALKPGVIQILGVKTSRFLCQRPDGALYGSLHFDPEACSFRELLLEDGYNVYQSEAHGLPLHLCGNKSPHRDPAPRGPARFLPLPGLPPAPPEPPGILAPQPPDVGSSDPLSMVYPSQGRSPSYAS

SEQ ID NO: 3102 - protein, 473 aa, Artificial Sequence
  Fusion Protein
HGEGTFTSDKSKQLEKRLARLFYEWLKAGGPSKGKPPPKGGGGGGGSGGGGSGGGGSAESKYGPPCPPCPAPEFEGGPSVFLFPPKPKDTLMISRTPEVTCVVVDVSQEDPEVQFNWYVDGVEVHNAKTKPREEQFNSTYRVVSVLTVLHQDWLNGKEYKCKVSNKGLPSSIEKTISKAKGQPREPQVYTLPPSQEEMTKNQVSLTCLVKGFYPSDIAVEWESNGQPENNYKTTPPVLDSDGSFFLYSRLTVDKSRWQEGNVFSCSVMHEALHNHYTQKSLSLSLGGGGSGSAHPIPDSSPLLQFGGQVRQRYLYTDDACQTEAHLEIREDGTVGGAADQSPESLLQLKALKPGVIQILGVKTSRFLCQRPDGALYGSLHFDPEACSFRELLLEDGYNVYQSEAHGLPLHLPGCKSPHRDPAPRGPARFLPLPGLPPAPPEPPGILAPQPPDVGSSDPLSMVGSQGRSPSYAS

SEQ ID NO: 3103 - protein, 474 aa, Artificial Sequence
  Fusion Protein
HGEGTFTSDKSKQLEKRLARLFYEWLKAGGPSKGKPPPKGGGGGGGSGGGGSGGGGSAESKYGPPCPPCPAPEFEGGPSVFLFPPKPKDTLMISRTPEVTCVVVDVSQEDPEVQFNWYVDGVEVHNAKTKPREEQFNSTYRVVSVLTVLHQDWLNGKEYKCKVSNKGLPSSIEKTISKAKGQPREPQVYTLPPSQEEMTKNQVSLTCLVKGFYPSDIAVEWESNGQPENNYKTTPPVLDSDGSFFLYSRLTVDKSRWQEGNVFSCSVMHEALHNHYTQKSLSLSLGGGGSGSAHPIPDSSPLLQFGGQVRQRYLYTDDACQTEAHLEIREDGTVGGAADQSPESLLQLKALKPGVIQILGVKTSRFLCQRPDGALYGSLHFDPEACSFRELLLEDGYNVYQSEAHGLPLHLPGCKSPHRDPAPRGPARFLPLPGLPPAPPEPPGILAPQPPDVGSSDPLSMVYPSQGRSPSYAS

SEQ ID NO: 3104 - protein, 473 aa, Artificial Sequence
  Fusion Protein
HGEGTFTSDKSKQLEKRLARLFYEWLKAGGPSKGKPPPKGGGGGGGSGGGGSGGGGSAESKYGPPCPPCPAPEFEGGPSVFLFPPKPKDTLMISRTPEVTCVVVDVSQEDPEVQFNWYVDGVEVHNAKTKPREEQFNSTYRVVSVLTVLHQDWLNGKEYKCKVSNKGLPSSIEKTISKAKGQPREPQVYTLPPSQEEMTKNQVSLTCLVKGFYPSDIAVEWESNGQPENNYKTTPPVLDSDGSFFLYSRLTVDKSRWQEGNVFSCSVMHEALHNHYTQKSLSLSLGGGGSGSAHPIPDSSPLLQFGGQVRQRYLYTDDACQTEAHLEIREDGTVGGAADQSPESLLQLKALKPGVIQILGVKTSRFLCQRPDGALYGSLHFDPEACSFRELLLEDGYNVYQSEAHGLPLHLCGNKSPHRDPAPRGPARFLPLPGLPPAPPEPPGILAPQPPDVGSSDPLSMVGSQGRSPSYAS

SEQ ID NO: 3105 - protein, 474 aa, Artificial Sequence
  Fusion Protein
HGEGTFTSDKSKQLEKRLARLFYEWLKAGGPSKGKPPPKGGGGGGGSGGGGSGGGGSAESKYGPPCPPCPAPEFEGGPSVFLFPPKPKDTLMISRTPEVTCVVVDVSQEDPEVQFNWYVDGVEVHNAKTKPREEQFNSTYRVVSVLTVLHQDWLNGKEYKCKVSNKGLPSSIEKTISKAKGQPREPQVYTLPPSQEEMTKNQVSLTCLVKGFYPSDIAVEWESNGQPENNYKTTPPVLDSDGSFFLYSRLTVDKSRWQEGNVFSCSVMHEALHNHYTQKSLSLSLGGGGSGSAHPIPDSSPLLQFGGQVRQRYLYTDDACQTEAHLEIREDGTVGGAADQSPESLLQLKALKPGVIQILGVKTSRFLCQRPDGALYGSLHFDPEACSFRELLLEDGYNVYQSEAHGLPLHLCGNKSPHRDPAPRGPARFLPLPGLPPAPPEPPGILAPQPPDVGSSDPLSMVYPSQGRSPSYAS

SEQ ID NO: 3106 - protein, 471 aa, Artificial Sequence
  Fusion Protein
HGEGTFTSDKSKQLEKRLARLFYEWLIAGGHSKIRPPPKGGGGGGGSGGGGSGGGGSADKTHTCPPCPAPEAAGGPSVFLFPPKPKDTLMISRTPEVTCVVVDVSHEDPEVKFNWYVDGVEVHNAKTKPREEQYNSTYRVVSVLTVLHQDWLNGKEYKCKVSNKALPAPIEKTISKAKGQPREPQVYTLPPSRDELTKNQVSLTCLVKGFYPSDIAVEWESNGQPENNYKTTPPVLDSDGSFFLYSKLTVDKSRWQQGNVFSCSVMHEALHNHYTQKSLSLSPGGGGSGSAHPIPDSSPLLQFGGQVRQRYLYTDDACQTEAHLEIREDGTVGGAADQSPESLLQLKALKPGVIQILGVKTSRFLCQRPDGALYGSLHFDPEACSFRELLLEDGYNVYQSEAHGLPLHLPGCKSPHRDPAPRGPARFLPLPGLPPAPPEPPGILAPQPPDVGSSDPLSMVGSQGRSPSYAS

SEQ ID NO: 3107 - protein, 472 aa, Artificial Sequence
  Fusion Protein
HGEGTFTSDKSKQLEKRLARLFYEWLIAGGHSKIRPPPKGGGGGGGSGGGGSGGGGSADKTHTCPPCPAPEAAGGPSVFLFPPKPKDTLMISRTPEVTCVVVDVSHEDPEVKFNWYVDGVEVHNAKTKPREEQYNSTYRVVSVLTVLHQDWLNGKEYKCKVSNKALPAPIEKTISKAKGQPREPQVYTLPPSRDELTKNQVSLTCLVKGFYPSDIAVEWESNGQPENNYKTTPPVLDSDGSFFLYSKLTVDKSRWQQGNVFSCSVMHEALHNHYTQKSLSLSPGGGGSGSAHPIPDSSPLLQFGGQVRQRYLYTDDACQTEAHLEIREDGTVGGAADQSPESLLQLKALKPGVIQILGVKTSRFLCQRPDGALYGSLHFDPEACSFRELLLEDGYNVYQSEAHGLPLHLPGCKSPHRDPAPRGPARFLPLPGLPPAPPEPPGILAPQPPDVGSSDPLSMVYPSQGRSPSYAS

SEQ ID NO: 3108 - protein, 471 aa, Artificial Sequence
  Fusion Protein
HGEGTFTSDKSKQLEKRLARLFYEWLIAGGHSKIRPPPKGGGGGGGSGGGGSGGGGSADKTHTCPPCPAPEAAGGPSVFLFPPKPKDTLMISRTPEVTCVVVDVSHEDPEVKFNWYVDGVEVHNAKTKPREEQYNSTYRVVSVLTVLHQDWLNGKEYKCKVSNKALPAPIEKTISKAKGQPREPQVYTLPPSRDELTKNQVSLTCLVKGFYPSDIAVEWESNGQPENNYKTTPPVLDSDGSFFLYSKLTVDKSRWQQGNVFSCSVMHEALHNHYTQKSLSLSPGGGGSGSAHPIPDSSPLLQFGGQVRQRYLYTDDACQTEAHLEIREDGTVGGAADQSPESLLQLKALKPGVIQILGVKTSRFLCQRPDGALYGSLHFDPEACSFRELLLEDGYNVYQSEAHGLPLHLCGNKSPHRDPAPRGPARFLPLPGLPPAPPEPPGILAPQPPDVGSSDPLSMVGSQGRSPSYAS

SEQ ID NO: 3109 - protein, 472 aa, Artificial Sequence
  Fusion Protein
HGEGTFTSDKSKQLEKRLARLFYEWLIAGGHSKIRPPPKGGGGGGGSGGGGSGGGGSADKTHTCPPCPAPEAAGGPSVFLFPPKPKDTLMISRTPEVTCVVVDVSHEDPEVKFNWYVDGVEVHNAKTKPREEQYNSTYRVVSVLTVLHQDWLNGKEYKCKVSNKALPAPIEKTISKAKGQPREPQVYTLPPSRDELTKNQVSLTCLVKGFYPSDIAVEWESNGQPENNYKTTPPVLDSDGSFFLYSKLTVDKSRWQQGNVFSCSVMHEALHNHYTQKSLSLSPGGGGSGSAHPIPDSSPLLQFGGQVRQRYLYTDDACQTEAHLEIREDGTVGGAADQSPESLLQLKALKPGVIQILGVKTSRFLCQRPDGALYGSLHFDPEACSFRELLLEDGYNVYQSEAHGLPLHLCGNKSPHRDPAPRGPARFLPLPGLPPAPPEPPGILAPQPPDVGSSDPLSMVYPSQGRSPSYAS

SEQ ID NO: 3110 - protein, 471 aa, Artificial Sequence
  Fusion Protein
HGEGTFTSDKSKQLEKRLARLFYEWLIAGGHSKIRPPPKGGGGGGGSGGGGSGGGGSADKTHTCPPCPAPELLGGPSVFLFPPKPKDTLMISRTPEVTCVVVDVSHEDPEVKFNWYVDGVEVHNAKTKPREEQYNNASRVVSVLTVLHQDWLNGKEYKCKVSNKALPAPIEKTISKAKGQPREPQVYTLPPSRDELTKNQVSLTCLVKGFYPSDIAVEWESNGQPENNYKTTPPVLDSDGSFFLYSKLTVDKSRWQQGNVFSCSVMHEALHNHYTQKSLSLSPGGGGSGSAHPIPDSSPLLQFGGQVRQRYLYTDDACQTEAHLEIREDGTVGGAADQSPESLLQLKALKPGVIQILGVKTSRFLCQRPDGALYGSLHFDPEACSFRELLLEDGYNVYQSEAHGLPLHLPGCKSPHRDPAPRGPARFLPLPGLPPAPPEPPGILAPQPPDVGSSDPLSMVGSQGRSPSYAS

SEQ ID NO: 3111 - protein, 472 aa, Artificial Sequence
  Fusion Protein
HGEGTFTSDKSKQLEKRLARLFYEWLIAGGHSKIRPPPKGGGGGGGSGGGGSGGGGSADKTHTCPPCPAPELLGGPSVFLFPPKPKDTLMISRTPEVTCVVVDVSHEDPEVKFNWYVDGVEVHNAKTKPREEQYNNASRVVSVLTVLHQDWLNGKEYKCKVSNKALPAPIEKTISKAKGQPREPQVYTLPPSRDELTKNQVSLTCLVKGFYPSDIAVEWESNGQPENNYKTTPPVLDSDGSFFLYSKLTVDKSRWQQGNVFSCSVMHEALHNHYTQKSLSLSPGGGGSGSAHPIPDSSPLLQFGGQVRQRYLYTDDACQTEAHLEIREDGTVGGAADQSPESLLQLKALKPGVIQILGVKTSRFLCQRPDGALYGSLHFDPEACSFRELLLEDGYNVYQSEAHGLPLHLPGCKSPHRDPAPRGPARFLPLPGLPPAPPEPPGILAPQPPDVGSSDPLSMVYPSQGRSPSYAS

SEQ ID NO: 3112 - protein, 471 aa, Artificial Sequence
  Fusion Protein
HGEGTFTSDKSKQLEKRLARLFYEWLIAGGHSKIRPPPKGGGGGGGSGGGGSGGGGSADKTHTCPPCPAPELLGGPSVFLFPPKPKDTLMISRTPEVTCVVVDVSHEDPEVKFNWYVDGVEVHNAKTKPREEQYNNASRVVSVLTVLHQDWLNGKEYKCKVSNKALPAPIEKTISKAKGQPREPQVYTLPPSRDELTKNQVSLTCLVKGFYPSDIAVEWESNGQPENNYKTTPPVLDSDGSFFLYSKLTVDKSRWQQGNVFSCSVMHEALHNHYTQKSLSLSPGGGGSGSAHPIPDSSPLLQFGGQVRQRYLYTDDACQTEAHLEIREDGTVGGAADQSPESLLQLKALKPGVIQILGVKTSRFLCQRPDGALYGSLHFDPEACSFRELLLEDGYNVYQSEAHGLPLHLCGNKSPHRDPAPRGPARFLPLPGLPPAPPEPPGILAPQPPDVGSSDPLSMVGSQGRSPSYAS

SEQ ID NO: 3113 - protein, 472 aa, Artificial Sequence
  Fusion Protein
HGEGTFTSDKSKQLEKRLARLFYEWLIAGGHSKIRPPPKGGGGGGGSGGGGSGGGGSADKTHTCPPCPAPELLGGPSVFLFPPKPKDTLMISRTPEVTCVVVDVSHEDPEVKFNWYVDGVEVHNAKTKPREEQYNNASRVVSVLTVLHQDWLNGKEYKCKVSNKALPAPIEKTISKAKGQPREPQVYTLPPSRDELTKNQVSLTCLVKGFYPSDIAVEWESNGQPENNYKTTPPVLDSDGSFFLYSKLTVDKSRWQQGNVFSCSVMHEALHNHYTQKSLSLSPGGGGSGSAHPIPDSSPLLQFGGQVRQRYLYTDDACQTEAHLEIREDGTVGGAADQSPESLLQLKALKPGVIQILGVKTSRFLCQRPDGALYGSLHFDPEACSFRELLLEDGYNVYQSEAHGLPLHLCGNKSPHRDPAPRGPARFLPLPGLPPAPPEPPGILAPQPPDVGSSDPLSMVYPSQGRSPSYAS

SEQ ID NO: 3114 - protein, 473 aa, Artificial Sequence
  Fusion Protein
HGEGTFTSDKSKQLEKRLARLFYEWLIAGGHSKIRPPPKGGGGGGGSGGGGSGGGGSAESKYGPPCPPCPAPEFEGGPSVFLFPPKPKDTLMISRTPEVTCVVVDVSQEDPEVQFNWYVDGVEVHNAKTKPREEQFNSTYRVVSVLTVLHQDWLNGKEYKCKVSNKGLPSSIEKTISKAKGQPREPQVYTLPPSQEEMTKNQVSLTCLVKGFYPSDIAVEWESNGQPENNYKTTPPVLDSDGSFFLYSRLTVDKSRWQEGNVFSCSVMHEALHNHYTQKSLSLSLGGGGSGSAHPIPDSSPLLQFGGQVRQRYLYTDDACQTEAHLEIREDGTVGGAADQSPESLLQLKALKPGVIQILGVKTSRFLCQRPDGALYGSLHFDPEACSFRELLLEDGYNVYQSEAHGLPLHLPGCKSPHRDPAPRGPARFLPLPGLPPAPPEPPGILAPQPPDVGSSDPLSMVGSQGRSPSYAS

SEQ ID NO: 3115 - protein, 474 aa, Artificial Sequence
  Fusion Protein
HGEGTFTSDKSKQLEKRLARLFYEWLIAGGHSKIRPPPKGGGGGGGSGGGGSGGGGSAESKYGPPCPPCPAPEFEGGPSVFLFPPKPKDTLMISRTPEVTCVVVDVSQEDPEVQFNWYVDGVEVHNAKTKPREEQFNSTYRVVSVLTVLHQDWLNGKEYKCKVSNKGLPSSIEKTISKAKGQPREPQVYTLPPSQEEMTKNQVSLTCLVKGFYPSDIAVEWESNGQPENNYKTTPPVLDSDGSFFLYSRLTVDKSRWQEGNVFSCSVMHEALHNHYTQKSLSLSLGGGGSGSAHPIPDSSPLLQFGGQVRQRYLYTDDACQTEAHLEIREDGTVGGAADQSPESLLQLKALKPGVIQILGVKTSRFLCQRPDGALYGSLHFDPEACSFRELLLEDGYNVYQSEAHGLPLHLPGCKSPHRDPAPRGPARFLPLPGLPPAPPEPPGILAPQPPDVGSSDPLSMVYPSQGRSPSYAS

SEQ ID NO: 3116 - protein, 473 aa, Artificial Sequence
  Fusion Protein
HGEGTFTSDKSKQLEKRLARLFYEWLIAGGHSKIRPPPKGGGGGGGSGGGGSGGGGSAESKYGPPCPPCPAPEFEGGPSVFLFPPKPKDTLMISRTPEVTCVVVDVSQEDPEVQFNWYVDGVEVHNAKTKPREEQFNSTYRVVSVLTVLHQDWLNGKEYKCKVSNKGLPSSIEKTISKAKGQPREPQVYTLPPSQEEMTKNQVSLTCLVKGFYPSDIAVEWESNGQPENNYKTTPPVLDSDGSFFLYSRLTVDKSRWQEGNVFSCSVMHEALHNHYTQKSLSLSLGGGGSGSAHPIPDSSPLLQFGGQVRQRYLYTDDACQTEAHLEIREDGTVGGAADQSPESLLQLKALKPGVIQILGVKTSRFLCQRPDGALYGSLHFDPEACSFRELLLEDGYNVYQSEAHGLPLHLCGNKSPHRDPAPRGPARFLPLPGLPPAPPEPPGILAPQPPDVGSSDPLSMVGSQGRSPSYAS

SEQ ID NO: 3117 - protein, 474 aa, Artificial Sequence
  Fusion Protein
HGEGTFTSDKSKQLEKRLARLFYEWLIAGGHSKIRPPPKGGGGGGGSGGGGSGGGGSAESKYGPPCPPCPAPEFEGGPSVFLFPPKPKDTLMISRTPEVTCVVVDVSQEDPEVQFNWYVDGVEVHNAKTKPREEQFNSTYRVVSVLTVLHQDWLNGKEYKCKVSNKGLPSSIEKTISKAKGQPREPQVYTLPPSQEEMTKNQVSLTCLVKGFYPSDIAVEWESNGQPENNYKTTPPVLDSDGSFFLYSRLTVDKSRWQEGNVFSCSVMHEALHNHYTQKSLSLSLGGGGSGSAHPIPDSSPLLQFGGQVRQRYLYTDDACQTEAHLEIREDGTVGGAADQSPESLLQLKALKPGVIQILGVKTSRFLCQRPDGALYGSLHFDPEACSFRELLLEDGYNVYQSEAHGLPLHLCGNKSPHRDPAPRGPARFLPLPGLPPAPPEPPGILAPQPPDVGSSDPLSMVYPSQGRSPSYAS

SEQ ID NO: 3118 - protein, 471 aa, Artificial Sequence
  Fusion Protein
HGEGTFTSDKSKQLEKRLARLFFEWLKAGGHSSIKPPPKGGGGGGGSGGGGSGGGGSADKTHTCPPCPAPEAAGGPSVFLFPPKPKDTLMISRTPEVTCVVVDVSHEDPEVKFNWYVDGVEVHNAKTKPREEQYNSTYRVVSVLTVLHQDWLNGKEYKCKVSNKALPAPIEKTISKAKGQPREPQVYTLPPSRDELTKNQVSLTCLVKGFYPSDIAVEWESNGQPENNYKTTPPVLDSDGSFFLYSKLTVDKSRWQQGNVFSCSVMHEALHNHYTQKSLSLSPGGGGSGSAHPIPDSSPLLQFGGQVRQRYLYTDDACQTEAHLEIREDGTVGGAADQSPESLLQLKALKPGVIQILGVKTSRFLCQRPDGALYGSLHFDPEACSFRELLLEDGYNVYQSEAHGLPLHLPGCKSPHRDPAPRGPARFLPLPGLPPAPPEPPGILAPQPPDVGSSDPLSMVGSQGRSPSYAS

SEQ ID NO: 3119 - protein, 472 aa, Artificial Sequence
  Fusion Protein
HGEGTFTSDKSKQLEKRLARLFFEWLKAGGHSSIKPPPKGGGGGGGSGGGGSGGGGSADKTHTCPPCPAPEAAGGPSVFLFPPKPKDTLMISRTPEVTCVVVDVSHEDPEVKFNWYVDGVEVHNAKTKPREEQYNSTYRVVSVLTVLHQDWLNGKEYKCKVSNKALPAPIEKTISKAKGQPREPQVYTLPPSRDELTKNQVSLTCLVKGFYPSDIAVEWESNGQPENNYKTTPPVLDSDGSFFLYSKLTVDKSRWQQGNVFSCSVMHEALHNHYTQKSLSLSPGGGGSGSAHPIPDSSPLLQFGGQVRQRYLYTDDACQTEAHLEIREDGTVGGAADQSPESLLQLKALKPGVIQILGVKTSRFLCQRPDGALYGSLHFDPEACSFRELLLEDGYNVYQSEAHGLPLHLPGCKSPHRDPAPRGPARFLPLPGLPPAPPEPPGILAPQPPDVGSSDPLSMVYPSQGRSPSYAS

SEQ ID NO: 3120 - protein, 471 aa, Artificial Sequence
  Fusion Protein
HGEGTFTSDKSKQLEKRLARLFFEWLKAGGHSSIKPPPKGGGGGGGSGGGGSGGGGSADKTHTCPPCPAPEAAGGPSVFLFPPKPKDTLMISRTPEVTCVVVDVSHEDPEVKFNWYVDGVEVHNAKTKPREEQYNSTYRVVSVLTVLHQDWLNGKEYKCKVSNKALPAPIEKTISKAKGQPREPQVYTLPPSRDELTKNQVSLTCLVKGFYPSDIAVEWESNGQPENNYKTTPPVLDSDGSFFLYSKLTVDKSRWQQGNVFSCSVMHEALHNHYTQKSLSLSPGGGGSGSAHPIPDSSPLLQFGGQVRQRYLYTDDACQTEAHLEIREDGTVGGAADQSPESLLQLKALKPGVIQILGVKTSRFLCQRPDGALYGSLHFDPEACSFRELLLEDGYNVYQSEAHGLPLHLCGNKSPHRDPAPRGPARFLPLPGLPPAPPEPPGILAPQPPDVGSSDPLSMVGSQGRSPSYAS

SEQ ID NO: 3121 - protein, 472 aa, Artificial Sequence
  Fusion Protein
HGEGTFTSDKSKQLEKRLARLFFEWLKAGGHSSIKPPPKGGGGGGGSGGGGSGGGGSADKTHTCPPCPAPEAAGGPSVFLFPPKPKDTLMISRTPEVTCVVVDVSHEDPEVKFNWYVDGVEVHNAKTKPREEQYNSTYRVVSVLTVLHQDWLNGKEYKCKVSNKALPAPIEKTISKAKGQPREPQVYTLPPSRDELTKNQVSLTCLVKGFYPSDIAVEWESNGQPENNYKTTPPVLDSDGSFFLYSKLTVDKSRWQQGNVFSCSVMHEALHNHYTQKSLSLSPGGGGSGSAHPIPDSSPLLQFGGQVRQRYLYTDDACQTEAHLEIREDGTVGGAADQSPESLLQLKALKPGVIQILGVKTSRFLCQRPDGALYGSLHFDPEACSFRELLLEDGYNVYQSEAHGLPLHLCGNKSPHRDPAPRGPARFLPLPGLPPAPPEPPGILAPQPPDVGSSDPLSMVYPSQGRSPSYAS

SEQ ID NO: 3122 - protein, 471 aa, Artificial Sequence
  Fusion Protein
HGEGTFTSDKSKQLEKRLARLFFEWLKAGGHSSIKPPPKGGGGGGGSGGGGSGGGGSADKTHTCPPCPAPELLGGPSVFLFPPKPKDTLMISRTPEVTCVVVDVSHEDPEVKFNWYVDGVEVHNAKTKPREEQYNNASRVVSVLTVLHQDWLNGKEYKCKVSNKALPAPIEKTISKAKGQPREPQVYTLPPSRDELTKNQVSLTCLVKGFYPSDIAVEWESNGQPENNYKTTPPVLDSDGSFFLYSKLTVDKSRWQQGNVFSCSVMHEALHNHYTQKSLSLSPGGGGSGSAHPIPDSSPLLQFGGQVRQRYLYTDDACQTEAHLEIREDGTVGGAADQSPESLLQLKALKPGVIQILGVKTSRFLCQRPDGALYGSLHFDPEACSFRELLLEDGYNVYQSEAHGLPLHLPGCKSPHRDPAPRGPARFLPLPGLPPAPPEPPGILAPQPPDVGSSDPLSMVGSQGRSPSYAS

SEQ ID NO: 3123 - protein, 472 aa, Artificial Sequence
  Fusion Protein
HGEGTFTSDKSKQLEKRLARLFFEWLKAGGHSSIKPPPKGGGGGGGSGGGGSGGGGSADKTHTCPPCPAPELLGGPSVFLFPPKPKDTLMISRTPEVTCVVVDVSHEDPEVKFNWYVDGVEVHNAKTKPREEQYNNASRVVSVLTVLHQDWLNGKEYKCKVSNKALPAPIEKTISKAKGQPREPQVYTLPPSRDELTKNQVSLTCLVKGFYPSDIAVEWESNGQPENNYKTTPPVLDSDGSFFLYSKLTVDKSRWQQGNVFSCSVMHEALHNHYTQKSLSLSPGGGGSGSAHPIPDSSPLLQFGGQVRQRYLYTDDACQTEAHLEIREDGTVGGAADQSPESLLQLKALKPGVIQILGVKTSRFLCQRPDGALYGSLHFDPEACSFRELLLEDGYNVYQSEAHGLPLHLPGCKSPHRDPAPRGPARFLPLPGLPPAPPEPPGILAPQPPDVGSSDPLSMVYPSQGRSPSYAS

SEQ ID NO: 3124 - protein, 471 aa, Artificial Sequence
  Fusion Protein
HGEGTFTSDKSKQLEKRLARLFFEWLKAGGHSSIKPPPKGGGGGGGSGGGGSGGGGSADKTHTCPPCPAPELLGGPSVFLFPPKPKDTLMISRTPEVTCVVVDVSHEDPEVKFNWYVDGVEVHNAKTKPREEQYNNASRVVSVLTVLHQDWLNGKEYKCKVSNKALPAPIEKTISKAKGQPREPQVYTLPPSRDELTKNQVSLTCLVKGFYPSDIAVEWESNGQPENNYKTTPPVLDSDGSFFLYSKLTVDKSRWQQGNVFSCSVMHEALHNHYTQKSLSLSPGGGGSGSAHPIPDSSPLLQFGGQVRQRYLYTDDACQTEAHLEIREDGTVGGAADQSPESLLQLKALKPGVIQILGVKTSRFLCQRPDGALYGSLHFDPEACSFRELLLEDGYNVYQSEAHGLPLHLCGNKSPHRDPAPRGPARFLPLPGLPPAPPEPPGILAPQPPDVGSSDPLSMVGSQGRSPSYAS

SEQ ID NO: 3125 - protein, 472 aa, Artificial Sequence
  Fusion Protein
HGEGTFTSDKSKQLEKRLARLFFEWLKAGGHSSIKPPPKGGGGGGGSGGGGSGGGGSADKTHTCPPCPAPELLGGPSVFLFPPKPKDTLMISRTPEVTCVVVDVSHEDPEVKFNWYVDGVEVHNAKTKPREEQYNNASRVVSVLTVLHQDWLNGKEYKCKVSNKALPAPIEKTISKAKGQPREPQVYTLPPSRDELTKNQVSLTCLVKGFYPSDIAVEWESNGQPENNYKTTPPVLDSDGSFFLYSKLTVDKSRWQQGNVFSCSVMHEALHNHYTQKSLSLSPGGGGSGSAHPIPDSSPLLQFGGQVRQRYLYTDDACQTEAHLEIREDGTVGGAADQSPESLLQLKALKPGVIQILGVKTSRFLCQRPDGALYGSLHFDPEACSFRELLLEDGYNVYQSEAHGLPLHLCGNKSPHRDPAPRGPARFLPLPGLPPAPPEPPGILAPQPPDVGSSDPLSMVYPSQGRSPSYAS

SEQ ID NO: 3126 - protein, 473 aa, Artificial Sequence
  Fusion Protein
HGEGTFTSDKSKQLEKRLARLFFEWLKAGGHSSIKPPPKGGGGGGGSGGGGSGGGGSAESKYGPPCPPCPAPEFEGGPSVFLFPPKPKDTLMISRTPEVTCVVVDVSQEDPEVQFNWYVDGVEVHNAKTKPREEQFNSTYRVVSVLTVLHQDWLNGKEYKCKVSNKGLPSSIEKTISKAKGQPREPQVYTLPPSQEEMTKNQVSLTCLVKGFYPSDIAVEWESNGQPENNYKTTPPVLDSDGSFFLYSRLTVDKSRWQEGNVFSCSVMHEALHNHYTQKSLSLSLGGGGSGSAHPIPDSSPLLQFGGQVRQRYLYTDDACQTEAHLEIREDGTVGGAADQSPESLLQLKALKPGVIQILGVKTSRFLCQRPDGALYGSLHFDPEACSFRELLLEDGYNVYQSEAHGLPLHLPGCKSPHRDPAPRGPARFLPLPGLPPAPPEPPGILAPQPPDVGSSDPLSMVGSQGRSPSYAS

SEQ ID NO: 3127 - protein, 474 aa, Artificial Sequence
  Fusion Protein
HGEGTFTSDKSKQLEKRLARLFFEWLKAGGHSSIKPPPKGGGGGGGSGGGGSGGGGSAESKYGPPCPPCPAPEFEGGPSVFLFPPKPKDTLMISRTPEVTCVVVDVSQEDPEVQFNWYVDGVEVHNAKTKPREEQFNSTYRVVSVLTVLHQDWLNGKEYKCKVSNKGLPSSIEKTISKAKGQPREPQVYTLPPSQEEMTKNQVSLTCLVKGFYPSDIAVEWESNGQPENNYKTTPPVLDSDGSFFLYSRLTVDKSRWQEGNVFSCSVMHEALHNHYTQKSLSLSLGGGGSGSAHPIPDSSPLLQFGGQVRQRYLYTDDACQTEAHLEIREDGTVGGAADQSPESLLQLKALKPGVIQILGVKTSRFLCQRPDGALYGSLHFDPEACSFRELLLEDGYNVYQSEAHGLPLHLPGCKSPHRDPAPRGPARFLPLPGLPPAPPEPPGILAPQPPDVGSSDPLSMVYPSQGRSPSYAS

SEQ ID NO: 3128 - protein, 473 aa, Artificial Sequence
  Fusion Protein
HGEGTFTSDKSKQLEKRLARLFFEWLKAGGHSSIKPPPKGGGGGGGSGGGGSGGGGSAESKYGPPCPPCPAPEFEGGPSVFLFPPKPKDTLMISRTPEVTCVVVDVSQEDPEVQFNWYVDGVEVHNAKTKPREEQFNSTYRVVSVLTVLHQDWLNGKEYKCKVSNKGLPSSIEKTISKAKGQPREPQVYTLPPSQEEMTKNQVSLTCLVKGFYPSDIAVEWESNGQPENNYKTTPPVLDSDGSFFLYSRLTVDKSRWQEGNVFSCSVMHEALHNHYTQKSLSLSLGGGGSGSAHPIPDSSPLLQFGGQVRQRYLYTDDACQTEAHLEIREDGTVGGAADQSPESLLQLKALKPGVIQILGVKTSRFLCQRPDGALYGSLHFDPEACSFRELLLEDGYNVYQSEAHGLPLHLCGNKSPHRDPAPRGPARFLPLPGLPPAPPEPPGILAPQPPDVGSSDPLSMVGSQGRSPSYAS

SEQ ID NO: 3129 - protein, 474 aa, Artificial Sequence
  Fusion Protein
HGEGTFTSDKSKQLEKRLARLFFEWLKAGGHSSIKPPPKGGGGGGGSGGGGSGGGGSAESKYGPPCPPCPAPEFEGGPSVFLFPPKPKDTLMISRTPEVTCVVVDVSQEDPEVQFNWYVDGVEVHNAKTKPREEQFNSTYRVVSVLTVLHQDWLNGKEYKCKVSNKGLPSSIEKTISKAKGQPREPQVYTLPPSQEEMTKNQVSLTCLVKGFYPSDIAVEWESNGQPENNYKTTPPVLDSDGSFFLYSRLTVDKSRWQEGNVFSCSVMHEALHNHYTQKSLSLSLGGGGSGSAHPIPDSSPLLQFGGQVRQRYLYTDDACQTEAHLEIREDGTVGGAADQSPESLLQLKALKPGVIQILGVKTSRFLCQRPDGALYGSLHFDPEACSFRELLLEDGYNVYQSEAHGLPLHLCGNKSPHRDPAPRGPARFLPLPGLPPAPPEPPGILAPQPPDVGSSDPLSMVYPSQGRSPSYAS

SEQ ID NO: 3130 - protein, 471 aa, Artificial Sequence
  Fusion Protein
HGEGTFTSDKSKQLEKRLARLFFEWLKAGGHSKGKPPPKGGGGGGGSGGGGSGGGGSADKTHTCPPCPAPEAAGGPSVFLFPPKPKDTLMISRTPEVTCVVVDVSHEDPEVKFNWYVDGVEVHNAKTKPREEQYNSTYRVVSVLTVLHQDWLNGKEYKCKVSNKALPAPIEKTISKAKGQPREPQVYTLPPSRDELTKNQVSLTCLVKGFYPSDIAVEWESNGQPENNYKTTPPVLDSDGSFFLYSKLTVDKSRWQQGNVFSCSVMHEALHNHYTQKSLSLSPGGGGSGSAHPIPDSSPLLQFGGQVRQRYLYTDDACQTEAHLEIREDGTVGGAADQSPESLLQLKALKPGVIQILGVKTSRFLCQRPDGALYGSLHFDPEACSFRELLLEDGYNVYQSEAHGLPLHLPGCKSPHRDPAPRGPARFLPLPGLPPAPPEPPGILAPQPPDVGSSDPLSMVGSQGRSPSYAS

SEQ ID NO: 3131 - protein, 472 aa, Artificial Sequence
  Fusion Protein
HGEGTFTSDKSKQLEKRLARLFFEWLKAGGHSKGKPPPKGGGGGGGSGGGGSGGGGSADKTHTCPPCPAPEAAGGPSVFLFPPKPKDTLMISRTPEVTCVVVDVSHEDPEVKFNWYVDGVEVHNAKTKPREEQYNSTYRVVSVLTVLHQDWLNGKEYKCKVSNKALPAPIEKTISKAKGQPREPQVYTLPPSRDELTKNQVSLTCLVKGFYPSDIAVEWESNGQPENNYKTTPPVLDSDGSFFLYSKLTVDKSRWQQGNVFSCSVMHEALHNHYTQKSLSLSPGGGGSGSAHPIPDSSPLLQFGGQVRQRYLYTDDACQTEAHLEIREDGTVGGAADQSPESLLQLKALKPGVIQILGVKTSRFLCQRPDGALYGSLHFDPEACSFRELLLEDGYNVYQSEAHGLPLHLPGCKSPHRDPAPRGPARFLPLPGLPPAPPEPPGILAPQPPDVGSSDPLSMVYPSQGRSPSYAS

SEQ ID NO: 3132 - protein, 471 aa, Artificial Sequence
  Fusion Protein
HGEGTFTSDKSKQLEKRLARLFFEWLKAGGHSKGKPPPKGGGGGGGSGGGGSGGGGSADKTHTCPPCPAPEAAGGPSVFLFPPKPKDTLMISRTPEVTCVVVDVSHEDPEVKFNWYVDGVEVHNAKTKPREEQYNSTYRVVSVLTVLHQDWLNGKEYKCKVSNKALPAPIEKTISKAKGQPREPQVYTLPPSRDELTKNQVSLTCLVKGFYPSDIAVEWESNGQPENNYKTTPPVLDSDGSFFLYSKLTVDKSRWQQGNVFSCSVMHEALHNHYTQKSLSLSPGGGGSGSAHPIPDSSPLLQFGGQVRQRYLYTDDACQTEAHLEIREDGTVGGAADQSPESLLQLKALKPGVIQILGVKTSRFLCQRPDGALYGSLHFDPEACSFRELLLEDGYNVYQSEAHGLPLHLCGNKSPHRDPAPRGPARFLPLPGLPPAPPEPPGILAPQPPDVGSSDPLSMVGSQGRSPSYAS

SEQ ID NO: 3133 - protein, 472 aa, Artificial Sequence
  Fusion Protein
HGEGTFTSDKSKQLEKRLARLFFEWLKAGGHSKGKPPPKGGGGGGGSGGGGSGGGGSADKTHTCPPCPAPEAAGGPSVFLFPPKPKDTLMISRTPEVTCVVVDVSHEDPEVKFNWYVDGVEVHNAKTKPREEQYNSTYRVVSVLTVLHQDWLNGKEYKCKVSNKALPAPIEKTISKAKGQPREPQVYTLPPSRDELTKNQVSLTCLVKGFYPSDIAVEWESNGQPENNYKTTPPVLDSDGSFFLYSKLTVDKSRWQQGNVFSCSVMHEALHNHYTQKSLSLSPGGGGSGSAHPIPDSSPLLQFGGQVRQRYLYTDDACQTEAHLEIREDGTVGGAADQSPESLLQLKALKPGVIQILGVKTSRFLCQRPDGALYGSLHFDPEACSFRELLLEDGYNVYQSEAHGLPLHLCGNKSPHRDPAPRGPARFLPLPGLPPAPPEPPGILAPQPPDVGSSDPLSMVYPSQGRSPSYAS

SEQ ID NO: 3134 - protein, 471 aa, Artificial Sequence
  Fusion Protein
HGEGTFTSDKSKQLEKRLARLFFEWLKAGGHSKGKPPPKGGGGGGGSGGGGSGGGGSADKTHTCPPCPAPELLGGPSVFLFPPKPKDTLMISRTPEVTCVVVDVSHEDPEVKFNWYVDGVEVHNAKTKPREEQYNNASRVVSVLTVLHQDWLNGKEYKCKVSNKALPAPIEKTISKAKGQPREPQVYTLPPSRDELTKNQVSLTCLVKGFYPSDIAVEWESNGQPENNYKTTPPVLDSDGSFFLYSKLTVDKSRWQQGNVFSCSVMHEALHNHYTQKSLSLSPGGGGSGSAHPIPDSSPLLQFGGQVRQRYLYTDDACQTEAHLEIREDGTVGGAADQSPESLLQLKALKPGVIQILGVKTSRFLCQRPDGALYGSLHFDPEACSFRELLLEDGYNVYQSEAHGLPLHLPGCKSPHRDPAPRGPARFLPLPGLPPAPPEPPGILAPQPPDVGSSDPLSMVGSQGRSPSYAS

SEQ ID NO: 3135 - protein, 472 aa, Artificial Sequence
  Fusion Protein
HGEGTFTSDKSKQLEKRLARLFFEWLKAGGHSKGKPPPKGGGGGGGSGGGGSGGGGSADKTHTCPPCPAPELLGGPSVFLFPPKPKDTLMISRTPEVTCVVVDVSHEDPEVKFNWYVDGVEVHNAKTKPREEQYNNASRVVSVLTVLHQDWLNGKEYKCKVSNKALPAPIEKTISKAKGQPREPQVYTLPPSRDELTKNQVSLTCLVKGFYPSDIAVEWESNGQPENNYKTTPPVLDSDGSFFLYSKLTVDKSRWQQGNVFSCSVMHEALHNHYTQKSLSLSPGGGGSGSAHPIPDSSPLLQFGGQVRQRYLYTDDACQTEAHLEIREDGTVGGAADQSPESLLQLKALKPGVIQILGVKTSRFLCQRPDGALYGSLHFDPEACSFRELLLEDGYNVYQSEAHGLPLHLPGCKSPHRDPAPRGPARFLPLPGLPPAPPEPPGILAPQPPDVGSSDPLSMVYPSQGRSPSYAS

SEQ ID NO: 3136 - protein, 471 aa, Artificial Sequence
  Fusion Protein
HGEGTFTSDKSKQLEKRLARLFFEWLKAGGHSKGKPPPKGGGGGGGSGGGGSGGGGSADKTHTCPPCPAPELLGGPSVFLFPPKPKDTLMISRTPEVTCVVVDVSHEDPEVKFNWYVDGVEVHNAKTKPREEQYNNASRVVSVLTVLHQDWLNGKEYKCKVSNKALPAPIEKTISKAKGQPREPQVYTLPPSRDELTKNQVSLTCLVKGFYPSDIAVEWESNGQPENNYKTTPPVLDSDGSFFLYSKLTVDKSRWQQGNVFSCSVMHEALHNHYTQKSLSLSPGGGGSGSAHPIPDSSPLLQFGGQVRQRYLYTDDACQTEAHLEIREDGTVGGAADQSPESLLQLKALKPGVIQILGVKTSRFLCQRPDGALYGSLHFDPEACSFRELLLEDGYNVYQSEAHGLPLHLCGNKSPHRDPAPRGPARFLPLPGLPPAPPEPPGILAPQPPDVGSSDPLSMVGSQGRSPSYAS

SEQ ID NO: 3137 - protein, 472 aa, Artificial Sequence
  Fusion Protein
HGEGTFTSDKSKQLEKRLARLFFEWLKAGGHSKGKPPPKGGGGGGGSGGGGSGGGGSADKTHTCPPCPAPELLGGPSVFLFPPKPKDTLMISRTPEVTCVVVDVSHEDPEVKFNWYVDGVEVHNAKTKPREEQYNNASRVVSVLTVLHQDWLNGKEYKCKVSNKALPAPIEKTISKAKGQPREPQVYTLPPSRDELTKNQVSLTCLVKGFYPSDIAVEWESNGQPENNYKTTPPVLDSDGSFFLYSKLTVDKSRWQQGNVFSCSVMHEALHNHYTQKSLSLSPGGGGSGSAHPIPDSSPLLQFGGQVRQRYLYTDDACQTEAHLEIREDGTVGGAADQSPESLLQLKALKPGVIQILGVKTSRFLCQRPDGALYGSLHFDPEACSFRELLLEDGYNVYQSEAHGLPLHLCGNKSPHRDPAPRGPARFLPLPGLPPAPPEPPGILAPQPPDVGSSDPLSMVYPSQGRSPSYAS

SEQ ID NO: 3138 - protein, 473 aa, Artificial Sequence
  Fusion Protein
HGEGTFTSDKSKQLEKRLARLFFEWLKAGGHSKGKPPPKGGGGGGGSGGGGSGGGGSAESKYGPPCPPCPAPEFEGGPSVFLFPPKPKDTLMISRTPEVTCVVVDVSQEDPEVQFNWYVDGVEVHNAKTKPREEQFNSTYRVVSVLTVLHQDWLNGKEYKCKVSNKGLPSSIEKTISKAKGQPREPQVYTLPPSQEEMTKNQVSLTCLVKGFYPSDIAVEWESNGQPENNYKTTPPVLDSDGSFFLYSRLTVDKSRWQEGNVFSCSVMHEALHNHYTQKSLSLSLGGGGSGSAHPIPDSSPLLQFGGQVRQRYLYTDDACQTEAHLEIREDGTVGGAADQSPESLLQLKALKPGVIQILGVKTSRFLCQRPDGALYGSLHFDPEACSFRELLLEDGYNVYQSEAHGLPLHLPGCKSPHRDPAPRGPARFLPLPGLPPAPPEPPGILAPQPPDVGSSDPLSMVGSQGRSPSYAS

SEQ ID NO: 3139 - protein, 474 aa, Artificial Sequence
  Fusion Protein
HGEGTFTSDKSKQLEKRLARLFFEWLKAGGHSKGKPPPKGGGGGGGSGGGGSGGGGSAESKYGPPCPPCPAPEFEGGPSVFLFPPKPKDTLMISRTPEVTCVVVDVSQEDPEVQFNWYVDGVEVHNAKTKPREEQFNSTYRVVSVLTVLHQDWLNGKEYKCKVSNKGLPSSIEKTISKAKGQPREPQVYTLPPSQEEMTKNQVSLTCLVKGFYPSDIAVEWESNGQPENNYKTTPPVLDSDGSFFLYSRLTVDKSRWQEGNVFSCSVMHEALHNHYTQKSLSLSLGGGGSGSAHPIPDSSPLLQFGGQVRQRYLYTDDACQTEAHLEIREDGTVGGAADQSPESLLQLKALKPGVIQILGVKTSRFLCQRPDGALYGSLHFDPEACSFRELLLEDGYNVYQSEAHGLPLHLPGCKSPHRDPAPRGPARFLPLPGLPPAPPEPPGILAPQPPDVGSSDPLSMVYPSQGRSPSYAS

SEQ ID NO: 3140 - protein, 473 aa, Artificial Sequence
  Fusion Protein
HGEGTFTSDKSKQLEKRLARLFFEWLKAGGHSKGKPPPKGGGGGGGSGGGGSGGGGSAESKYGPPCPPCPAPEFEGGPSVFLFPPKPKDTLMISRTPEVTCVVVDVSQEDPEVQFNWYVDGVEVHNAKTKPREEQFNSTYRVVSVLTVLHQDWLNGKEYKCKVSNKGLPSSIEKTISKAKGQPREPQVYTLPPSQEEMTKNQVSLTCLVKGFYPSDIAVEWESNGQPENNYKTTPPVLDSDGSFFLYSRLTVDKSRWQEGNVFSCSVMHEALHNHYTQKSLSLSLGGGGSGSAHPIPDSSPLLQFGGQVRQRYLYTDDACQTEAHLEIREDGTVGGAADQSPESLLQLKALKPGVIQILGVKTSRFLCQRPDGALYGSLHFDPEACSFRELLLEDGYNVYQSEAHGLPLHLCGNKSPHRDPAPRGPARFLPLPGLPPAPPEPPGILAPQPPDVGSSDPLSMVGSQGRSPSYAS

SEQ ID NO: 3141 - protein, 474 aa, Artificial Sequence
  Fusion Protein
HGEGTFTSDKSKQLEKRLARLFFEWLKAGGHSKGKPPPKGGGGGGGSGGGGSGGGGSAESKYGPPCPPCPAPEFEGGPSVFLFPPKPKDTLMISRTPEVTCVVVDVSQEDPEVQFNWYVDGVEVHNAKTKPREEQFNSTYRVVSVLTVLHQDWLNGKEYKCKVSNKGLPSSIEKTISKAKGQPREPQVYTLPPSQEEMTKNQVSLTCLVKGFYPSDIAVEWESNGQPENNYKTTPPVLDSDGSFFLYSRLTVDKSRWQEGNVFSCSVMHEALHNHYTQKSLSLSLGGGGSGSAHPIPDSSPLLQFGGQVRQRYLYTDDACQTEAHLEIREDGTVGGAADQSPESLLQLKALKPGVIQILGVKTSRFLCQRPDGALYGSLHFDPEACSFRELLLEDGYNVYQSEAHGLPLHLCGNKSPHRDPAPRGPARFLPLPGLPPAPPEPPGILAPQPPDVGSSDPLSMVYPSQGRSPSYAS

SEQ ID NO: 3142 - protein, 471 aa, Artificial Sequence
  Fusion Protein
HGEGTFTSDKSKQLEKRLARLFFEWLIAGGHSKIKPPPKGGGGGGGSGGGGSGGGGSADKTHTCPPCPAPEAAGGPSVFLFPPKPKDTLMISRTPEVTCVVVDVSHEDPEVKFNWYVDGVEVHNAKTKPREEQYNSTYRVVSVLTVLHQDWLNGKEYKCKVSNKALPAPIEKTISKAKGQPREPQVYTLPPSRDELTKNQVSLTCLVKGFYPSDIAVEWESNGQPENNYKTTPPVLDSDGSFFLYSKLTVDKSRWQQGNVFSCSVMHEALHNHYTQKSLSLSPGGGGSGSAHPIPDSSPLLQFGGQVRQRYLYTDDACQTEAHLEIREDGTVGGAADQSPESLLQLKALKPGVIQILGVKTSRFLCQRPDGALYGSLHFDPEACSFRELLLEDGYNVYQSEAHGLPLHLPGCKSPHRDPAPRGPARFLPLPGLPPAPPEPPGILAPQPPDVGSSDPLSMVGSQGRSPSYAS

SEQ ID NO: 3143 - protein, 472 aa, Artificial Sequence
  Fusion Protein
HGEGTFTSDKSKQLEKRLARLFFEWLIAGGHSKIKPPPKGGGGGGGSGGGGSGGGGSADKTHTCPPCPAPEAAGGPSVFLFPPKPKDTLMISRTPEVTCVVVDVSHEDPEVKFNWYVDGVEVHNAKTKPREEQYNSTYRVVSVLTVLHQDWLNGKEYKCKVSNKALPAPIEKTISKAKGQPREPQVYTLPPSRDELTKNQVSLTCLVKGFYPSDIAVEWESNGQPENNYKTTPPVLDSDGSFFLYSKLTVDKSRWQQGNVFSCSVMHEALHNHYTQKSLSLSPGGGGSGSAHPIPDSSPLLQFGGQVRQRYLYTDDACQTEAHLEIREDGTVGGAADQSPESLLQLKALKPGVIQILGVKTSRFLCQRPDGALYGSLHFDPEACSFRELLLEDGYNVYQSEAHGLPLHLPGCKSPHRDPAPRGPARFLPLPGLPPAPPEPPGILAPQPPDVGSSDPLSMVYPSQGRSPSYAS

SEQ ID NO: 3144 - protein, 471 aa, Artificial Sequence
  Fusion Protein
HGEGTFTSDKSKQLEKRLARLFFEWLIAGGHSKIKPPPKGGGGGGGSGGGGSGGGGSADKTHTCPPCPAPEAAGGPSVFLFPPKPKDTLMISRTPEVTCVVVDVSHEDPEVKFNWYVDGVEVHNAKTKPREEQYNSTYRVVSVLTVLHQDWLNGKEYKCKVSNKALPAPIEKTISKAKGQPREPQVYTLPPSRDELTKNQVSLTCLVKGFYPSDIAVEWESNGQPENNYKTTPPVLDSDGSFFLYSKLTVDKSRWQQGNVFSCSVMHEALHNHYTQKSLSLSPGGGGSGSAHPIPDSSPLLQFGGQVRQRYLYTDDACQTEAHLEIREDGTVGGAADQSPESLLQLKALKPGVIQILGVKTSRFLCQRPDGALYGSLHFDPEACSFRELLLEDGYNVYQSEAHGLPLHLCGNKSPHRDPAPRGPARFLPLPGLPPAPPEPPGILAPQPPDVGSSDPLSMVGSQGRSPSYAS

SEQ ID NO: 3145 - protein, 472 aa, Artificial Sequence
  Fusion Protein
HGEGTFTSDKSKQLEKRLARLFFEWLIAGGHSKIKPPPKGGGGGGGSGGGGSGGGGSADKTHTCPPCPAPEAAGGPSVFLFPPKPKDTLMISRTPEVTCVVVDVSHEDPEVKFNWYVDGVEVHNAKTKPREEQYNSTYRVVSVLTVLHQDWLNGKEYKCKVSNKALPAPIEKTISKAKGQPREPQVYTLPPSRDELTKNQVSLTCLVKGFYPSDIAVEWESNGQPENNYKTTPPVLDSDGSFFLYSKLTVDKSRWQQGNVFSCSVMHEALHNHYTQKSLSLSPGGGGSGSAHPIPDSSPLLQFGGQVRQRYLYTDDACQTEAHLEIREDGTVGGAADQSPESLLQLKALKPGVIQILGVKTSRFLCQRPDGALYGSLHFDPEACSFRELLLEDGYNVYQSEAHGLPLHLCGNKSPHRDPAPRGPARFLPLPGLPPAPPEPPGILAPQPPDVGSSDPLSMVYPSQGRSPSYAS

SEQ ID NO: 3146 - protein, 471 aa, Artificial Sequence
  Fusion Protein
HGEGTFTSDKSKQLEKRLARLFFEWLIAGGHSKIKPPPKGGGGGGGSGGGGSGGGGSADKTHTCPPCPAPELLGGPSVFLFPPKPKDTLMISRTPEVTCVVVDVSHEDPEVKFNWYVDGVEVHNAKTKPREEQYNNASRVVSVLTVLHQDWLNGKEYKCKVSNKALPAPIEKTISKAKGQPREPQVYTLPPSRDELTKNQVSLTCLVKGFYPSDIAVEWESNGQPENNYKTTPPVLDSDGSFFLYSKLTVDKSRWQQGNVFSCSVMHEALHNHYTQKSLSLSPGGGGSGSAHPIPDSSPLLQFGGQVRQRYLYTDDACQTEAHLEIREDGTVGGAADQSPESLLQLKALKPGVIQILGVKTSRFLCQRPDGALYGSLHFDPEACSFRELLLEDGYNVYQSEAHGLPLHLPGCKSPHRDPAPRGPARFLPLPGLPPAPPEPPGILAPQPPDVGSSDPLSMVGSQGRSPSYAS

SEQ ID NO: 3147 - protein, 472 aa, Artificial Sequence
  Fusion Protein
HGEGTFTSDKSKQLEKRLARLFFEWLIAGGHSKIKPPPKGGGGGGGSGGGGSGGGGSADKTHTCPPCPAPELLGGPSVFLFPPKPKDTLMISRTPEVTCVVVDVSHEDPEVKFNWYVDGVEVHNAKTKPREEQYNNASRVVSVLTVLHQDWLNGKEYKCKVSNKALPAPIEKTISKAKGQPREPQVYTLPPSRDELTKNQVSLTCLVKGFYPSDIAVEWESNGQPENNYKTTPPVLDSDGSFFLYSKLTVDKSRWQQGNVFSCSVMHEALHNHYTQKSLSLSPGGGGSGSAHPIPDSSPLLQFGGQVRQRYLYTDDACQTEAHLEIREDGTVGGAADQSPESLLQLKALKPGVIQILGVKTSRFLCQRPDGALYGSLHFDPEACSFRELLLEDGYNVYQSEAHGLPLHLPGCKSPHRDPAPRGPARFLPLPGLPPAPPEPPGILAPQPPDVGSSDPLSMVYPSQGRSPSYAS

SEQ ID NO: 3148 - protein, 471 aa, Artificial Sequence
  Fusion Protein
HGEGTFTSDKSKQLEKRLARLFFEWLIAGGHSKIKPPPKGGGGGGGSGGGGSGGGGSADKTHTCPPCPAPELLGGPSVFLFPPKPKDTLMISRTPEVTCVVVDVSHEDPEVKFNWYVDGVEVHNAKTKPREEQYNNASRVVSVLTVLHQDWLNGKEYKCKVSNKALPAPIEKTISKAKGQPREPQVYTLPPSRDELTKNQVSLTCLVKGFYPSDIAVEWESNGQPENNYKTTPPVLDSDGSFFLYSKLTVDKSRWQQGNVFSCSVMHEALHNHYTQKSLSLSPGGGGSGSAHPIPDSSPLLQFGGQVRQRYLYTDDACQTEAHLEIREDGTVGGAADQSPESLLQLKALKPGVIQILGVKTSRFLCQRPDGALYGSLHFDPEACSFRELLLEDGYNVYQSEAHGLPLHLCGNKSPHRDPAPRGPARFLPLPGLPPAPPEPPGILAPQPPDVGSSDPLSMVGSQGRSPSYAS

SEQ ID NO: 3149 - protein, 472 aa, Artificial Sequence
  Fusion Protein
HGEGTFTSDKSKQLEKRLARLFFEWLIAGGHSKIKPPPKGGGGGGGSGGGGSGGGGSADKTHTCPPCPAPELLGGPSVFLFPPKPKDTLMISRTPEVTCVVVDVSHEDPEVKFNWYVDGVEVHNAKTKPREEQYNNASRVVSVLTVLHQDWLNGKEYKCKVSNKALPAPIEKTISKAKGQPREPQVYTLPPSRDELTKNQVSLTCLVKGFYPSDIAVEWESNGQPENNYKTTPPVLDSDGSFFLYSKLTVDKSRWQQGNVFSCSVMHEALHNHYTQKSLSLSPGGGGSGSAHPIPDSSPLLQFGGQVRQRYLYTDDACQTEAHLEIREDGTVGGAADQSPESLLQLKALKPGVIQILGVKTSRFLCQRPDGALYGSLHFDPEACSFRELLLEDGYNVYQSEAHGLPLHLCGNKSPHRDPAPRGPARFLPLPGLPPAPPEPPGILAPQPPDVGSSDPLSMVYPSQGRSPSYAS

SEQ ID NO: 3150 - protein, 473 aa, Artificial Sequence
  Fusion Protein
HGEGTFTSDKSKQLEKRLARLFFEWLIAGGHSKIKPPPKGGGGGGGSGGGGSGGGGSAESKYGPPCPPCPAPEFEGGPSVFLFPPKPKDTLMISRTPEVTCVVVDVSQEDPEVQFNWYVDGVEVHNAKTKPREEQFNSTYRVVSVLTVLHQDWLNGKEYKCKVSNKGLPSSIEKTISKAKGQPREPQVYTLPPSQEEMTKNQVSLTCLVKGFYPSDIAVEWESNGQPENNYKTTPPVLDSDGSFFLYSRLTVDKSRWQEGNVFSCSVMHEALHNHYTQKSLSLSLGGGGSGSAHPIPDSSPLLQFGGQVRQRYLYTDDACQTEAHLEIREDGTVGGAADQSPESLLQLKALKPGVIQILGVKTSRFLCQRPDGALYGSLHFDPEACSFRELLLEDGYNVYQSEAHGLPLHLPGCKSPHRDPAPRGPARFLPLPGLPPAPPEPPGILAPQPPDVGSSDPLSMVGSQGRSPSYAS

SEQ ID NO: 3151 - protein, 474 aa, Artificial Sequence
  Fusion Protein
HGEGTFTSDKSKQLEKRLARLFFEWLIAGGHSKIKPPPKGGGGGGGSGGGGSGGGGSAESKYGPPCPPCPAPEFEGGPSVFLFPPKPKDTLMISRTPEVTCVVVDVSQEDPEVQFNWYVDGVEVHNAKTKPREEQFNSTYRVVSVLTVLHQDWLNGKEYKCKVSNKGLPSSIEKTISKAKGQPREPQVYTLPPSQEEMTKNQVSLTCLVKGFYPSDIAVEWESNGQPENNYKTTPPVLDSDGSFFLYSRLTVDKSRWQEGNVFSCSVMHEALHNHYTQKSLSLSLGGGGSGSAHPIPDSSPLLQFGGQVRQRYLYTDDACQTEAHLEIREDGTVGGAADQSPESLLQLKALKPGVIQILGVKTSRFLCQRPDGALYGSLHFDPEACSFRELLLEDGYNVYQSEAHGLPLHLPGCKSPHRDPAPRGPARFLPLPGLPPAPPEPPGILAPQPPDVGSSDPLSMVYPSQGRSPSYAS

SEQ ID NO: 3152 - protein, 473 aa, Artificial Sequence
  Fusion Protein
HGEGTFTSDKSKQLEKRLARLFFEWLIAGGHSKIKPPPKGGGGGGGSGGGGSGGGGSAESKYGPPCPPCPAPEFEGGPSVFLFPPKPKDTLMISRTPEVTCVVVDVSQEDPEVQFNWYVDGVEVHNAKTKPREEQFNSTYRVVSVLTVLHQDWLNGKEYKCKVSNKGLPSSIEKTISKAKGQPREPQVYTLPPSQEEMTKNQVSLTCLVKGFYPSDIAVEWESNGQPENNYKTTPPVLDSDGSFFLYSRLTVDKSRWQEGNVFSCSVMHEALHNHYTQKSLSLSLGGGGSGSAHPIPDSSPLLQFGGQVRQRYLYTDDACQTEAHLEIREDGTVGGAADQSPESLLQLKALKPGVIQILGVKTSRFLCQRPDGALYGSLHFDPEACSFRELLLEDGYNVYQSEAHGLPLHLCGNKSPHRDPAPRGPARFLPLPGLPPAPPEPPGILAPQPPDVGSSDPLSMVGSQGRSPSYAS

SEQ ID NO: 3153 - protein, 474 aa, Artificial Sequence
  Fusion Protein
HGEGTFTSDKSKQLEKRLARLFFEWLIAGGHSKIKPPPKGGGGGGGSGGGGSGGGGSAESKYGPPCPPCPAPEFEGGPSVFLFPPKPKDTLMISRTPEVTCVVVDVSQEDPEVQFNWYVDGVEVHNAKTKPREEQFNSTYRVVSVLTVLHQDWLNGKEYKCKVSNKGLPSSIEKTISKAKGQPREPQVYTLPPSQEEMTKNQVSLTCLVKGFYPSDIAVEWESNGQPENNYKTTPPVLDSDGSFFLYSRLTVDKSRWQEGNVFSCSVMHEALHNHYTQKSLSLSLGGGGSGSAHPIPDSSPLLQFGGQVRQRYLYTDDACQTEAHLEIREDGTVGGAADQSPESLLQLKALKPGVIQILGVKTSRFLCQRPDGALYGSLHFDPEACSFRELLLEDGYNVYQSEAHGLPLHLCGNKSPHRDPAPRGPARFLPLPGLPPAPPEPPGILAPQPPDVGSSDPLSMVYPSQGRSPSYAS

SEQ ID NO: 3154 - protein, 471 aa, Artificial Sequence
  Fusion Protein
HGEGTFTSDKSKQLEKRLARLFYEWLIAGGPSKIKPPPKGGGGGGGSGGGGSGGGGSADKTHTCPPCPAPEAAGGPSVFLFPPKPKDTLMISRTPEVTCVVVDVSHEDPEVKFNWYVDGVEVHNAKTKPREEQYNSTYRVVSVLTVLHQDWLNGKEYKCKVSNKALPAPIEKTISKAKGQPREPQVYTLPPSRDELTKNQVSLTCLVKGFYPSDIAVEWESNGQPENNYKTTPPVLDSDGSFFLYSKLTVDKSRWQQGNVFSCSVMHEALHNHYTQKSLSLSPGGGGSGSAHPIPDSSPLLQFGGQVRQRYLYTDDACQTEAHLEIREDGTVGGAADQSPESLLQLKALKPGVIQILGVKTSRFLCQRPDGALYGSLHFDPEACSFRELLLEDGYNVYQSEAHGLPLHLPGCKSPHRDPAPRGPARFLPLPGLPPAPPEPPGILAPQPPDVGSSDPLSMVGSQGRSPSYAS

SEQ ID NO: 3155 - protein, 472 aa, Artificial Sequence
  Fusion Protein
HGEGTFTSDKSKQLEKRLARLFYEWLIAGGPSKIKPPPKGGGGGGGSGGGGSGGGGSADKTHTCPPCPAPEAAGGPSVFLFPPKPKDTLMISRTPEVTCVVVDVSHEDPEVKFNWYVDGVEVHNAKTKPREEQYNSTYRVVSVLTVLHQDWLNGKEYKCKVSNKALPAPIEKTISKAKGQPREPQVYTLPPSRDELTKNQVSLTCLVKGFYPSDIAVEWESNGQPENNYKTTPPVLDSDGSFFLYSKLTVDKSRWQQGNVFSCSVMHEALHNHYTQKSLSLSPGGGGSGSAHPIPDSSPLLQFGGQVRQRYLYTDDACQTEAHLEIREDGTVGGAADQSPESLLQLKALKPGVIQILGVKTSRFLCQRPDGALYGSLHFDPEACSFRELLLEDGYNVYQSEAHGLPLHLPGCKSPHRDPAPRGPARFLPLPGLPPAPPEPPGILAPQPPDVGSSDPLSMVYPSQGRSPSYAS

SEQ ID NO: 3156 - protein, 471 aa, Artificial Sequence
  Fusion Protein
HGEGTFTSDKSKQLEKRLARLFYEWLIAGGPSKIKPPPKGGGGGGGSGGGGSGGGGSADKTHTCPPCPAPEAAGGPSVFLFPPKPKDTLMISRTPEVTCVVVDVSHEDPEVKFNWYVDGVEVHNAKTKPREEQYNSTYRVVSVLTVLHQDWLNGKEYKCKVSNKALPAPIEKTISKAKGQPREPQVYTLPPSRDELTKNQVSLTCLVKGFYPSDIAVEWESNGQPENNYKTTPPVLDSDGSFFLYSKLTVDKSRWQQGNVFSCSVMHEALHNHYTQKSLSLSPGGGGSGSAHPIPDSSPLLQFGGQVRQRYLYTDDACQTEAHLEIREDGTVGGAADQSPESLLQLKALKPGVIQILGVKTSRFLCQRPDGALYGSLHFDPEACSFRELLLEDGYNVYQSEAHGLPLHLCGNKSPHRDPAPRGPARFLPLPGLPPAPPEPPGILAPQPPDVGSSDPLSMVGSQGRSPSYAS

SEQ ID NO: 3157 - protein, 472 aa, Artificial Sequence
  Fusion Protein
HGEGTFTSDKSKQLEKRLARLFYEWLIAGGPSKIKPPPKGGGGGGGSGGGGSGGGGSADKTHTCPPCPAPEAAGGPSVFLFPPKPKDTLMISRTPEVTCVVVDVSHEDPEVKFNWYVDGVEVHNAKTKPREEQYNSTYRVVSVLTVLHQDWLNGKEYKCKVSNKALPAPIEKTISKAKGQPREPQVYTLPPSRDELTKNQVSLTCLVKGFYPSDIAVEWESNGQPENNYKTTPPVLDSDGSFFLYSKLTVDKSRWQQGNVFSCSVMHEALHNHYTQKSLSLSPGGGGSGSAHPIPDSSPLLQFGGQVRQRYLYTDDACQTEAHLEIREDGTVGGAADQSPESLLQLKALKPGVIQILGVKTSRFLCQRPDGALYGSLHFDPEACSFRELLLEDGYNVYQSEAHGLPLHLCGNKSPHRDPAPRGPARFLPLPGLPPAPPEPPGILAPQPPDVGSSDPLSMVYPSQGRSPSYAS

SEQ ID NO: 3158 - protein, 471 aa, Artificial Sequence
  Fusion Protein
HGEGTFTSDKSKQLEKRLARLFYEWLIAGGPSKIKPPPKGGGGGGGSGGGGSGGGGSADKTHTCPPCPAPELLGGPSVFLFPPKPKDTLMISRTPEVTCVVVDVSHEDPEVKFNWYVDGVEVHNAKTKPREEQYNNASRVVSVLTVLHQDWLNGKEYKCKVSNKALPAPIEKTISKAKGQPREPQVYTLPPSRDELTKNQVSLTCLVKGFYPSDIAVEWESNGQPENNYKTTPPVLDSDGSFFLYSKLTVDKSRWQQGNVFSCSVMHEALHNHYTQKSLSLSPGGGGSGSAHPIPDSSPLLQFGGQVRQRYLYTDDACQTEAHLEIREDGTVGGAADQSPESLLQLKALKPGVIQILGVKTSRFLCQRPDGALYGSLHFDPEACSFRELLLEDGYNVYQSEAHGLPLHLPGCKSPHRDPAPRGPARFLPLPGLPPAPPEPPGILAPQPPDVGSSDPLSMVGSQGRSPSYAS

SEQ ID NO: 3159 - protein, 472 aa, Artificial Sequence
  Fusion Protein
HGEGTFTSDKSKQLEKRLARLFYEWLIAGGPSKIKPPPKGGGGGGGSGGGGSGGGGSADKTHTCPPCPAPELLGGPSVFLFPPKPKDTLMISRTPEVTCVVVDVSHEDPEVKFNWYVDGVEVHNAKTKPREEQYNNASRVVSVLTVLHQDWLNGKEYKCKVSNKALPAPIEKTISKAKGQPREPQVYTLPPSRDELTKNQVSLTCLVKGFYPSDIAVEWESNGQPENNYKTTPPVLDSDGSFFLYSKLTVDKSRWQQGNVFSCSVMHEALHNHYTQKSLSLSPGGGGSGSAHPIPDSSPLLQFGGQVRQRYLYTDDACQTEAHLEIREDGTVGGAADQSPESLLQLKALKPGVIQILGVKTSRFLCQRPDGALYGSLHFDPEACSFRELLLEDGYNVYQSEAHGLPLHLPGCKSPHRDPAPRGPARFLPLPGLPPAPPEPPGILAPQPPDVGSSDPLSMVYPSQGRSPSYAS

SEQ ID NO: 3160 - protein, 471 aa, Artificial Sequence
  Fusion Protein
HGEGTFTSDKSKQLEKRLARLFYEWLIAGGPSKIKPPPKGGGGGGGSGGGGSGGGGSADKTHTCPPCPAPELLGGPSVFLFPPKPKDTLMISRTPEVTCVVVDVSHEDPEVKFNWYVDGVEVHNAKTKPREEQYNNASRVVSVLTVLHQDWLNGKEYKCKVSNKALPAPIEKTISKAKGQPREPQVYTLPPSRDELTKNQVSLTCLVKGFYPSDIAVEWESNGQPENNYKTTPPVLDSDGSFFLYSKLTVDKSRWQQGNVFSCSVMHEALHNHYTQKSLSLSPGGGGSGSAHPIPDSSPLLQFGGQVRQRYLYTDDACQTEAHLEIREDGTVGGAADQSPESLLQLKALKPGVIQILGVKTSRFLCQRPDGALYGSLHFDPEACSFRELLLEDGYNVYQSEAHGLPLHLCGNKSPHRDPAPRGPARFLPLPGLPPAPPEPPGILAPQPPDVGSSDPLSMVGSQGRSPSYAS

SEQ ID NO: 3161 - protein, 472 aa, Artificial Sequence
  Fusion Protein
HGEGTFTSDKSKQLEKRLARLFYEWLIAGGPSKIKPPPKGGGGGGGSGGGGSGGGGSADKTHTCPPCPAPELLGGPSVFLFPPKPKDTLMISRTPEVTCVVVDVSHEDPEVKFNWYVDGVEVHNAKTKPREEQYNNASRVVSVLTVLHQDWLNGKEYKCKVSNKALPAPIEKTISKAKGQPREPQVYTLPPSRDELTKNQVSLTCLVKGFYPSDIAVEWESNGQPENNYKTTPPVLDSDGSFFLYSKLTVDKSRWQQGNVFSCSVMHEALHNHYTQKSLSLSPGGGGSGSAHPIPDSSPLLQFGGQVRQRYLYTDDACQTEAHLEIREDGTVGGAADQSPESLLQLKALKPGVIQILGVKTSRFLCQRPDGALYGSLHFDPEACSFRELLLEDGYNVYQSEAHGLPLHLCGNKSPHRDPAPRGPARFLPLPGLPPAPPEPPGILAPQPPDVGSSDPLSMVYPSQGRSPSYAS

SEQ ID NO: 3162 - protein, 473 aa, Artificial Sequence
  Fusion Protein
HGEGTFTSDKSKQLEKRLARLFYEWLIAGGPSKIKPPPKGGGGGGGSGGGGSGGGGSAESKYGPPCPPCPAPEFEGGPSVFLFPPKPKDTLMISRTPEVTCVVVDVSQEDPEVQFNWYVDGVEVHNAKTKPREEQFNSTYRVVSVLTVLHQDWLNGKEYKCKVSNKGLPSSIEKTISKAKGQPREPQVYTLPPSQEEMTKNQVSLTCLVKGFYPSDIAVEWESNGQPENNYKTTPPVLDSDGSFFLYSRLTVDKSRWQEGNVFSCSVMHEALHNHYTQKSLSLSLGGGGSGSAHPIPDSSPLLQFGGQVRQRYLYTDDACQTEAHLEIREDGTVGGAADQSPESLLQLKALKPGVIQILGVKTSRFLCQRPDGALYGSLHFDPEACSFRELLLEDGYNVYQSEAHGLPLHLPGCKSPHRDPAPRGPARFLPLPGLPPAPPEPPGILAPQPPDVGSSDPLSMVGSQGRSPSYAS

SEQ ID NO: 3163 - protein, 474 aa, Artificial Sequence
  Fusion Protein
HGEGTFTSDKSKQLEKRLARLFYEWLIAGGPSKIKPPPKGGGGGGGSGGGGSGGGGSAESKYGPPCPPCPAPEFEGGPSVFLFPPKPKDTLMISRTPEVTCVVVDVSQEDPEVQFNWYVDGVEVHNAKTKPREEQFNSTYRVVSVLTVLHQDWLNGKEYKCKVSNKGLPSSIEKTISKAKGQPREPQVYTLPPSQEEMTKNQVSLTCLVKGFYPSDIAVEWESNGQPENNYKTTPPVLDSDGSFFLYSRLTVDKSRWQEGNVFSCSVMHEALHNHYTQKSLSLSLGGGGSGSAHPIPDSSPLLQFGGQVRQRYLYTDDACQTEAHLEIREDGTVGGAADQSPESLLQLKALKPGVIQILGVKTSRFLCQRPDGALYGSLHFDPEACSFRELLLEDGYNVYQSEAHGLPLHLPGCKSPHRDPAPRGPARFLPLPGLPPAPPEPPGILAPQPPDVGSSDPLSMVYPSQGRSPSYAS

SEQ ID NO: 3164 - protein, 473 aa, Artificial Sequence
  Fusion Protein
HGEGTFTSDKSKQLEKRLARLFYEWLIAGGPSKIKPPPKGGGGGGGSGGGGSGGGGSAESKYGPPCPPCPAPEFEGGPSVFLFPPKPKDTLMISRTPEVTCVVVDVSQEDPEVQFNWYVDGVEVHNAKTKPREEQFNSTYRVVSVLTVLHQDWLNGKEYKCKVSNKGLPSSIEKTISKAKGQPREPQVYTLPPSQEEMTKNQVSLTCLVKGFYPSDIAVEWESNGQPENNYKTTPPVLDSDGSFFLYSRLTVDKSRWQEGNVFSCSVMHEALHNHYTQKSLSLSLGGGGSGSAHPIPDSSPLLQFGGQVRQRYLYTDDACQTEAHLEIREDGTVGGAADQSPESLLQLKALKPGVIQILGVKTSRFLCQRPDGALYGSLHFDPEACSFRELLLEDGYNVYQSEAHGLPLHLCGNKSPHRDPAPRGPARFLPLPGLPPAPPEPPGILAPQPPDVGSSDPLSMVGSQGRSPSYAS

SEQ ID NO: 3165 - protein, 474 aa, Artificial Sequence
  Fusion Protein
HGEGTFTSDKSKQLEKRLARLFYEWLIAGGPSKIKPPPKGGGGGGGSGGGGSGGGGSAESKYGPPCPPCPAPEFEGGPSVFLFPPKPKDTLMISRTPEVTCVVVDVSQEDPEVQFNWYVDGVEVHNAKTKPREEQFNSTYRVVSVLTVLHQDWLNGKEYKCKVSNKGLPSSIEKTISKAKGQPREPQVYTLPPSQEEMTKNQVSLTCLVKGFYPSDIAVEWESNGQPENNYKTTPPVLDSDGSFFLYSRLTVDKSRWQEGNVFSCSVMHEALHNHYTQKSLSLSLGGGGSGSAHPIPDSSPLLQFGGQVRQRYLYTDDACQTEAHLEIREDGTVGGAADQSPESLLQLKALKPGVIQILGVKTSRFLCQRPDGALYGSLHFDPEACSFRELLLEDGYNVYQSEAHGLPLHLCGNKSPHRDPAPRGPARFLPLPGLPPAPPEPPGILAPQPPDVGSSDPLSMVYPSQGRSPSYAS

SEQ ID NO: 3166 - protein, 471 aa, Artificial Sequence
  Fusion Protein
HGEGTFTSDKSKQLEKRRVRLFYEWLKAGGHSKIKPPPKGGGGGGGSGGGGSGGGGSADKTHTCPPCPAPEAAGGPSVFLFPPKPKDTLMISRTPEVTCVVVDVSHEDPEVKFNWYVDGVEVHNAKTKPREEQYNSTYRVVSVLTVLHQDWLNGKEYKCKVSNKALPAPIEKTISKAKGQPREPQVYTLPPSRDELTKNQVSLTCLVKGFYPSDIAVEWESNGQPENNYKTTPPVLDSDGSFFLYSKLTVDKSRWQQGNVFSCSVMHEALHNHYTQKSLSLSPGGGGSGSAHPIPDSSPLLQFGGQVRQRYLYTDDACQTEAHLEIREDGTVGGAADQSPESLLQLKALKPGVIQILGVKTSRFLCQRPDGALYGSLHFDPEACSFRELLLEDGYNVYQSEAHGLPLHLPGCKSPHRDPAPRGPARFLPLPGLPPAPPEPPGILAPQPPDVGSSDPLSMVGSQGRSPSYAS

SEQ ID NO: 3167 - protein, 472 aa, Artificial Sequence
  Fusion Protein
HGEGTFTSDKSKQLEKRRVRLFYEWLKAGGHSKIKPPPKGGGGGGGSGGGGSGGGGSADKTHTCPPCPAPEAAGGPSVFLFPPKPKDTLMISRTPEVTCVVVDVSHEDPEVKFNWYVDGVEVHNAKTKPREEQYNSTYRVVSVLTVLHQDWLNGKEYKCKVSNKALPAPIEKTISKAKGQPREPQVYTLPPSRDELTKNQVSLTCLVKGFYPSDIAVEWESNGQPENNYKTTPPVLDSDGSFFLYSKLTVDKSRWQQGNVFSCSVMHEALHNHYTQKSLSLSPGGGGSGSAHPIPDSSPLLQFGGQVRQRYLYTDDACQTEAHLEIREDGTVGGAADQSPESLLQLKALKPGVIQILGVKTSRFLCQRPDGALYGSLHFDPEACSFRELLLEDGYNVYQSEAHGLPLHLPGCKSPHRDPAPRGPARFLPLPGLPPAPPEPPGILAPQPPDVGSSDPLSMVYPSQGRSPSYAS

SEQ ID NO: 3168 - protein, 471 aa, Artificial Sequence
  Fusion Protein
HGEGTFTSDKSKQLEKRRVRLFYEWLKAGGHSKIKPPPKGGGGGGGSGGGGSGGGGSADKTHTCPPCPAPEAAGGPSVFLFPPKPKDTLMISRTPEVTCVVVDVSHEDPEVKFNWYVDGVEVHNAKTKPREEQYNSTYRVVSVLTVLHQDWLNGKEYKCKVSNKALPAPIEKTISKAKGQPREPQVYTLPPSRDELTKNQVSLTCLVKGFYPSDIAVEWESNGQPENNYKTTPPVLDSDGSFFLYSKLTVDKSRWQQGNVFSCSVMHEALHNHYTQKSLSLSPGGGGSGSAHPIPDSSPLLQFGGQVRQRYLYTDDACQTEAHLEIREDGTVGGAADQSPESLLQLKALKPGVIQILGVKTSRFLCQRPDGALYGSLHFDPEACSFRELLLEDGYNVYQSEAHGLPLHLCGNKSPHRDPAPRGPARFLPLPGLPPAPPEPPGILAPQPPDVGSSDPLSMVGSQGRSPSYAS

SEQ ID NO: 3169 - protein, 472 aa, Artificial Sequence
  Fusion Protein
HGEGTFTSDKSKQLEKRRVRLFYEWLKAGGHSKIKPPPKGGGGGGGSGGGGSGGGGSADKTHTCPPCPAPEAAGGPSVFLFPPKPKDTLMISRTPEVTCVVVDVSHEDPEVKFNWYVDGVEVHNAKTKPREEQYNSTYRVVSVLTVLHQDWLNGKEYKCKVSNKALPAPIEKTISKAKGQPREPQVYTLPPSRDELTKNQVSLTCLVKGFYPSDIAVEWESNGQPENNYKTTPPVLDSDGSFFLYSKLTVDKSRWQQGNVFSCSVMHEALHNHYTQKSLSLSPGGGGSGSAHPIPDSSPLLQFGGQVRQRYLYTDDACQTEAHLEIREDGTVGGAADQSPESLLQLKALKPGVIQILGVKTSRFLCQRPDGALYGSLHFDPEACSFRELLLEDGYNVYQSEAHGLPLHLCGNKSPHRDPAPRGPARFLPLPGLPPAPPEPPGILAPQPPDVGSSDPLSMVYPSQGRSPSYAS

SEQ ID NO: 3170 - protein, 471 aa, Artificial Sequence
  Fusion Protein
HGEGTFTSDKSKQLEKRRVRLFYEWLKAGGHSKIKPPPKGGGGGGGSGGGGSGGGGSADKTHTCPPCPAPELLGGPSVFLFPPKPKDTLMISRTPEVTCVVVDVSHEDPEVKFNWYVDGVEVHNAKTKPREEQYNNASRVVSVLTVLHQDWLNGKEYKCKVSNKALPAPIEKTISKAKGQPREPQVYTLPPSRDELTKNQVSLTCLVKGFYPSDIAVEWESNGQPENNYKTTPPVLDSDGSFFLYSKLTVDKSRWQQGNVFSCSVMHEALHNHYTQKSLSLSPGGGGSGSAHPIPDSSPLLQFGGQVRQRYLYTDDACQTEAHLEIREDGTVGGAADQSPESLLQLKALKPGVIQILGVKTSRFLCQRPDGALYGSLHFDPEACSFRELLLEDGYNVYQSEAHGLPLHLPGCKSPHRDPAPRGPARFLPLPGLPPAPPEPPGILAPQPPDVGSSDPLSMVGSQGRSPSYAS

SEQ ID NO: 3171 - protein, 472 aa, Artificial Sequence
  Fusion Protein
HGEGTFTSDKSKQLEKRRVRLFYEWLKAGGHSKIKPPPKGGGGGGGSGGGGSGGGGSADKTHTCPPCPAPELLGGPSVFLFPPKPKDTLMISRTPEVTCVVVDVSHEDPEVKFNWYVDGVEVHNAKTKPREEQYNNASRVVSVLTVLHQDWLNGKEYKCKVSNKALPAPIEKTISKAKGQPREPQVYTLPPSRDELTKNQVSLTCLVKGFYPSDIAVEWESNGQPENNYKTTPPVLDSDGSFFLYSKLTVDKSRWQQGNVFSCSVMHEALHNHYTQKSLSLSPGGGGSGSAHPIPDSSPLLQFGGQVRQRYLYTDDACQTEAHLEIREDGTVGGAADQSPESLLQLKALKPGVIQILGVKTSRFLCQRPDGALYGSLHFDPEACSFRELLLEDGYNVYQSEAHGLPLHLPGCKSPHRDPAPRGPARFLPLPGLPPAPPEPPGILAPQPPDVGSSDPLSMVYPSQGRSPSYAS

SEQ ID NO: 3172 - protein, 471 aa, Artificial Sequence
  Fusion Protein
HGEGTFTSDKSKQLEKRRVRLFYEWLKAGGHSKIKPPPKGGGGGGGSGGGGSGGGGSADKTHTCPPCPAPELLGGPSVFLFPPKPKDTLMISRTPEVTCVVVDVSHEDPEVKFNWYVDGVEVHNAKTKPREEQYNNASRVVSVLTVLHQDWLNGKEYKCKVSNKALPAPIEKTISKAKGQPREPQVYTLPPSRDELTKNQVSLTCLVKGFYPSDIAVEWESNGQPENNYKTTPPVLDSDGSFFLYSKLTVDKSRWQQGNVFSCSVMHEALHNHYTQKSLSLSPGGGGSGSAHPIPDSSPLLQFGGQVRQRYLYTDDACQTEAHLEIREDGTVGGAADQSPESLLQLKALKPGVIQILGVKTSRFLCQRPDGALYGSLHFDPEACSFRELLLEDGYNVYQSEAHGLPLHLCGNKSPHRDPAPRGPARFLPLPGLPPAPPEPPGILAPQPPDVGSSDPLSMVGSQGRSPSYAS

SEQ ID NO: 3173 - protein, 472 aa, Artificial Sequence
  Fusion Protein
HGEGTFTSDKSKQLEKRRVRLFYEWLKAGGHSKIKPPPKGGGGGGGSGGGGSGGGGSADKTHTCPPCPAPELLGGPSVFLFPPKPKDTLMISRTPEVTCVVVDVSHEDPEVKFNWYVDGVEVHNAKTKPREEQYNNASRVVSVLTVLHQDWLNGKEYKCKVSNKALPAPIEKTISKAKGQPREPQVYTLPPSRDELTKNQVSLTCLVKGFYPSDIAVEWESNGQPENNYKTTPPVLDSDGSFFLYSKLTVDKSRWQQGNVFSCSVMHEALHNHYTQKSLSLSPGGGGSGSAHPIPDSSPLLQFGGQVRQRYLYTDDACQTEAHLEIREDGTVGGAADQSPESLLQLKALKPGVIQILGVKTSRFLCQRPDGALYGSLHFDPEACSFRELLLEDGYNVYQSEAHGLPLHLCGNKSPHRDPAPRGPARFLPLPGLPPAPPEPPGILAPQPPDVGSSDPLSMVYPSQGRSPSYAS

SEQ ID NO: 3174 - protein, 473 aa, Artificial Sequence
  Fusion Protein
HGEGTFTSDKSKQLEKRRVRLFYEWLKAGGHSKIKPPPKGGGGGGGSGGGGSGGGGSAESKYGPPCPPCPAPEFEGGPSVFLFPPKPKDTLMISRTPEVTCVVVDVSQEDPEVQFNWYVDGVEVHNAKTKPREEQFNSTYRVVSVLTVLHQDWLNGKEYKCKVSNKGLPSSIEKTISKAKGQPREPQVYTLPPSQEEMTKNQVSLTCLVKGFYPSDIAVEWESNGQPENNYKTTPPVLDSDGSFFLYSRLTVDKSRWQEGNVFSCSVMHEALHNHYTQKSLSLSLGGGGSGSAHPIPDSSPLLQFGGQVRQRYLYTDDACQTEAHLEIREDGTVGGAADQSPESLLQLKALKPGVIQILGVKTSRFLCQRPDGALYGSLHFDPEACSFRELLLEDGYNVYQSEAHGLPLHLPGCKSPHRDPAPRGPARFLPLPGLPPAPPEPPGILAPQPPDVGSSDPLSMVGSQGRSPSYAS

SEQ ID NO: 3175 - protein, 474 aa, Artificial Sequence
  Fusion Protein
HGEGTFTSDKSKQLEKRRVRLFYEWLKAGGHSKIKPPPKGGGGGGGSGGGGSGGGGSAESKYGPPCPPCPAPEFEGGPSVFLFPPKPKDTLMISRTPEVTCVVVDVSQEDPEVQFNWYVDGVEVHNAKTKPREEQFNSTYRVVSVLTVLHQDWLNGKEYKCKVSNKGLPSSIEKTISKAKGQPREPQVYTLPPSQEEMTKNQVSLTCLVKGFYPSDIAVEWESNGQPENNYKTTPPVLDSDGSFFLYSRLTVDKSRWQEGNVFSCSVMHEALHNHYTQKSLSLSLGGGGSGSAHPIPDSSPLLQFGGQVRQRYLYTDDACQTEAHLEIREDGTVGGAADQSPESLLQLKALKPGVIQILGVKTSRFLCQRPDGALYGSLHFDPEACSFRELLLEDGYNVYQSEAHGLPLHLPGCKSPHRDPAPRGPARFLPLPGLPPAPPEPPGILAPQPPDVGSSDPLSMVYPSQGRSPSYAS

SEQ ID NO: 3176 - protein, 473 aa, Artificial Sequence
  Fusion Protein
HGEGTFTSDKSKQLEKRRVRLFYEWLKAGGHSKIKPPPKGGGGGGGSGGGGSGGGGSAESKYGPPCPPCPAPEFEGGPSVFLFPPKPKDTLMISRTPEVTCVVVDVSQEDPEVQFNWYVDGVEVHNAKTKPREEQFNSTYRVVSVLTVLHQDWLNGKEYKCKVSNKGLPSSIEKTISKAKGQPREPQVYTLPPSQEEMTKNQVSLTCLVKGFYPSDIAVEWESNGQPENNYKTTPPVLDSDGSFFLYSRLTVDKSRWQEGNVFSCSVMHEALHNHYTQKSLSLSLGGGGSGSAHPIPDSSPLLQFGGQVRQRYLYTDDACQTEAHLEIREDGTVGGAADQSPESLLQLKALKPGVIQILGVKTSRFLCQRPDGALYGSLHFDPEACSFRELLLEDGYNVYQSEAHGLPLHLCGNKSPHRDPAPRGPARFLPLPGLPPAPPEPPGILAPQPPDVGSSDPLSMVGSQGRSPSYAS

SEQ ID NO: 3177 - protein, 474 aa, Artificial Sequence
  Fusion Protein
HGEGTFTSDKSKQLEKRRVRLFYEWLKAGGHSKIKPPPKGGGGGGGSGGGGSGGGGSAESKYGPPCPPCPAPEFEGGPSVFLFPPKPKDTLMISRTPEVTCVVVDVSQEDPEVQFNWYVDGVEVHNAKTKPREEQFNSTYRVVSVLTVLHQDWLNGKEYKCKVSNKGLPSSIEKTISKAKGQPREPQVYTLPPSQEEMTKNQVSLTCLVKGFYPSDIAVEWESNGQPENNYKTTPPVLDSDGSFFLYSRLTVDKSRWQEGNVFSCSVMHEALHNHYTQKSLSLSLGGGGSGSAHPIPDSSPLLQFGGQVRQRYLYTDDACQTEAHLEIREDGTVGGAADQSPESLLQLKALKPGVIQILGVKTSRFLCQRPDGALYGSLHFDPEACSFRELLLEDGYNVYQSEAHGLPLHLCGNKSPHRDPAPRGPARFLPLPGLPPAPPEPPGILAPQPPDVGSSDPLSMVYPSQGRSPSYAS

SEQ ID NO: 3178 - protein, 471 aa, Artificial Sequence
  Fusion Protein
HGEGTFTSDKSKQLEKRRVRLFFEWLKAGGHSSIKPPPKGGGGGGGSGGGGSGGGGSADKTHTCPPCPAPEAAGGPSVFLFPPKPKDTLMISRTPEVTCVVVDVSHEDPEVKFNWYVDGVEVHNAKTKPREEQYNSTYRVVSVLTVLHQDWLNGKEYKCKVSNKALPAPIEKTISKAKGQPREPQVYTLPPSRDELTKNQVSLTCLVKGFYPSDIAVEWESNGQPENNYKTTPPVLDSDGSFFLYSKLTVDKSRWQQGNVFSCSVMHEALHNHYTQKSLSLSPGGGGSGSAHPIPDSSPLLQFGGQVRQRYLYTDDACQTEAHLEIREDGTVGGAADQSPESLLQLKALKPGVIQILGVKTSRFLCQRPDGALYGSLHFDPEACSFRELLLEDGYNVYQSEAHGLPLHLPGCKSPHRDPAPRGPARFLPLPGLPPAPPEPPGILAPQPPDVGSSDPLSMVGSQGRSPSYAS

SEQ ID NO: 3179 - protein, 472 aa, Artificial Sequence
  Fusion Protein
HGEGTFTSDKSKQLEKRRVRLFFEWLKAGGHSSIKPPPKGGGGGGGSGGGGSGGGGSADKTHTCPPCPAPEAAGGPSVFLFPPKPKDTLMISRTPEVTCVVVDVSHEDPEVKFNWYVDGVEVHNAKTKPREEQYNSTYRVVSVLTVLHQDWLNGKEYKCKVSNKALPAPIEKTISKAKGQPREPQVYTLPPSRDELTKNQVSLTCLVKGFYPSDIAVEWESNGQPENNYKTTPPVLDSDGSFFLYSKLTVDKSRWQQGNVFSCSVMHEALHNHYTQKSLSLSPGGGGSGSAHPIPDSSPLLQFGGQVRQRYLYTDDACQTEAHLEIREDGTVGGAADQSPESLLQLKALKPGVIQILGVKTSRFLCQRPDGALYGSLHFDPEACSFRELLLEDGYNVYQSEAHGLPLHLPGCKSPHRDPAPRGPARFLPLPGLPPAPPEPPGILAPQPPDVGSSDPLSMVYPSQGRSPSYAS

SEQ ID NO: 3180 - protein, 471 aa, Artificial Sequence
  Fusion Protein
HGEGTFTSDKSKQLEKRRVRLFFEWLKAGGHSSIKPPPKGGGGGGGSGGGGSGGGGSADKTHTCPPCPAPEAAGGPSVFLFPPKPKDTLMISRTPEVTCVVVDVSHEDPEVKFNWYVDGVEVHNAKTKPREEQYNSTYRVVSVLTVLHQDWLNGKEYKCKVSNKALPAPIEKTISKAKGQPREPQVYTLPPSRDELTKNQVSLTCLVKGFYPSDIAVEWESNGQPENNYKTTPPVLDSDGSFFLYSKLTVDKSRWQQGNVFSCSVMHEALHNHYTQKSLSLSPGGGGSGSAHPIPDSSPLLQFGGQVRQRYLYTDDACQTEAHLEIREDGTVGGAADQSPESLLQLKALKPGVIQILGVKTSRFLCQRPDGALYGSLHFDPEACSFRELLLEDGYNVYQSEAHGLPLHLCGNKSPHRDPAPRGPARFLPLPGLPPAPPEPPGILAPQPPDVGSSDPLSMVGSQGRSPSYAS

SEQ ID NO: 3181 - protein, 472 aa, Artificial Sequence
  Fusion Protein
HGEGTFTSDKSKQLEKRRVRLFFEWLKAGGHSSIKPPPKGGGGGGGSGGGGSGGGGSADKTHTCPPCPAPEAAGGPSVFLFPPKPKDTLMISRTPEVTCVVVDVSHEDPEVKFNWYVDGVEVHNAKTKPREEQYNSTYRVVSVLTVLHQDWLNGKEYKCKVSNKALPAPIEKTISKAKGQPREPQVYTLPPSRDELTKNQVSLTCLVKGFYPSDIAVEWESNGQPENNYKTTPPVLDSDGSFFLYSKLTVDKSRWQQGNVFSCSVMHEALHNHYTQKSLSLSPGGGGSGSAHPIPDSSPLLQFGGQVRQRYLYTDDACQTEAHLEIREDGTVGGAADQSPESLLQLKALKPGVIQILGVKTSRFLCQRPDGALYGSLHFDPEACSFRELLLEDGYNVYQSEAHGLPLHLCGNKSPHRDPAPRGPARFLPLPGLPPAPPEPPGILAPQPPDVGSSDPLSMVYPSQGRSPSYAS

SEQ ID NO: 3182 - protein, 471 aa, Artificial Sequence
  Fusion Protein
HGEGTFTSDKSKQLEKRRVRLFFEWLKAGGHSSIKPPPKGGGGGGGSGGGGSGGGGSADKTHTCPPCPAPELLGGPSVFLFPPKPKDTLMISRTPEVTCVVVDVSHEDPEVKFNWYVDGVEVHNAKTKPREEQYNNASRVVSVLTVLHQDWLNGKEYKCKVSNKALPAPIEKTISKAKGQPREPQVYTLPPSRDELTKNQVSLTCLVKGFYPSDIAVEWESNGQPENNYKTTPPVLDSDGSFFLYSKLTVDKSRWQQGNVFSCSVMHEALHNHYTQKSLSLSPGGGGSGSAHPIPDSSPLLQFGGQVRQRYLYTDDACQTEAHLEIREDGTVGGAADQSPESLLQLKALKPGVIQILGVKTSRFLCQRPDGALYGSLHFDPEACSFRELLLEDGYNVYQSEAHGLPLHLPGCKSPHRDPAPRGPARFLPLPGLPPAPPEPPGILAPQPPDVGSSDPLSMVGSQGRSPSYAS

SEQ ID NO: 3183 - protein, 472 aa, Artificial Sequence
  Fusion Protein
HGEGTFTSDKSKQLEKRRVRLFFEWLKAGGHSSIKPPPKGGGGGGGSGGGGSGGGGSADKTHTCPPCPAPELLGGPSVFLFPPKPKDTLMISRTPEVTCVVVDVSHEDPEVKFNWYVDGVEVHNAKTKPREEQYNNASRVVSVLTVLHQDWLNGKEYKCKVSNKALPAPIEKTISKAKGQPREPQVYTLPPSRDELTKNQVSLTCLVKGFYPSDIAVEWESNGQPENNYKTTPPVLDSDGSFFLYSKLTVDKSRWQQGNVFSCSVMHEALHNHYTQKSLSLSPGGGGSGSAHPIPDSSPLLQFGGQVRQRYLYTDDACQTEAHLEIREDGTVGGAADQSPESLLQLKALKPGVIQILGVKTSRFLCQRPDGALYGSLHFDPEACSFRELLLEDGYNVYQSEAHGLPLHLPGCKSPHRDPAPRGPARFLPLPGLPPAPPEPPGILAPQPPDVGSSDPLSMVYPSQGRSPSYAS

SEQ ID NO: 3184 - protein, 471 aa, Artificial Sequence
  Fusion Protein
HGEGTFTSDKSKQLEKRRVRLFFEWLKAGGHSSIKPPPKGGGGGGGSGGGGSGGGGSADKTHTCPPCPAPELLGGPSVFLFPPKPKDTLMISRTPEVTCVVVDVSHEDPEVKFNWYVDGVEVHNAKTKPREEQYNNASRVVSVLTVLHQDWLNGKEYKCKVSNKALPAPIEKTISKAKGQPREPQVYTLPPSRDELTKNQVSLTCLVKGFYPSDIAVEWESNGQPENNYKTTPPVLDSDGSFFLYSKLTVDKSRWQQGNVFSCSVMHEALHNHYTQKSLSLSPGGGGSGSAHPIPDSSPLLQFGGQVRQRYLYTDDACQTEAHLEIREDGTVGGAADQSPESLLQLKALKPGVIQILGVKTSRFLCQRPDGALYGSLHFDPEACSFRELLLEDGYNVYQSEAHGLPLHLCGNKSPHRDPAPRGPARFLPLPGLPPAPPEPPGILAPQPPDVGSSDPLSMVGSQGRSPSYAS

SEQ ID NO: 3185 - protein, 472 aa, Artificial Sequence
  Fusion Protein
HGEGTFTSDKSKQLEKRRVRLFFEWLKAGGHSSIKPPPKGGGGGGGSGGGGSGGGGSADKTHTCPPCPAPELLGGPSVFLFPPKPKDTLMISRTPEVTCVVVDVSHEDPEVKFNWYVDGVEVHNAKTKPREEQYNNASRVVSVLTVLHQDWLNGKEYKCKVSNKALPAPIEKTISKAKGQPREPQVYTLPPSRDELTKNQVSLTCLVKGFYPSDIAVEWESNGQPENNYKTTPPVLDSDGSFFLYSKLTVDKSRWQQGNVFSCSVMHEALHNHYTQKSLSLSPGGGGSGSAHPIPDSSPLLQFGGQVRQRYLYTDDACQTEAHLEIREDGTVGGAADQSPESLLQLKALKPGVIQILGVKTSRFLCQRPDGALYGSLHFDPEACSFRELLLEDGYNVYQSEAHGLPLHLCGNKSPHRDPAPRGPARFLPLPGLPPAPPEPPGILAPQPPDVGSSDPLSMVYPSQGRSPSYAS

SEQ ID NO: 3186 - protein, 473 aa, Artificial Sequence
  Fusion Protein
HGEGTFTSDKSKQLEKRRVRLFFEWLKAGGHSSIKPPPKGGGGGGGSGGGGSGGGGSAESKYGPPCPPCPAPEFEGGPSVFLFPPKPKDTLMISRTPEVTCVVVDVSQEDPEVQFNWYVDGVEVHNAKTKPREEQFNSTYRVVSVLTVLHQDWLNGKEYKCKVSNKGLPSSIEKTISKAKGQPREPQVYTLPPSQEEMTKNQVSLTCLVKGFYPSDIAVEWESNGQPENNYKTTPPVLDSDGSFFLYSRLTVDKSRWQEGNVFSCSVMHEALHNHYTQKSLSLSLGGGGSGSAHPIPDSSPLLQFGGQVRQRYLYTDDACQTEAHLEIREDGTVGGAADQSPESLLQLKALKPGVIQILGVKTSRFLCQRPDGALYGSLHFDPEACSFRELLLEDGYNVYQSEAHGLPLHLPGCKSPHRDPAPRGPARFLPLPGLPPAPPEPPGILAPQPPDVGSSDPLSMVGSQGRSPSYAS

SEQ ID NO: 3187 - protein, 474 aa, Artificial Sequence
  Fusion Protein
HGEGTFTSDKSKQLEKRRVRLFFEWLKAGGHSSIKPPPKGGGGGGGSGGGGSGGGGSAESKYGPPCPPCPAPEFEGGPSVFLFPPKPKDTLMISRTPEVTCVVVDVSQEDPEVQFNWYVDGVEVHNAKTKPREEQFNSTYRVVSVLTVLHQDWLNGKEYKCKVSNKGLPSSIEKTISKAKGQPREPQVYTLPPSQEEMTKNQVSLTCLVKGFYPSDIAVEWESNGQPENNYKTTPPVLDSDGSFFLYSRLTVDKSRWQEGNVFSCSVMHEALHNHYTQKSLSLSLGGGGSGSAHPIPDSSPLLQFGGQVRQRYLYTDDACQTEAHLEIREDGTVGGAADQSPESLLQLKALKPGVIQILGVKTSRFLCQRPDGALYGSLHFDPEACSFRELLLEDGYNVYQSEAHGLPLHLPGCKSPHRDPAPRGPARFLPLPGLPPAPPEPPGILAPQPPDVGSSDPLSMVYPSQGRSPSYAS

SEQ ID NO: 3188 - protein, 473 aa, Artificial Sequence
  Fusion Protein
HGEGTFTSDKSKQLEKRRVRLFFEWLKAGGHSSIKPPPKGGGGGGGSGGGGSGGGGSAESKYGPPCPPCPAPEFEGGPSVFLFPPKPKDTLMISRTPEVTCVVVDVSQEDPEVQFNWYVDGVEVHNAKTKPREEQFNSTYRVVSVLTVLHQDWLNGKEYKCKVSNKGLPSSIEKTISKAKGQPREPQVYTLPPSQEEMTKNQVSLTCLVKGFYPSDIAVEWESNGQPENNYKTTPPVLDSDGSFFLYSRLTVDKSRWQEGNVFSCSVMHEALHNHYTQKSLSLSLGGGGSGSAHPIPDSSPLLQFGGQVRQRYLYTDDACQTEAHLEIREDGTVGGAADQSPESLLQLKALKPGVIQILGVKTSRFLCQRPDGALYGSLHFDPEACSFRELLLEDGYNVYQSEAHGLPLHLCGNKSPHRDPAPRGPARFLPLPGLPPAPPEPPGILAPQPPDVGSSDPLSMVGSQGRSPSYAS

SEQ ID NO: 3189 - protein, 474 aa, Artificial Sequence
  Fusion Protein
HGEGTFTSDKSKQLEKRRVRLFFEWLKAGGHSSIKPPPKGGGGGGGSGGGGSGGGGSAESKYGPPCPPCPAPEFEGGPSVFLFPPKPKDTLMISRTPEVTCVVVDVSQEDPEVQFNWYVDGVEVHNAKTKPREEQFNSTYRVVSVLTVLHQDWLNGKEYKCKVSNKGLPSSIEKTISKAKGQPREPQVYTLPPSQEEMTKNQVSLTCLVKGFYPSDIAVEWESNGQPENNYKTTPPVLDSDGSFFLYSRLTVDKSRWQEGNVFSCSVMHEALHNHYTQKSLSLSLGGGGSGSAHPIPDSSPLLQFGGQVRQRYLYTDDACQTEAHLEIREDGTVGGAADQSPESLLQLKALKPGVIQILGVKTSRFLCQRPDGALYGSLHFDPEACSFRELLLEDGYNVYQSEAHGLPLHLCGNKSPHRDPAPRGPARFLPLPGLPPAPPEPPGILAPQPPDVGSSDPLSMVYPSQGRSPSYAS

SEQ ID NO: 3190 - protein, 471 aa, Artificial Sequence
  Fusion Protein
HGEGTFTSDKSKQLEKRLVRLFYEWLINGGHKKIKPPPKGGGGGGGSGGGGSGGGGSADKTHTCPPCPAPEAAGGPSVFLFPPKPKDTLMISRTPEVTCVVVDVSHEDPEVKFNWYVDGVEVHNAKTKPREEQYNSTYRVVSVLTVLHQDWLNGKEYKCKVSNKALPAPIEKTISKAKGQPREPQVYTLPPSRDELTKNQVSLTCLVKGFYPSDIAVEWESNGQPENNYKTTPPVLDSDGSFFLYSKLTVDKSRWQQGNVFSCSVMHEALHNHYTQKSLSLSPGGGGSGSAHPIPDSSPLLQFGGQVRQRYLYTDDACQTEAHLEIREDGTVGGAADQSPESLLQLKALKPGVIQILGVKTSRFLCQRPDGALYGSLHFDPEACSFRELLLEDGYNVYQSEAHGLPLHLPGCKSPHRDPAPRGPARFLPLPGLPPAPPEPPGILAPQPPDVGSSDPLSMVGSQGRSPSYAS

SEQ ID NO: 3191 - protein, 472 aa, Artificial Sequence
  Fusion Protein
HGEGTFTSDKSKQLEKRLVRLFYEWLINGGHKKIKPPPKGGGGGGGSGGGGSGGGGSADKTHTCPPCPAPEAAGGPSVFLFPPKPKDTLMISRTPEVTCVVVDVSHEDPEVKFNWYVDGVEVHNAKTKPREEQYNSTYRVVSVLTVLHQDWLNGKEYKCKVSNKALPAPIEKTISKAKGQPREPQVYTLPPSRDELTKNQVSLTCLVKGFYPSDIAVEWESNGQPENNYKTTPPVLDSDGSFFLYSKLTVDKSRWQQGNVFSCSVMHEALHNHYTQKSLSLSPGGGGSGSAHPIPDSSPLLQFGGQVRQRYLYTDDACQTEAHLEIREDGTVGGAADQSPESLLQLKALKPGVIQILGVKTSRFLCQRPDGALYGSLHFDPEACSFRELLLEDGYNVYQSEAHGLPLHLPGCKSPHRDPAPRGPARFLPLPGLPPAPPEPPGILAPQPPDVGSSDPLSMVYPSQGRSPSYAS

SEQ ID NO: 3192 - protein, 471 aa, Artificial Sequence
  Fusion Protein
HGEGTFTSDKSKQLEKRLVRLFYEWLINGGHKKIKPPPKGGGGGGGSGGGGSGGGGSADKTHTCPPCPAPEAAGGPSVFLFPPKPKDTLMISRTPEVTCVVVDVSHEDPEVKFNWYVDGVEVHNAKTKPREEQYNSTYRVVSVLTVLHQDWLNGKEYKCKVSNKALPAPIEKTISKAKGQPREPQVYTLPPSRDELTKNQVSLTCLVKGFYPSDIAVEWESNGQPENNYKTTPPVLDSDGSFFLYSKLTVDKSRWQQGNVFSCSVMHEALHNHYTQKSLSLSPGGGGSGSAHPIPDSSPLLQFGGQVRQRYLYTDDACQTEAHLEIREDGTVGGAADQSPESLLQLKALKPGVIQILGVKTSRFLCQRPDGALYGSLHFDPEACSFRELLLEDGYNVYQSEAHGLPLHLCGNKSPHRDPAPRGPARFLPLPGLPPAPPEPPGILAPQPPDVGSSDPLSMVGSQGRSPSYAS

SEQ ID NO: 3193 - protein, 472 aa, Artificial Sequence
  Fusion Protein
HGEGTFTSDKSKQLEKRLVRLFYEWLINGGHKKIKPPPKGGGGGGGSGGGGSGGGGSADKTHTCPPCPAPEAAGGPSVFLFPPKPKDTLMISRTPEVTCVVVDVSHEDPEVKFNWYVDGVEVHNAKTKPREEQYNSTYRVVSVLTVLHQDWLNGKEYKCKVSNKALPAPIEKTISKAKGQPREPQVYTLPPSRDELTKNQVSLTCLVKGFYPSDIAVEWESNGQPENNYKTTPPVLDSDGSFFLYSKLTVDKSRWQQGNVFSCSVMHEALHNHYTQKSLSLSPGGGGSGSAHPIPDSSPLLQFGGQVRQRYLYTDDACQTEAHLEIREDGTVGGAADQSPESLLQLKALKPGVIQILGVKTSRFLCQRPDGALYGSLHFDPEACSFRELLLEDGYNVYQSEAHGLPLHLCGNKSPHRDPAPRGPARFLPLPGLPPAPPEPPGILAPQPPDVGSSDPLSMVYPSQGRSPSYAS

SEQ ID NO: 3194 - protein, 471 aa, Artificial Sequence
  Fusion Protein
HGEGTFTSDKSKQLEKRLVRLFYEWLINGGHKKIKPPPKGGGGGGGSGGGGSGGGGSADKTHTCPPCPAPELLGGPSVFLFPPKPKDTLMISRTPEVTCVVVDVSHEDPEVKFNWYVDGVEVHNAKTKPREEQYNNASRVVSVLTVLHQDWLNGKEYKCKVSNKALPAPIEKTISKAKGQPREPQVYTLPPSRDELTKNQVSLTCLVKGFYPSDIAVEWESNGQPENNYKTTPPVLDSDGSFFLYSKLTVDKSRWQQGNVFSCSVMHEALHNHYTQKSLSLSPGGGGSGSAHPIPDSSPLLQFGGQVRQRYLYTDDACQTEAHLEIREDGTVGGAADQSPESLLQLKALKPGVIQILGVKTSRFLCQRPDGALYGSLHFDPEACSFRELLLEDGYNVYQSEAHGLPLHLPGCKSPHRDPAPRGPARFLPLPGLPPAPPEPPGILAPQPPDVGSSDPLSMVGSQGRSPSYAS

SEQ ID NO: 3195 - protein, 472 aa, Artificial Sequence
  Fusion Protein
HGEGTFTSDKSKQLEKRLVRLFYEWLINGGHKKIKPPPKGGGGGGGSGGGGSGGGGSADKTHTCPPCPAPELLGGPSVFLFPPKPKDTLMISRTPEVTCVVVDVSHEDPEVKFNWYVDGVEVHNAKTKPREEQYNNASRVVSVLTVLHQDWLNGKEYKCKVSNKALPAPIEKTISKAKGQPREPQVYTLPPSRDELTKNQVSLTCLVKGFYPSDIAVEWESNGQPENNYKTTPPVLDSDGSFFLYSKLTVDKSRWQQGNVFSCSVMHEALHNHYTQKSLSLSPGGGGSGSAHPIPDSSPLLQFGGQVRQRYLYTDDACQTEAHLEIREDGTVGGAADQSPESLLQLKALKPGVIQILGVKTSRFLCQRPDGALYGSLHFDPEACSFRELLLEDGYNVYQSEAHGLPLHLPGCKSPHRDPAPRGPARFLPLPGLPPAPPEPPGILAPQPPDVGSSDPLSMVYPSQGRSPSYAS

SEQ ID NO: 3196 - protein, 471 aa, Artificial Sequence
  Fusion Protein
HGEGTFTSDKSKQLEKRLVRLFYEWLINGGHKKIKPPPKGGGGGGGSGGGGSGGGGSADKTHTCPPCPAPELLGGPSVFLFPPKPKDTLMISRTPEVTCVVVDVSHEDPEVKFNWYVDGVEVHNAKTKPREEQYNNASRVVSVLTVLHQDWLNGKEYKCKVSNKALPAPIEKTISKAKGQPREPQVYTLPPSRDELTKNQVSLTCLVKGFYPSDIAVEWESNGQPENNYKTTPPVLDSDGSFFLYSKLTVDKSRWQQGNVFSCSVMHEALHNHYTQKSLSLSPGGGGSGSAHPIPDSSPLLQFGGQVRQRYLYTDDACQTEAHLEIREDGTVGGAADQSPESLLQLKALKPGVIQILGVKTSRFLCQRPDGALYGSLHFDPEACSFRELLLEDGYNVYQSEAHGLPLHLCGNKSPHRDPAPRGPARFLPLPGLPPAPPEPPGILAPQPPDVGSSDPLSMVGSQGRSPSYAS

SEQ ID NO: 3197 - protein, 472 aa, Artificial Sequence
  Fusion Protein
HGEGTFTSDKSKQLEKRLVRLFYEWLINGGHKKIKPPPKGGGGGGGSGGGGSGGGGSADKTHTCPPCPAPELLGGPSVFLFPPKPKDTLMISRTPEVTCVVVDVSHEDPEVKFNWYVDGVEVHNAKTKPREEQYNNASRVVSVLTVLHQDWLNGKEYKCKVSNKALPAPIEKTISKAKGQPREPQVYTLPPSRDELTKNQVSLTCLVKGFYPSDIAVEWESNGQPENNYKTTPPVLDSDGSFFLYSKLTVDKSRWQQGNVFSCSVMHEALHNHYTQKSLSLSPGGGGSGSAHPIPDSSPLLQFGGQVRQRYLYTDDACQTEAHLEIREDGTVGGAADQSPESLLQLKALKPGVIQILGVKTSRFLCQRPDGALYGSLHFDPEACSFRELLLEDGYNVYQSEAHGLPLHLCGNKSPHRDPAPRGPARFLPLPGLPPAPPEPPGILAPQPPDVGSSDPLSMVYPSQGRSPSYAS

SEQ ID NO: 3198 - protein, 473 aa, Artificial Sequence
  Fusion Protein
HGEGTFTSDKSKQLEKRLVRLFYEWLINGGHKKIKPPPKGGGGGGGSGGGGSGGGGSAESKYGPPCPPCPAPEFEGGPSVFLFPPKPKDTLMISRTPEVTCVVVDVSQEDPEVQFNWYVDGVEVHNAKTKPREEQFNSTYRVVSVLTVLHQDWLNGKEYKCKVSNKGLPSSIEKTISKAKGQPREPQVYTLPPSQEEMTKNQVSLTCLVKGFYPSDIAVEWESNGQPENNYKTTPPVLDSDGSFFLYSRLTVDKSRWQEGNVFSCSVMHEALHNHYTQKSLSLSLGGGGSGSAHPIPDSSPLLQFGGQVRQRYLYTDDACQTEAHLEIREDGTVGGAADQSPESLLQLKALKPGVIQILGVKTSRFLCQRPDGALYGSLHFDPEACSFRELLLEDGYNVYQSEAHGLPLHLPGCKSPHRDPAPRGPARFLPLPGLPPAPPEPPGILAPQPPDVGSSDPLSMVGSQGRSPSYAS

SEQ ID NO: 3199 - protein, 474 aa, Artificial Sequence
  Fusion Protein
HGEGTFTSDKSKQLEKRLVRLFYEWLINGGHKKIKPPPKGGGGGGGSGGGGSGGGGSAESKYGPPCPPCPAPEFEGGPSVFLFPPKPKDTLMISRTPEVTCVVVDVSQEDPEVQFNWYVDGVEVHNAKTKPREEQFNSTYRVVSVLTVLHQDWLNGKEYKCKVSNKGLPSSIEKTISKAKGQPREPQVYTLPPSQEEMTKNQVSLTCLVKGFYPSDIAVEWESNGQPENNYKTTPPVLDSDGSFFLYSRLTVDKSRWQEGNVFSCSVMHEALHNHYTQKSLSLSLGGGGSGSAHPIPDSSPLLQFGGQVRQRYLYTDDACQTEAHLEIREDGTVGGAADQSPESLLQLKALKPGVIQILGVKTSRFLCQRPDGALYGSLHFDPEACSFRELLLEDGYNVYQSEAHGLPLHLPGCKSPHRDPAPRGPARFLPLPGLPPAPPEPPGILAPQPPDVGSSDPLSMVYPSQGRSPSYAS

SEQ ID NO: 3200 - protein, 473 aa, Artificial Sequence
  Fusion Protein
HGEGTFTSDKSKQLEKRLVRLFYEWLINGGHKKIKPPPKGGGGGGGSGGGGSGGGGSAESKYGPPCPPCPAPEFEGGPSVFLFPPKPKDTLMISRTPEVTCVVVDVSQEDPEVQFNWYVDGVEVHNAKTKPREEQFNSTYRVVSVLTVLHQDWLNGKEYKCKVSNKGLPSSIEKTISKAKGQPREPQVYTLPPSQEEMTKNQVSLTCLVKGFYPSDIAVEWESNGQPENNYKTTPPVLDSDGSFFLYSRLTVDKSRWQEGNVFSCSVMHEALHNHYTQKSLSLSLGGGGSGSAHPIPDSSPLLQFGGQVRQRYLYTDDACQTEAHLEIREDGTVGGAADQSPESLLQLKALKPGVIQILGVKTSRFLCQRPDGALYGSLHFDPEACSFRELLLEDGYNVYQSEAHGLPLHLCGNKSPHRDPAPRGPARFLPLPGLPPAPPEPPGILAPQPPDVGSSDPLSMVGSQGRSPSYAS

SEQ ID NO: 3201 - protein, 474 aa, Artificial Sequence
  Fusion Protein
HGEGTFTSDKSKQLEKRLVRLFYEWLINGGHKKIKPPPKGGGGGGGSGGGGSGGGGSAESKYGPPCPPCPAPEFEGGPSVFLFPPKPKDTLMISRTPEVTCVVVDVSQEDPEVQFNWYVDGVEVHNAKTKPREEQFNSTYRVVSVLTVLHQDWLNGKEYKCKVSNKGLPSSIEKTISKAKGQPREPQVYTLPPSQEEMTKNQVSLTCLVKGFYPSDIAVEWESNGQPENNYKTTPPVLDSDGSFFLYSRLTVDKSRWQEGNVFSCSVMHEALHNHYTQKSLSLSLGGGGSGSAHPIPDSSPLLQFGGQVRQRYLYTDDACQTEAHLEIREDGTVGGAADQSPESLLQLKALKPGVIQILGVKTSRFLCQRPDGALYGSLHFDPEACSFRELLLEDGYNVYQSEAHGLPLHLCGNKSPHRDPAPRGPARFLPLPGLPPAPPEPPGILAPQPPDVGSSDPLSMVYPSQGRSPSYAS

SEQ ID NO: 3202 - protein, 471 aa, Artificial Sequence
  Fusion Protein
HGEGTFTSDKSKQLEKRLVRLFYEWLINGGHSKIRPPPKGGGGGGGSGGGGSGGGGSADKTHTCPPCPAPEAAGGPSVFLFPPKPKDTLMISRTPEVTCVVVDVSHEDPEVKFNWYVDGVEVHNAKTKPREEQYNSTYRVVSVLTVLHQDWLNGKEYKCKVSNKALPAPIEKTISKAKGQPREPQVYTLPPSRDELTKNQVSLTCLVKGFYPSDIAVEWESNGQPENNYKTTPPVLDSDGSFFLYSKLTVDKSRWQQGNVFSCSVMHEALHNHYTQKSLSLSPGGGGSGSAHPIPDSSPLLQFGGQVRQRYLYTDDACQTEAHLEIREDGTVGGAADQSPESLLQLKALKPGVIQILGVKTSRFLCQRPDGALYGSLHFDPEACSFRELLLEDGYNVYQSEAHGLPLHLPGCKSPHRDPAPRGPARFLPLPGLPPAPPEPPGILAPQPPDVGSSDPLSMVGSQGRSPSYAS

SEQ ID NO: 3203 - protein, 472 aa, Artificial Sequence
  Fusion Protein
HGEGTFTSDKSKQLEKRLVRLFYEWLINGGHSKIRPPPKGGGGGGGSGGGGSGGGGSADKTHTCPPCPAPEAAGGPSVFLFPPKPKDTLMISRTPEVTCVVVDVSHEDPEVKFNWYVDGVEVHNAKTKPREEQYNSTYRVVSVLTVLHQDWLNGKEYKCKVSNKALPAPIEKTISKAKGQPREPQVYTLPPSRDELTKNQVSLTCLVKGFYPSDIAVEWESNGQPENNYKTTPPVLDSDGSFFLYSKLTVDKSRWQQGNVFSCSVMHEALHNHYTQKSLSLSPGGGGSGSAHPIPDSSPLLQFGGQVRQRYLYTDDACQTEAHLEIREDGTVGGAADQSPESLLQLKALKPGVIQILGVKTSRFLCQRPDGALYGSLHFDPEACSFRELLLEDGYNVYQSEAHGLPLHLPGCKSPHRDPAPRGPARFLPLPGLPPAPPEPPGILAPQPPDVGSSDPLSMVYPSQGRSPSYAS

SEQ ID NO: 3204 - protein, 471 aa, Artificial Sequence
  Fusion Protein
HGEGTFTSDKSKQLEKRLVRLFYEWLINGGHSKIRPPPKGGGGGGGSGGGGSGGGGSADKTHTCPPCPAPEAAGGPSVFLFPPKPKDTLMISRTPEVTCVVVDVSHEDPEVKFNWYVDGVEVHNAKTKPREEQYNSTYRVVSVLTVLHQDWLNGKEYKCKVSNKALPAPIEKTISKAKGQPREPQVYTLPPSRDELTKNQVSLTCLVKGFYPSDIAVEWESNGQPENNYKTTPPVLDSDGSFFLYSKLTVDKSRWQQGNVFSCSVMHEALHNHYTQKSLSLSPGGGGSGSAHPIPDSSPLLQFGGQVRQRYLYTDDACQTEAHLEIREDGTVGGAADQSPESLLQLKALKPGVIQILGVKTSRFLCQRPDGALYGSLHFDPEACSFRELLLEDGYNVYQSEAHGLPLHLCGNKSPHRDPAPRGPARFLPLPGLPPAPPEPPGILAPQPPDVGSSDPLSMVGSQGRSPSYAS

SEQ ID NO: 3205 - protein, 472 aa, Artificial Sequence
  Fusion Protein
HGEGTFTSDKSKQLEKRLVRLFYEWLINGGHSKIRPPPKGGGGGGGSGGGGSGGGGSADKTHTCPPCPAPEAAGGPSVFLFPPKPKDTLMISRTPEVTCVVVDVSHEDPEVKFNWYVDGVEVHNAKTKPREEQYNSTYRVVSVLTVLHQDWLNGKEYKCKVSNKALPAPIEKTISKAKGQPREPQVYTLPPSRDELTKNQVSLTCLVKGFYPSDIAVEWESNGQPENNYKTTPPVLDSDGSFFLYSKLTVDKSRWQQGNVFSCSVMHEALHNHYTQKSLSLSPGGGGSGSAHPIPDSSPLLQFGGQVRQRYLYTDDACQTEAHLEIREDGTVGGAADQSPESLLQLKALKPGVIQILGVKTSRFLCQRPDGALYGSLHFDPEACSFRELLLEDGYNVYQSEAHGLPLHLCGNKSPHRDPAPRGPARFLPLPGLPPAPPEPPGILAPQPPDVGSSDPLSMVYPSQGRSPSYAS

SEQ ID NO: 3206 - protein, 471 aa, Artificial Sequence
  Fusion Protein
HGEGTFTSDKSKQLEKRLVRLFYEWLINGGHSKIRPPPKGGGGGGGSGGGGSGGGGSADKTHTCPPCPAPELLGGPSVFLFPPKPKDTLMISRTPEVTCVVVDVSHEDPEVKFNWYVDGVEVHNAKTKPREEQYNNASRVVSVLTVLHQDWLNGKEYKCKVSNKALPAPIEKTISKAKGQPREPQVYTLPPSRDELTKNQVSLTCLVKGFYPSDIAVEWESNGQPENNYKTTPPVLDSDGSFFLYSKLTVDKSRWQQGNVFSCSVMHEALHNHYTQKSLSLSPGGGGSGSAHPIPDSSPLLQFGGQVRQRYLYTDDACQTEAHLEIREDGTVGGAADQSPESLLQLKALKPGVIQILGVKTSRFLCQRPDGALYGSLHFDPEACSFRELLLEDGYNVYQSEAHGLPLHLPGCKSPHRDPAPRGPARFLPLPGLPPAPPEPPGILAPQPPDVGSSDPLSMVGSQGRSPSYAS

SEQ ID NO: 3207 - protein, 472 aa, Artificial Sequence
  Fusion Protein
HGEGTFTSDKSKQLEKRLVRLFYEWLINGGHSKIRPPPKGGGGGGGSGGGGSGGGGSADKTHTCPPCPAPELLGGPSVFLFPPKPKDTLMISRTPEVTCVVVDVSHEDPEVKFNWYVDGVEVHNAKTKPREEQYNNASRVVSVLTVLHQDWLNGKEYKCKVSNKALPAPIEKTISKAKGQPREPQVYTLPPSRDELTKNQVSLTCLVKGFYPSDIAVEWESNGQPENNYKTTPPVLDSDGSFFLYSKLTVDKSRWQQGNVFSCSVMHEALHNHYTQKSLSLSPGGGGSGSAHPIPDSSPLLQFGGQVRQRYLYTDDACQTEAHLEIREDGTVGGAADQSPESLLQLKALKPGVIQILGVKTSRFLCQRPDGALYGSLHFDPEACSFRELLLEDGYNVYQSEAHGLPLHLPGCKSPHRDPAPRGPARFLPLPGLPPAPPEPPGILAPQPPDVGSSDPLSMVYPSQGRSPSYAS

SEQ ID NO: 3208 - protein, 471 aa, Artificial Sequence
  Fusion Protein
HGEGTFTSDKSKQLEKRLVRLFYEWLINGGHSKIRPPPKGGGGGGGSGGGGSGGGGSADKTHTCPPCPAPELLGGPSVFLFPPKPKDTLMISRTPEVTCVVVDVSHEDPEVKFNWYVDGVEVHNAKTKPREEQYNNASRVVSVLTVLHQDWLNGKEYKCKVSNKALPAPIEKTISKAKGQPREPQVYTLPPSRDELTKNQVSLTCLVKGFYPSDIAVEWESNGQPENNYKTTPPVLDSDGSFFLYSKLTVDKSRWQQGNVFSCSVMHEALHNHYTQKSLSLSPGGGGSGSAHPIPDSSPLLQFGGQVRQRYLYTDDACQTEAHLEIREDGTVGGAADQSPESLLQLKALKPGVIQILGVKTSRFLCQRPDGALYGSLHFDPEACSFRELLLEDGYNVYQSEAHGLPLHLCGNKSPHRDPAPRGPARFLPLPGLPPAPPEPPGILAPQPPDVGSSDPLSMVGSQGRSPSYAS

SEQ ID NO: 3209 - protein, 472 aa, Artificial Sequence
  Fusion Protein
HGEGTFTSDKSKQLEKRLVRLFYEWLINGGHSKIRPPPKGGGGGGGSGGGGSGGGGSADKTHTCPPCPAPELLGGPSVFLFPPKPKDTLMISRTPEVTCVVVDVSHEDPEVKFNWYVDGVEVHNAKTKPREEQYNNASRVVSVLTVLHQDWLNGKEYKCKVSNKALPAPIEKTISKAKGQPREPQVYTLPPSRDELTKNQVSLTCLVKGFYPSDIAVEWESNGQPENNYKTTPPVLDSDGSFFLYSKLTVDKSRWQQGNVFSCSVMHEALHNHYTQKSLSLSPGGGGSGSAHPIPDSSPLLQFGGQVRQRYLYTDDACQTEAHLEIREDGTVGGAADQSPESLLQLKALKPGVIQILGVKTSRFLCQRPDGALYGSLHFDPEACSFRELLLEDGYNVYQSEAHGLPLHLCGNKSPHRDPAPRGPARFLPLPGLPPAPPEPPGILAPQPPDVGSSDPLSMVYPSQGRSPSYAS

SEQ ID NO: 3210 - protein, 473 aa, Artificial Sequence
  Fusion Protein
HGEGTFTSDKSKQLEKRLVRLFYEWLINGGHSKIRPPPKGGGGGGGSGGGGSGGGGSAESKYGPPCPPCPAPEFEGGPSVFLFPPKPKDTLMISRTPEVTCVVVDVSQEDPEVQFNWYVDGVEVHNAKTKPREEQFNSTYRVVSVLTVLHQDWLNGKEYKCKVSNKGLPSSIEKTISKAKGQPREPQVYTLPPSQEEMTKNQVSLTCLVKGFYPSDIAVEWESNGQPENNYKTTPPVLDSDGSFFLYSRLTVDKSRWQEGNVFSCSVMHEALHNHYTQKSLSLSLGGGGSGSAHPIPDSSPLLQFGGQVRQRYLYTDDACQTEAHLEIREDGTVGGAADQSPESLLQLKALKPGVIQILGVKTSRFLCQRPDGALYGSLHFDPEACSFRELLLEDGYNVYQSEAHGLPLHLPGCKSPHRDPAPRGPARFLPLPGLPPAPPEPPGILAPQPPDVGSSDPLSMVGSQGRSPSYAS

SEQ ID NO: 3211 - protein, 474 aa, Artificial Sequence
  Fusion Protein
HGEGTFTSDKSKQLEKRLVRLFYEWLINGGHSKIRPPPKGGGGGGGSGGGGSGGGGSAESKYGPPCPPCPAPEFEGGPSVFLFPPKPKDTLMISRTPEVTCVVVDVSQEDPEVQFNWYVDGVEVHNAKTKPREEQFNSTYRVVSVLTVLHQDWLNGKEYKCKVSNKGLPSSIEKTISKAKGQPREPQVYTLPPSQEEMTKNQVSLTCLVKGFYPSDIAVEWESNGQPENNYKTTPPVLDSDGSFFLYSRLTVDKSRWQEGNVFSCSVMHEALHNHYTQKSLSLSLGGGGSGSAHPIPDSSPLLQFGGQVRQRYLYTDDACQTEAHLEIREDGTVGGAADQSPESLLQLKALKPGVIQILGVKTSRFLCQRPDGALYGSLHFDPEACSFRELLLEDGYNVYQSEAHGLPLHLPGCKSPHRDPAPRGPARFLPLPGLPPAPPEPPGILAPQPPDVGSSDPLSMVYPSQGRSPSYAS

SEQ ID NO: 3212 - protein, 473 aa, Artificial Sequence
  Fusion Protein
HGEGTFTSDKSKQLEKRLVRLFYEWLINGGHSKIRPPPKGGGGGGGSGGGGSGGGGSAESKYGPPCPPCPAPEFEGGPSVFLFPPKPKDTLMISRTPEVTCVVVDVSQEDPEVQFNWYVDGVEVHNAKTKPREEQFNSTYRVVSVLTVLHQDWLNGKEYKCKVSNKGLPSSIEKTISKAKGQPREPQVYTLPPSQEEMTKNQVSLTCLVKGFYPSDIAVEWESNGQPENNYKTTPPVLDSDGSFFLYSRLTVDKSRWQEGNVFSCSVMHEALHNHYTQKSLSLSLGGGGSGSAHPIPDSSPLLQFGGQVRQRYLYTDDACQTEAHLEIREDGTVGGAADQSPESLLQLKALKPGVIQILGVKTSRFLCQRPDGALYGSLHFDPEACSFRELLLEDGYNVYQSEAHGLPLHLCGNKSPHRDPAPRGPARFLPLPGLPPAPPEPPGILAPQPPDVGSSDPLSMVGSQGRSPSYAS

SEQ ID NO: 3213 - protein, 474 aa, Artificial Sequence
  Fusion Protein
HGEGTFTSDKSKQLEKRLVRLFYEWLINGGHSKIRPPPKGGGGGGGSGGGGSGGGGSAESKYGPPCPPCPAPEFEGGPSVFLFPPKPKDTLMISRTPEVTCVVVDVSQEDPEVQFNWYVDGVEVHNAKTKPREEQFNSTYRVVSVLTVLHQDWLNGKEYKCKVSNKGLPSSIEKTISKAKGQPREPQVYTLPPSQEEMTKNQVSLTCLVKGFYPSDIAVEWESNGQPENNYKTTPPVLDSDGSFFLYSRLTVDKSRWQEGNVFSCSVMHEALHNHYTQKSLSLSLGGGGSGSAHPIPDSSPLLQFGGQVRQRYLYTDDACQTEAHLEIREDGTVGGAADQSPESLLQLKALKPGVIQILGVKTSRFLCQRPDGALYGSLHFDPEACSFRELLLEDGYNVYQSEAHGLPLHLCGNKSPHRDPAPRGPARFLPLPGLPPAPPEPPGILAPQPPDVGSSDPLSMVYPSQGRSPSYAS

SEQ ID NO: 3214 - protein, 471 aa, Artificial Sequence
  Fusion Protein
HGEGTFTSDKSKQLEKRLVRLFYEWLINGGHSKIKPPPKGGGGGGGSGGGGSGGGGSADKTHTCPPCPAPEAAGGPSVFLFPPKPKDTLMISRTPEVTCVVVDVSHEDPEVKFNWYVDGVEVHNAKTKPREEQYNSTYRVVSVLTVLHQDWLNGKEYKCKVSNKALPAPIEKTISKAKGQPREPQVYTLPPSRDELTKNQVSLTCLVKGFYPSDIAVEWESNGQPENNYKTTPPVLDSDGSFFLYSKLTVDKSRWQQGNVFSCSVMHEALHNHYTQKSLSLSPGGGGSGSAHPIPDSSPLLQFGGQVRQRYLYTDDACQTEAHLEIREDGTVGGAADQSPESLLQLKALKPGVIQILGVKTSRFLCQRPDGALYGSLHFDPEACSFRELLLEDGYNVYQSEAHGLPLHLPGCKSPHRDPAPRGPARFLPLPGLPPAPPEPPGILAPQPPDVGSSDPLSMVGSQGRSPSYAS

SEQ ID NO: 3215 - protein, 472 aa, Artificial Sequence
  Fusion Protein
HGEGTFTSDKSKQLEKRLVRLFYEWLINGGHSKIKPPPKGGGGGGGSGGGGSGGGGSADKTHTCPPCPAPEAAGGPSVFLFPPKPKDTLMISRTPEVTCVVVDVSHEDPEVKFNWYVDGVEVHNAKTKPREEQYNSTYRVVSVLTVLHQDWLNGKEYKCKVSNKALPAPIEKTISKAKGQPREPQVYTLPPSRDELTKNQVSLTCLVKGFYPSDIAVEWESNGQPENNYKTTPPVLDSDGSFFLYSKLTVDKSRWQQGNVFSCSVMHEALHNHYTQKSLSLSPGGGGSGSAHPIPDSSPLLQFGGQVRQRYLYTDDACQTEAHLEIREDGTVGGAADQSPESLLQLKALKPGVIQILGVKTSRFLCQRPDGALYGSLHFDPEACSFRELLLEDGYNVYQSEAHGLPLHLPGCKSPHRDPAPRGPARFLPLPGLPPAPPEPPGILAPQPPDVGSSDPLSMVYPSQGRSPSYAS

SEQ ID NO: 3216 - protein, 471 aa, Artificial Sequence
  Fusion Protein
HGEGTFTSDKSKQLEKRLVRLFYEWLINGGHSKIKPPPKGGGGGGGSGGGGSGGGGSADKTHTCPPCPAPEAAGGPSVFLFPPKPKDTLMISRTPEVTCVVVDVSHEDPEVKFNWYVDGVEVHNAKTKPREEQYNSTYRVVSVLTVLHQDWLNGKEYKCKVSNKALPAPIEKTISKAKGQPREPQVYTLPPSRDELTKNQVSLTCLVKGFYPSDIAVEWESNGQPENNYKTTPPVLDSDGSFFLYSKLTVDKSRWQQGNVFSCSVMHEALHNHYTQKSLSLSPGGGGSGSAHPIPDSSPLLQFGGQVRQRYLYTDDACQTEAHLEIREDGTVGGAADQSPESLLQLKALKPGVIQILGVKTSRFLCQRPDGALYGSLHFDPEACSFRELLLEDGYNVYQSEAHGLPLHLCGNKSPHRDPAPRGPARFLPLPGLPPAPPEPPGILAPQPPDVGSSDPLSMVGSQGRSPSYAS

SEQ ID NO: 3217 - protein, 472 aa, Artificial Sequence
  Fusion Protein
HGEGTFTSDKSKQLEKRLVRLFYEWLINGGHSKIKPPPKGGGGGGGSGGGGSGGGGSADKTHTCPPCPAPEAAGGPSVFLFPPKPKDTLMISRTPEVTCVVVDVSHEDPEVKFNWYVDGVEVHNAKTKPREEQYNSTYRVVSVLTVLHQDWLNGKEYKCKVSNKALPAPIEKTISKAKGQPREPQVYTLPPSRDELTKNQVSLTCLVKGFYPSDIAVEWESNGQPENNYKTTPPVLDSDGSFFLYSKLTVDKSRWQQGNVFSCSVMHEALHNHYTQKSLSLSPGGGGSGSAHPIPDSSPLLQFGGQVRQRYLYTDDACQTEAHLEIREDGTVGGAADQSPESLLQLKALKPGVIQILGVKTSRFLCQRPDGALYGSLHFDPEACSFRELLLEDGYNVYQSEAHGLPLHLCGNKSPHRDPAPRGPARFLPLPGLPPAPPEPPGILAPQPPDVGSSDPLSMVYPSQGRSPSYAS

SEQ ID NO: 3218 - protein, 471 aa, Artificial Sequence
  Fusion Protein
HGEGTFTSDKSKQLEKRLVRLFYEWLINGGHSKIKPPPKGGGGGGGSGGGGSGGGGSADKTHTCPPCPAPELLGGPSVFLFPPKPKDTLMISRTPEVTCVVVDVSHEDPEVKFNWYVDGVEVHNAKTKPREEQYNNASRVVSVLTVLHQDWLNGKEYKCKVSNKALPAPIEKTISKAKGQPREPQVYTLPPSRDELTKNQVSLTCLVKGFYPSDIAVEWESNGQPENNYKTTPPVLDSDGSFFLYSKLTVDKSRWQQGNVFSCSVMHEALHNHYTQKSLSLSPGGGGSGSAHPIPDSSPLLQFGGQVRQRYLYTDDACQTEAHLEIREDGTVGGAADQSPESLLQLKALKPGVIQILGVKTSRFLCQRPDGALYGSLHFDPEACSFRELLLEDGYNVYQSEAHGLPLHLPGCKSPHRDPAPRGPARFLPLPGLPPAPPEPPGILAPQPPDVGSSDPLSMVGSQGRSPSYAS

SEQ ID NO: 3219 - protein, 472 aa, Artificial Sequence
  Fusion Protein
HGEGTFTSDKSKQLEKRLVRLFYEWLINGGHSKIKPPPKGGGGGGGSGGGGSGGGGSADKTHTCPPCPAPELLGGPSVFLFPPKPKDTLMISRTPEVTCVVVDVSHEDPEVKFNWYVDGVEVHNAKTKPREEQYNNASRVVSVLTVLHQDWLNGKEYKCKVSNKALPAPIEKTISKAKGQPREPQVYTLPPSRDELTKNQVSLTCLVKGFYPSDIAVEWESNGQPENNYKTTPPVLDSDGSFFLYSKLTVDKSRWQQGNVFSCSVMHEALHNHYTQKSLSLSPGGGGSGSAHPIPDSSPLLQFGGQVRQRYLYTDDACQTEAHLEIREDGTVGGAADQSPESLLQLKALKPGVIQILGVKTSRFLCQRPDGALYGSLHFDPEACSFRELLLEDGYNVYQSEAHGLPLHLPGCKSPHRDPAPRGPARFLPLPGLPPAPPEPPGILAPQPPDVGSSDPLSMVYPSQGRSPSYAS

SEQ ID NO: 3220 - protein, 471 aa, Artificial Sequence
  Fusion Protein
HGEGTFTSDKSKQLEKRLVRLFYEWLINGGHSKIKPPPKGGGGGGGSGGGGSGGGGSADKTHTCPPCPAPELLGGPSVFLFPPKPKDTLMISRTPEVTCVVVDVSHEDPEVKFNWYVDGVEVHNAKTKPREEQYNNASRVVSVLTVLHQDWLNGKEYKCKVSNKALPAPIEKTISKAKGQPREPQVYTLPPSRDELTKNQVSLTCLVKGFYPSDIAVEWESNGQPENNYKTTPPVLDSDGSFFLYSKLTVDKSRWQQGNVFSCSVMHEALHNHYTQKSLSLSPGGGGSGSAHPIPDSSPLLQFGGQVRQRYLYTDDACQTEAHLEIREDGTVGGAADQSPESLLQLKALKPGVIQILGVKTSRFLCQRPDGALYGSLHFDPEACSFRELLLEDGYNVYQSEAHGLPLHLCGNKSPHRDPAPRGPARFLPLPGLPPAPPEPPGILAPQPPDVGSSDPLSMVGSQGRSPSYAS

SEQ ID NO: 3221 - protein, 472 aa, Artificial Sequence
  Fusion Protein
HGEGTFTSDKSKQLEKRLVRLFYEWLINGGHSKIKPPPKGGGGGGGSGGGGSGGGGSADKTHTCPPCPAPELLGGPSVFLFPPKPKDTLMISRTPEVTCVVVDVSHEDPEVKFNWYVDGVEVHNAKTKPREEQYNNASRVVSVLTVLHQDWLNGKEYKCKVSNKALPAPIEKTISKAKGQPREPQVYTLPPSRDELTKNQVSLTCLVKGFYPSDIAVEWESNGQPENNYKTTPPVLDSDGSFFLYSKLTVDKSRWQQGNVFSCSVMHEALHNHYTQKSLSLSPGGGGSGSAHPIPDSSPLLQFGGQVRQRYLYTDDACQTEAHLEIREDGTVGGAADQSPESLLQLKALKPGVIQILGVKTSRFLCQRPDGALYGSLHFDPEACSFRELLLEDGYNVYQSEAHGLPLHLCGNKSPHRDPAPRGPARFLPLPGLPPAPPEPPGILAPQPPDVGSSDPLSMVYPSQGRSPSYAS

SEQ ID NO: 3222 - protein, 473 aa, Artificial Sequence
  Fusion Protein
HGEGTFTSDKSKQLEKRLVRLFYEWLINGGHSKIKPPPKGGGGGGGSGGGGSGGGGSAESKYGPPCPPCPAPEFEGGPSVFLFPPKPKDTLMISRTPEVTCVVVDVSQEDPEVQFNWYVDGVEVHNAKTKPREEQFNSTYRVVSVLTVLHQDWLNGKEYKCKVSNKGLPSSIEKTISKAKGQPREPQVYTLPPSQEEMTKNQVSLTCLVKGFYPSDIAVEWESNGQPENNYKTTPPVLDSDGSFFLYSRLTVDKSRWQEGNVFSCSVMHEALHNHYTQKSLSLSLGGGGSGSAHPIPDSSPLLQFGGQVRQRYLYTDDACQTEAHLEIREDGTVGGAADQSPESLLQLKALKPGVIQILGVKTSRFLCQRPDGALYGSLHFDPEACSFRELLLEDGYNVYQSEAHGLPLHLPGCKSPHRDPAPRGPARFLPLPGLPPAPPEPPGILAPQPPDVGSSDPLSMVGSQGRSPSYAS

SEQ ID NO: 3223 - protein, 474 aa, Artificial Sequence
  Fusion Protein
HGEGTFTSDKSKQLEKRLVRLFYEWLINGGHSKIKPPPKGGGGGGGSGGGGSGGGGSAESKYGPPCPPCPAPEFEGGPSVFLFPPKPKDTLMISRTPEVTCVVVDVSQEDPEVQFNWYVDGVEVHNAKTKPREEQFNSTYRVVSVLTVLHQDWLNGKEYKCKVSNKGLPSSIEKTISKAKGQPREPQVYTLPPSQEEMTKNQVSLTCLVKGFYPSDIAVEWESNGQPENNYKTTPPVLDSDGSFFLYSRLTVDKSRWQEGNVFSCSVMHEALHNHYTQKSLSLSLGGGGSGSAHPIPDSSPLLQFGGQVRQRYLYTDDACQTEAHLEIREDGTVGGAADQSPESLLQLKALKPGVIQILGVKTSRFLCQRPDGALYGSLHFDPEACSFRELLLEDGYNVYQSEAHGLPLHLPGCKSPHRDPAPRGPARFLPLPGLPPAPPEPPGILAPQPPDVGSSDPLSMVYPSQGRSPSYAS

SEQ ID NO: 3224 - protein, 473 aa, Artificial Sequence
  Fusion Protein
HGEGTFTSDKSKQLEKRLVRLFYEWLINGGHSKIKPPPKGGGGGGGSGGGGSGGGGSAESKYGPPCPPCPAPEFEGGPSVFLFPPKPKDTLMISRTPEVTCVVVDVSQEDPEVQFNWYVDGVEVHNAKTKPREEQFNSTYRVVSVLTVLHQDWLNGKEYKCKVSNKGLPSSIEKTISKAKGQPREPQVYTLPPSQEEMTKNQVSLTCLVKGFYPSDIAVEWESNGQPENNYKTTPPVLDSDGSFFLYSRLTVDKSRWQEGNVFSCSVMHEALHNHYTQKSLSLSLGGGGSGSAHPIPDSSPLLQFGGQVRQRYLYTDDACQTEAHLEIREDGTVGGAADQSPESLLQLKALKPGVIQILGVKTSRFLCQRPDGALYGSLHFDPEACSFRELLLEDGYNVYQSEAHGLPLHLCGNKSPHRDPAPRGPARFLPLPGLPPAPPEPPGILAPQPPDVGSSDPLSMVGSQGRSPSYAS

SEQ ID NO: 3225 - protein, 474 aa, Artificial Sequence
  Fusion Protein
HGEGTFTSDKSKQLEKRLVRLFYEWLINGGHSKIKPPPKGGGGGGGSGGGGSGGGGSAESKYGPPCPPCPAPEFEGGPSVFLFPPKPKDTLMISRTPEVTCVVVDVSQEDPEVQFNWYVDGVEVHNAKTKPREEQFNSTYRVVSVLTVLHQDWLNGKEYKCKVSNKGLPSSIEKTISKAKGQPREPQVYTLPPSQEEMTKNQVSLTCLVKGFYPSDIAVEWESNGQPENNYKTTPPVLDSDGSFFLYSRLTVDKSRWQEGNVFSCSVMHEALHNHYTQKSLSLSLGGGGSGSAHPIPDSSPLLQFGGQVRQRYLYTDDACQTEAHLEIREDGTVGGAADQSPESLLQLKALKPGVIQILGVKTSRFLCQRPDGALYGSLHFDPEACSFRELLLEDGYNVYQSEAHGLPLHLCGNKSPHRDPAPRGPARFLPLPGLPPAPPEPPGILAPQPPDVGSSDPLSMVYPSQGRSPSYAS

SEQ ID NO: 3226 - protein, 471 aa, Artificial Sequence
  Fusion Protein
HGEGTFTSDKSQQLEKRLARLFYEWLKAGGHSSIKPPPKGGGGGGGSGGGGSGGGGSADKTHTCPPCPAPEAAGGPSVFLFPPKPKDTLMISRTPEVTCVVVDVSHEDPEVKFNWYVDGVEVHNAKTKPREEQYNSTYRVVSVLTVLHQDWLNGKEYKCKVSNKALPAPIEKTISKAKGQPREPQVYTLPPSRDELTKNQVSLTCLVKGFYPSDIAVEWESNGQPENNYKTTPPVLDSDGSFFLYSKLTVDKSRWQQGNVFSCSVMHEALHNHYTQKSLSLSPGGGGSGSAHPIPDSSPLLQFGGQVRQRYLYTDDACQTEAHLEIREDGTVGGAADQSPESLLQLKALKPGVIQILGVKTSRFLCQRPDGALYGSLHFDPEACSFRELLLEDGYNVYQSEAHGLPLHLPGCKSPHRDPAPRGPARFLPLPGLPPAPPEPPGILAPQPPDVGSSDPLSMVGSQGRSPSYAS

SEQ ID NO: 3227 - protein, 472 aa, Artificial Sequence
  Fusion Protein
HGEGTFTSDKSQQLEKRLARLFYEWLKAGGHSSIKPPPKGGGGGGGSGGGGSGGGGSADKTHTCPPCPAPEAAGGPSVFLFPPKPKDTLMISRTPEVTCVVVDVSHEDPEVKFNWYVDGVEVHNAKTKPREEQYNSTYRVVSVLTVLHQDWLNGKEYKCKVSNKALPAPIEKTISKAKGQPREPQVYTLPPSRDELTKNQVSLTCLVKGFYPSDIAVEWESNGQPENNYKTTPPVLDSDGSFFLYSKLTVDKSRWQQGNVFSCSVMHEALHNHYTQKSLSLSPGGGGSGSAHPIPDSSPLLQFGGQVRQRYLYTDDACQTEAHLEIREDGTVGGAADQSPESLLQLKALKPGVIQILGVKTSRFLCQRPDGALYGSLHFDPEACSFRELLLEDGYNVYQSEAHGLPLHLPGCKSPHRDPAPRGPARFLPLPGLPPAPPEPPGILAPQPPDVGSSDPLSMVYPSQGRSPSYAS

SEQ ID NO: 3228 - protein, 471 aa, Artificial Sequence
  Fusion Protein
HGEGTFTSDKSQQLEKRLARLFYEWLKAGGHSSIKPPPKGGGGGGGSGGGGSGGGGSADKTHTCPPCPAPEAAGGPSVFLFPPKPKDTLMISRTPEVTCVVVDVSHEDPEVKFNWYVDGVEVHNAKTKPREEQYNSTYRVVSVLTVLHQDWLNGKEYKCKVSNKALPAPIEKTISKAKGQPREPQVYTLPPSRDELTKNQVSLTCLVKGFYPSDIAVEWESNGQPENNYKTTPPVLDSDGSFFLYSKLTVDKSRWQQGNVFSCSVMHEALHNHYTQKSLSLSPGGGGSGSAHPIPDSSPLLQFGGQVRQRYLYTDDACQTEAHLEIREDGTVGGAADQSPESLLQLKALKPGVIQILGVKTSRFLCQRPDGALYGSLHFDPEACSFRELLLEDGYNVYQSEAHGLPLHLCGNKSPHRDPAPRGPARFLPLPGLPPAPPEPPGILAPQPPDVGSSDPLSMVGSQGRSPSYAS

SEQ ID NO: 3229 - protein, 472 aa, Artificial Sequence
  Fusion Protein
HGEGTFTSDKSQQLEKRLARLFYEWLKAGGHSSIKPPPKGGGGGGGSGGGGSGGGGSADKTHTCPPCPAPEAAGGPSVFLFPPKPKDTLMISRTPEVTCVVVDVSHEDPEVKFNWYVDGVEVHNAKTKPREEQYNSTYRVVSVLTVLHQDWLNGKEYKCKVSNKALPAPIEKTISKAKGQPREPQVYTLPPSRDELTKNQVSLTCLVKGFYPSDIAVEWESNGQPENNYKTTPPVLDSDGSFFLYSKLTVDKSRWQQGNVFSCSVMHEALHNHYTQKSLSLSPGGGGSGSAHPIPDSSPLLQFGGQVRQRYLYTDDACQTEAHLEIREDGTVGGAADQSPESLLQLKALKPGVIQILGVKTSRFLCQRPDGALYGSLHFDPEACSFRELLLEDGYNVYQSEAHGLPLHLCGNKSPHRDPAPRGPARFLPLPGLPPAPPEPPGILAPQPPDVGSSDPLSMVYPSQGRSPSYAS

SEQ ID NO: 3230 - protein, 471 aa, Artificial Sequence
  Fusion Protein
HGEGTFTSDKSQQLEKRLARLFYEWLKAGGHSSIKPPPKGGGGGGGSGGGGSGGGGSADKTHTCPPCPAPELLGGPSVFLFPPKPKDTLMISRTPEVTCVVVDVSHEDPEVKFNWYVDGVEVHNAKTKPREEQYNNASRVVSVLTVLHQDWLNGKEYKCKVSNKALPAPIEKTISKAKGQPREPQVYTLPPSRDELTKNQVSLTCLVKGFYPSDIAVEWESNGQPENNYKTTPPVLDSDGSFFLYSKLTVDKSRWQQGNVFSCSVMHEALHNHYTQKSLSLSPGGGGSGSAHPIPDSSPLLQFGGQVRQRYLYTDDACQTEAHLEIREDGTVGGAADQSPESLLQLKALKPGVIQILGVKTSRFLCQRPDGALYGSLHFDPEACSFRELLLEDGYNVYQSEAHGLPLHLPGCKSPHRDPAPRGPARFLPLPGLPPAPPEPPGILAPQPPDVGSSDPLSMVGSQGRSPSYAS

SEQ ID NO: 3231 - protein, 472 aa, Artificial Sequence
  Fusion Protein
HGEGTFTSDKSQQLEKRLARLFYEWLKAGGHSSIKPPPKGGGGGGGSGGGGSGGGGSADKTHTCPPCPAPELLGGPSVFLFPPKPKDTLMISRTPEVTCVVVDVSHEDPEVKFNWYVDGVEVHNAKTKPREEQYNNASRVVSVLTVLHQDWLNGKEYKCKVSNKALPAPIEKTISKAKGQPREPQVYTLPPSRDELTKNQVSLTCLVKGFYPSDIAVEWESNGQPENNYKTTPPVLDSDGSFFLYSKLTVDKSRWQQGNVFSCSVMHEALHNHYTQKSLSLSPGGGGSGSAHPIPDSSPLLQFGGQVRQRYLYTDDACQTEAHLEIREDGTVGGAADQSPESLLQLKALKPGVIQILGVKTSRFLCQRPDGALYGSLHFDPEACSFRELLLEDGYNVYQSEAHGLPLHLPGCKSPHRDPAPRGPARFLPLPGLPPAPPEPPGILAPQPPDVGSSDPLSMVYPSQGRSPSYAS

SEQ ID NO: 3232 - protein, 471 aa, Artificial Sequence
  Fusion Protein
HGEGTFTSDKSQQLEKRLARLFYEWLKAGGHSSIKPPPKGGGGGGGSGGGGSGGGGSADKTHTCPPCPAPELLGGPSVFLFPPKPKDTLMISRTPEVTCVVVDVSHEDPEVKFNWYVDGVEVHNAKTKPREEQYNNASRVVSVLTVLHQDWLNGKEYKCKVSNKALPAPIEKTISKAKGQPREPQVYTLPPSRDELTKNQVSLTCLVKGFYPSDIAVEWESNGQPENNYKTTPPVLDSDGSFFLYSKLTVDKSRWQQGNVFSCSVMHEALHNHYTQKSLSLSPGGGGSGSAHPIPDSSPLLQFGGQVRQRYLYTDDACQTEAHLEIREDGTVGGAADQSPESLLQLKALKPGVIQILGVKTSRFLCQRPDGALYGSLHFDPEACSFRELLLEDGYNVYQSEAHGLPLHLCGNKSPHRDPAPRGPARFLPLPGLPPAPPEPPGILAPQPPDVGSSDPLSMVGSQGRSPSYAS

SEQ ID NO: 3233 - protein, 472 aa, Artificial Sequence
  Fusion Protein
HGEGTFTSDKSQQLEKRLARLFYEWLKAGGHSSIKPPPKGGGGGGGSGGGGSGGGGSADKTHTCPPCPAPELLGGPSVFLFPPKPKDTLMISRTPEVTCVVVDVSHEDPEVKFNWYVDGVEVHNAKTKPREEQYNNASRVVSVLTVLHQDWLNGKEYKCKVSNKALPAPIEKTISKAKGQPREPQVYTLPPSRDELTKNQVSLTCLVKGFYPSDIAVEWESNGQPENNYKTTPPVLDSDGSFFLYSKLTVDKSRWQQGNVFSCSVMHEALHNHYTQKSLSLSPGGGGSGSAHPIPDSSPLLQFGGQVRQRYLYTDDACQTEAHLEIREDGTVGGAADQSPESLLQLKALKPGVIQILGVKTSRFLCQRPDGALYGSLHFDPEACSFRELLLEDGYNVYQSEAHGLPLHLCGNKSPHRDPAPRGPARFLPLPGLPPAPPEPPGILAPQPPDVGSSDPLSMVYPSQGRSPSYAS

SEQ ID NO: 3234 - protein, 473 aa, Artificial Sequence
  Fusion Protein
HGEGTFTSDKSQQLEKRLARLFYEWLKAGGHSSIKPPPKGGGGGGGSGGGGSGGGGSAESKYGPPCPPCPAPEFEGGPSVFLFPPKPKDTLMISRTPEVTCVVVDVSQEDPEVQFNWYVDGVEVHNAKTKPREEQFNSTYRVVSVLTVLHQDWLNGKEYKCKVSNKGLPSSIEKTISKAKGQPREPQVYTLPPSQEEMTKNQVSLTCLVKGFYPSDIAVEWESNGQPENNYKTTPPVLDSDGSFFLYSRLTVDKSRWQEGNVFSCSVMHEALHNHYTQKSLSLSLGGGGSGSAHPIPDSSPLLQFGGQVRQRYLYTDDACQTEAHLEIREDGTVGGAADQSPESLLQLKALKPGVIQILGVKTSRFLCQRPDGALYGSLHFDPEACSFRELLLEDGYNVYQSEAHGLPLHLPGCKSPHRDPAPRGPARFLPLPGLPPAPPEPPGILAPQPPDVGSSDPLSMVGSQGRSPSYAS

SEQ ID NO: 3235 - protein, 474 aa, Artificial Sequence
  Fusion Protein
HGEGTFTSDKSQQLEKRLARLFYEWLKAGGHSSIKPPPKGGGGGGGSGGGGSGGGGSAESKYGPPCPPCPAPEFEGGPSVFLFPPKPKDTLMISRTPEVTCVVVDVSQEDPEVQFNWYVDGVEVHNAKTKPREEQFNSTYRVVSVLTVLHQDWLNGKEYKCKVSNKGLPSSIEKTISKAKGQPREPQVYTLPPSQEEMTKNQVSLTCLVKGFYPSDIAVEWESNGQPENNYKTTPPVLDSDGSFFLYSRLTVDKSRWQEGNVFSCSVMHEALHNHYTQKSLSLSLGGGGSGSAHPIPDSSPLLQFGGQVRQRYLYTDDACQTEAHLEIREDGTVGGAADQSPESLLQLKALKPGVIQILGVKTSRFLCQRPDGALYGSLHFDPEACSFRELLLEDGYNVYQSEAHGLPLHLPGCKSPHRDPAPRGPARFLPLPGLPPAPPEPPGILAPQPPDVGSSDPLSMVYPSQGRSPSYAS

SEQ ID NO: 3236 - protein, 473 aa, Artificial Sequence
  Fusion Protein
HGEGTFTSDKSQQLEKRLARLFYEWLKAGGHSSIKPPPKGGGGGGGSGGGGSGGGGSAESKYGPPCPPCPAPEFEGGPSVFLFPPKPKDTLMISRTPEVTCVVVDVSQEDPEVQFNWYVDGVEVHNAKTKPREEQFNSTYRVVSVLTVLHQDWLNGKEYKCKVSNKGLPSSIEKTISKAKGQPREPQVYTLPPSQEEMTKNQVSLTCLVKGFYPSDIAVEWESNGQPENNYKTTPPVLDSDGSFFLYSRLTVDKSRWQEGNVFSCSVMHEALHNHYTQKSLSLSLGGGGSGSAHPIPDSSPLLQFGGQVRQRYLYTDDACQTEAHLEIREDGTVGGAADQSPESLLQLKALKPGVIQILGVKTSRFLCQRPDGALYGSLHFDPEACSFRELLLEDGYNVYQSEAHGLPLHLCGNKSPHRDPAPRGPARFLPLPGLPPAPPEPPGILAPQPPDVGSSDPLSMVGSQGRSPSYAS

SEQ ID NO: 3237 - protein, 474 aa, Artificial Sequence
  Fusion Protein
HGEGTFTSDKSQQLEKRLARLFYEWLKAGGHSSIKPPPKGGGGGGGSGGGGSGGGGSAESKYGPPCPPCPAPEFEGGPSVFLFPPKPKDTLMISRTPEVTCVVVDVSQEDPEVQFNWYVDGVEVHNAKTKPREEQFNSTYRVVSVLTVLHQDWLNGKEYKCKVSNKGLPSSIEKTISKAKGQPREPQVYTLPPSQEEMTKNQVSLTCLVKGFYPSDIAVEWESNGQPENNYKTTPPVLDSDGSFFLYSRLTVDKSRWQEGNVFSCSVMHEALHNHYTQKSLSLSLGGGGSGSAHPIPDSSPLLQFGGQVRQRYLYTDDACQTEAHLEIREDGTVGGAADQSPESLLQLKALKPGVIQILGVKTSRFLCQRPDGALYGSLHFDPEACSFRELLLEDGYNVYQSEAHGLPLHLCGNKSPHRDPAPRGPARFLPLPGLPPAPPEPPGILAPQPPDVGSSDPLSMVYPSQGRSPSYAS

SEQ ID NO: 3238 - protein, 471 aa, Artificial Sequence
  Fusion Protein
HGEGTFTSDKSQQLEKRLARLFYEWLKAGGHSKGKPPPKGGGGGGGSGGGGSGGGGSADKTHTCPPCPAPEAAGGPSVFLFPPKPKDTLMISRTPEVTCVVVDVSHEDPEVKFNWYVDGVEVHNAKTKPREEQYNSTYRVVSVLTVLHQDWLNGKEYKCKVSNKALPAPIEKTISKAKGQPREPQVYTLPPSRDELTKNQVSLTCLVKGFYPSDIAVEWESNGQPENNYKTTPPVLDSDGSFFLYSKLTVDKSRWQQGNVFSCSVMHEALHNHYTQKSLSLSPGGGGSGSAHPIPDSSPLLQFGGQVRQRYLYTDDACQTEAHLEIREDGTVGGAADQSPESLLQLKALKPGVIQILGVKTSRFLCQRPDGALYGSLHFDPEACSFRELLLEDGYNVYQSEAHGLPLHLPGCKSPHRDPAPRGPARFLPLPGLPPAPPEPPGILAPQPPDVGSSDPLSMVGSQGRSPSYAS

SEQ ID NO: 3239 - protein, 472 aa, Artificial Sequence
  Fusion Protein
HGEGTFTSDKSQQLEKRLARLFYEWLKAGGHSKGKPPPKGGGGGGGSGGGGSGGGGSADKTHTCPPCPAPEAAGGPSVFLFPPKPKDTLMISRTPEVTCVVVDVSHEDPEVKFNWYVDGVEVHNAKTKPREEQYNSTYRVVSVLTVLHQDWLNGKEYKCKVSNKALPAPIEKTISKAKGQPREPQVYTLPPSRDELTKNQVSLTCLVKGFYPSDIAVEWESNGQPENNYKTTPPVLDSDGSFFLYSKLTVDKSRWQQGNVFSCSVMHEALHNHYTQKSLSLSPGGGGSGSAHPIPDSSPLLQFGGQVRQRYLYTDDACQTEAHLEIREDGTVGGAADQSPESLLQLKALKPGVIQILGVKTSRFLCQRPDGALYGSLHFDPEACSFRELLLEDGYNVYQSEAHGLPLHLPGCKSPHRDPAPRGPARFLPLPGLPPAPPEPPGILAPQPPDVGSSDPLSMVYPSQGRSPSYAS

SEQ ID NO: 3240 - protein, 471 aa, Artificial Sequence
  Fusion Protein
HGEGTFTSDKSQQLEKRLARLFYEWLKAGGHSKGKPPPKGGGGGGGSGGGGSGGGGSADKTHTCPPCPAPEAAGGPSVFLFPPKPKDTLMISRTPEVTCVVVDVSHEDPEVKFNWYVDGVEVHNAKTKPREEQYNSTYRVVSVLTVLHQDWLNGKEYKCKVSNKALPAPIEKTISKAKGQPREPQVYTLPPSRDELTKNQVSLTCLVKGFYPSDIAVEWESNGQPENNYKTTPPVLDSDGSFFLYSKLTVDKSRWQQGNVFSCSVMHEALHNHYTQKSLSLSPGGGGSGSAHPIPDSSPLLQFGGQVRQRYLYTDDACQTEAHLEIREDGTVGGAADQSPESLLQLKALKPGVIQILGVKTSRFLCQRPDGALYGSLHFDPEACSFRELLLEDGYNVYQSEAHGLPLHLCGNKSPHRDPAPRGPARFLPLPGLPPAPPEPPGILAPQPPDVGSSDPLSMVGSQGRSPSYAS

SEQ ID NO: 3241 - protein, 472 aa, Artificial Sequence
  Fusion Protein
HGEGTFTSDKSQQLEKRLARLFYEWLKAGGHSKGKPPPKGGGGGGGSGGGGSGGGGSADKTHTCPPCPAPEAAGGPSVFLFPPKPKDTLMISRTPEVTCVVVDVSHEDPEVKFNWYVDGVEVHNAKTKPREEQYNSTYRVVSVLTVLHQDWLNGKEYKCKVSNKALPAPIEKTISKAKGQPREPQVYTLPPSRDELTKNQVSLTCLVKGFYPSDIAVEWESNGQPENNYKTTPPVLDSDGSFFLYSKLTVDKSRWQQGNVFSCSVMHEALHNHYTQKSLSLSPGGGGSGSAHPIPDSSPLLQFGGQVRQRYLYTDDACQTEAHLEIREDGTVGGAADQSPESLLQLKALKPGVIQILGVKTSRFLCQRPDGALYGSLHFDPEACSFRELLLEDGYNVYQSEAHGLPLHLCGNKSPHRDPAPRGPARFLPLPGLPPAPPEPPGILAPQPPDVGSSDPLSMVYPSQGRSPSYAS

SEQ ID NO: 3242 - protein, 471 aa, Artificial Sequence
  Fusion Protein
HGEGTFTSDKSQQLEKRLARLFYEWLKAGGHSKGKPPPKGGGGGGGSGGGGSGGGGSADKTHTCPPCPAPELLGGPSVFLFPPKPKDTLMISRTPEVTCVVVDVSHEDPEVKFNWYVDGVEVHNAKTKPREEQYNNASRVVSVLTVLHQDWLNGKEYKCKVSNKALPAPIEKTISKAKGQPREPQVYTLPPSRDELTKNQVSLTCLVKGFYPSDIAVEWESNGQPENNYKTTPPVLDSDGSFFLYSKLTVDKSRWQQGNVFSCSVMHEALHNHYTQKSLSLSPGGGGSGSAHPIPDSSPLLQFGGQVRQRYLYTDDACQTEAHLEIREDGTVGGAADQSPESLLQLKALKPGVIQILGVKTSRFLCQRPDGALYGSLHFDPEACSFRELLLEDGYNVYQSEAHGLPLHLPGCKSPHRDPAPRGPARFLPLPGLPPAPPEPPGILAPQPPDVGSSDPLSMVGSQGRSPSYAS

SEQ ID NO: 3243 - protein, 472 aa, Artificial Sequence
  Fusion Protein
HGEGTFTSDKSQQLEKRLARLFYEWLKAGGHSKGKPPPKGGGGGGGSGGGGSGGGGSADKTHTCPPCPAPELLGGPSVFLFPPKPKDTLMISRTPEVTCVVVDVSHEDPEVKFNWYVDGVEVHNAKTKPREEQYNNASRVVSVLTVLHQDWLNGKEYKCKVSNKALPAPIEKTISKAKGQPREPQVYTLPPSRDELTKNQVSLTCLVKGFYPSDIAVEWESNGQPENNYKTTPPVLDSDGSFFLYSKLTVDKSRWQQGNVFSCSVMHEALHNHYTQKSLSLSPGGGGSGSAHPIPDSSPLLQFGGQVRQRYLYTDDACQTEAHLEIREDGTVGGAADQSPESLLQLKALKPGVIQILGVKTSRFLCQRPDGALYGSLHFDPEACSFRELLLEDGYNVYQSEAHGLPLHLPGCKSPHRDPAPRGPARFLPLPGLPPAPPEPPGILAPQPPDVGSSDPLSMVYPSQGRSPSYAS

SEQ ID NO: 3244 - protein, 471 aa, Artificial Sequence
  Fusion Protein
HGEGTFTSDKSQQLEKRLARLFYEWLKAGGHSKGKPPPKGGGGGGGSGGGGSGGGGSADKTHTCPPCPAPELLGGPSVFLFPPKPKDTLMISRTPEVTCVVVDVSHEDPEVKFNWYVDGVEVHNAKTKPREEQYNNASRVVSVLTVLHQDWLNGKEYKCKVSNKALPAPIEKTISKAKGQPREPQVYTLPPSRDELTKNQVSLTCLVKGFYPSDIAVEWESNGQPENNYKTTPPVLDSDGSFFLYSKLTVDKSRWQQGNVFSCSVMHEALHNHYTQKSLSLSPGGGGSGSAHPIPDSSPLLQFGGQVRQRYLYTDDACQTEAHLEIREDGTVGGAADQSPESLLQLKALKPGVIQILGVKTSRFLCQRPDGALYGSLHFDPEACSFRELLLEDGYNVYQSEAHGLPLHLCGNKSPHRDPAPRGPARFLPLPGLPPAPPEPPGILAPQPPDVGSSDPLSMVGSQGRSPSYAS

SEQ ID NO: 3245 - protein, 472 aa, Artificial Sequence
  Fusion Protein
HGEGTFTSDKSQQLEKRLARLFYEWLKAGGHSKGKPPPKGGGGGGGSGGGGSGGGGSADKTHTCPPCPAPELLGGPSVFLFPPKPKDTLMISRTPEVTCVVVDVSHEDPEVKFNWYVDGVEVHNAKTKPREEQYNNASRVVSVLTVLHQDWLNGKEYKCKVSNKALPAPIEKTISKAKGQPREPQVYTLPPSRDELTKNQVSLTCLVKGFYPSDIAVEWESNGQPENNYKTTPPVLDSDGSFFLYSKLTVDKSRWQQGNVFSCSVMHEALHNHYTQKSLSLSPGGGGSGSAHPIPDSSPLLQFGGQVRQRYLYTDDACQTEAHLEIREDGTVGGAADQSPESLLQLKALKPGVIQILGVKTSRFLCQRPDGALYGSLHFDPEACSFRELLLEDGYNVYQSEAHGLPLHLCGNKSPHRDPAPRGPARFLPLPGLPPAPPEPPGILAPQPPDVGSSDPLSMVYPSQGRSPSYAS

SEQ ID NO: 3246 - protein, 473 aa, Artificial Sequence
  Fusion Protein
HGEGTFTSDKSQQLEKRLARLFYEWLKAGGHSKGKPPPKGGGGGGGSGGGGSGGGGSAESKYGPPCPPCPAPEFEGGPSVFLFPPKPKDTLMISRTPEVTCVVVDVSQEDPEVQFNWYVDGVEVHNAKTKPREEQFNSTYRVVSVLTVLHQDWLNGKEYKCKVSNKGLPSSIEKTISKAKGQPREPQVYTLPPSQEEMTKNQVSLTCLVKGFYPSDIAVEWESNGQPENNYKTTPPVLDSDGSFFLYSRLTVDKSRWQEGNVFSCSVMHEALHNHYTQKSLSLSLGGGGSGSAHPIPDSSPLLQFGGQVRQRYLYTDDACQTEAHLEIREDGTVGGAADQSPESLLQLKALKPGVIQILGVKTSRFLCQRPDGALYGSLHFDPEACSFRELLLEDGYNVYQSEAHGLPLHLPGCKSPHRDPAPRGPARFLPLPGLPPAPPEPPGILAPQPPDVGSSDPLSMVGSQGRSPSYAS

SEQ ID NO: 3247 - protein, 474 aa, Artificial Sequence
  Fusion Protein
HGEGTFTSDKSQQLEKRLARLFYEWLKAGGHSKGKPPPKGGGGGGGSGGGGSGGGGSAESKYGPPCPPCPAPEFEGGPSVFLFPPKPKDTLMISRTPEVTCVVVDVSQEDPEVQFNWYVDGVEVHNAKTKPREEQFNSTYRVVSVLTVLHQDWLNGKEYKCKVSNKGLPSSIEKTISKAKGQPREPQVYTLPPSQEEMTKNQVSLTCLVKGFYPSDIAVEWESNGQPENNYKTTPPVLDSDGSFFLYSRLTVDKSRWQEGNVFSCSVMHEALHNHYTQKSLSLSLGGGGSGSAHPIPDSSPLLQFGGQVRQRYLYTDDACQTEAHLEIREDGTVGGAADQSPESLLQLKALKPGVIQILGVKTSRFLCQRPDGALYGSLHFDPEACSFRELLLEDGYNVYQSEAHGLPLHLPGCKSPHRDPAPRGPARFLPLPGLPPAPPEPPGILAPQPPDVGSSDPLSMVYPSQGRSPSYAS

SEQ ID NO: 3248 - protein, 473 aa, Artificial Sequence
  Fusion Protein
HGEGTFTSDKSQQLEKRLARLFYEWLKAGGHSKGKPPPKGGGGGGGSGGGGSGGGGSAESKYGPPCPPCPAPEFEGGPSVFLFPPKPKDTLMISRTPEVTCVVVDVSQEDPEVQFNWYVDGVEVHNAKTKPREEQFNSTYRVVSVLTVLHQDWLNGKEYKCKVSNKGLPSSIEKTISKAKGQPREPQVYTLPPSQEEMTKNQVSLTCLVKGFYPSDIAVEWESNGQPENNYKTTPPVLDSDGSFFLYSRLTVDKSRWQEGNVFSCSVMHEALHNHYTQKSLSLSLGGGGSGSAHPIPDSSPLLQFGGQVRQRYLYTDDACQTEAHLEIREDGTVGGAADQSPESLLQLKALKPGVIQILGVKTSRFLCQRPDGALYGSLHFDPEACSFRELLLEDGYNVYQSEAHGLPLHLCGNKSPHRDPAPRGPARFLPLPGLPPAPPEPPGILAPQPPDVGSSDPLSMVGSQGRSPSYAS

SEQ ID NO: 3249 - protein, 474 aa, Artificial Sequence
  Fusion Protein
HGEGTFTSDKSQQLEKRLARLFYEWLKAGGHSKGKPPPKGGGGGGGSGGGGSGGGGSAESKYGPPCPPCPAPEFEGGPSVFLFPPKPKDTLMISRTPEVTCVVVDVSQEDPEVQFNWYVDGVEVHNAKTKPREEQFNSTYRVVSVLTVLHQDWLNGKEYKCKVSNKGLPSSIEKTISKAKGQPREPQVYTLPPSQEEMTKNQVSLTCLVKGFYPSDIAVEWESNGQPENNYKTTPPVLDSDGSFFLYSRLTVDKSRWQEGNVFSCSVMHEALHNHYTQKSLSLSLGGGGSGSAHPIPDSSPLLQFGGQVRQRYLYTDDACQTEAHLEIREDGTVGGAADQSPESLLQLKALKPGVIQILGVKTSRFLCQRPDGALYGSLHFDPEACSFRELLLEDGYNVYQSEAHGLPLHLCGNKSPHRDPAPRGPARFLPLPGLPPAPPEPPGILAPQPPDVGSSDPLSMVYPSQGRSPSYAS

SEQ ID NO: 3250 - protein, 471 aa, Artificial Sequence
  Fusion Protein
HGEGTFTSDKSQQLEKRLARLFYEWLIAGGHSKIKPPPKGGGGGGGSGGGGSGGGGSADKTHTCPPCPAPEAAGGPSVFLFPPKPKDTLMISRTPEVTCVVVDVSHEDPEVKFNWYVDGVEVHNAKTKPREEQYNSTYRVVSVLTVLHQDWLNGKEYKCKVSNKALPAPIEKTISKAKGQPREPQVYTLPPSRDELTKNQVSLTCLVKGFYPSDIAVEWESNGQPENNYKTTPPVLDSDGSFFLYSKLTVDKSRWQQGNVFSCSVMHEALHNHYTQKSLSLSPGGGGSGSAHPIPDSSPLLQFGGQVRQRYLYTDDACQTEAHLEIREDGTVGGAADQSPESLLQLKALKPGVIQILGVKTSRFLCQRPDGALYGSLHFDPEACSFRELLLEDGYNVYQSEAHGLPLHLPGCKSPHRDPAPRGPARFLPLPGLPPAPPEPPGILAPQPPDVGSSDPLSMVGSQGRSPSYAS

SEQ ID NO: 3251 - protein, 472 aa, Artificial Sequence
  Fusion Protein
HGEGTFTSDKSQQLEKRLARLFYEWLIAGGHSKIKPPPKGGGGGGGSGGGGSGGGGSADKTHTCPPCPAPEAAGGPSVFLFPPKPKDTLMISRTPEVTCVVVDVSHEDPEVKFNWYVDGVEVHNAKTKPREEQYNSTYRVVSVLTVLHQDWLNGKEYKCKVSNKALPAPIEKTISKAKGQPREPQVYTLPPSRDELTKNQVSLTCLVKGFYPSDIAVEWESNGQPENNYKTTPPVLDSDGSFFLYSKLTVDKSRWQQGNVFSCSVMHEALHNHYTQKSLSLSPGGGGSGSAHPIPDSSPLLQFGGQVRQRYLYTDDACQTEAHLEIREDGTVGGAADQSPESLLQLKALKPGVIQILGVKTSRFLCQRPDGALYGSLHFDPEACSFRELLLEDGYNVYQSEAHGLPLHLPGCKSPHRDPAPRGPARFLPLPGLPPAPPEPPGILAPQPPDVGSSDPLSMVYPSQGRSPSYAS

SEQ ID NO: 3252 - protein, 471 aa, Artificial Sequence
  Fusion Protein
HGEGTFTSDKSQQLEKRLARLFYEWLIAGGHSKIKPPPKGGGGGGGSGGGGSGGGGSADKTHTCPPCPAPEAAGGPSVFLFPPKPKDTLMISRTPEVTCVVVDVSHEDPEVKFNWYVDGVEVHNAKTKPREEQYNSTYRVVSVLTVLHQDWLNGKEYKCKVSNKALPAPIEKTISKAKGQPREPQVYTLPPSRDELTKNQVSLTCLVKGFYPSDIAVEWESNGQPENNYKTTPPVLDSDGSFFLYSKLTVDKSRWQQGNVFSCSVMHEALHNHYTQKSLSLSPGGGGSGSAHPIPDSSPLLQFGGQVRQRYLYTDDACQTEAHLEIREDGTVGGAADQSPESLLQLKALKPGVIQILGVKTSRFLCQRPDGALYGSLHFDPEACSFRELLLEDGYNVYQSEAHGLPLHLCGNKSPHRDPAPRGPARFLPLPGLPPAPPEPPGILAPQPPDVGSSDPLSMVGSQGRSPSYAS

SEQ ID NO: 3253 - protein, 472 aa, Artificial Sequence
  Fusion Protein
HGEGTFTSDKSQQLEKRLARLFYEWLIAGGHSKIKPPPKGGGGGGGSGGGGSGGGGSADKTHTCPPCPAPEAAGGPSVFLFPPKPKDTLMISRTPEVTCVVVDVSHEDPEVKFNWYVDGVEVHNAKTKPREEQYNSTYRVVSVLTVLHQDWLNGKEYKCKVSNKALPAPIEKTISKAKGQPREPQVYTLPPSRDELTKNQVSLTCLVKGFYPSDIAVEWESNGQPENNYKTTPPVLDSDGSFFLYSKLTVDKSRWQQGNVFSCSVMHEALHNHYTQKSLSLSPGGGGSGSAHPIPDSSPLLQFGGQVRQRYLYTDDACQTEAHLEIREDGTVGGAADQSPESLLQLKALKPGVIQILGVKTSRFLCQRPDGALYGSLHFDPEACSFRELLLEDGYNVYQSEAHGLPLHLCGNKSPHRDPAPRGPARFLPLPGLPPAPPEPPGILAPQPPDVGSSDPLSMVYPSQGRSPSYAS

SEQ ID NO: 3254 - protein, 471 aa, Artificial Sequence
  Fusion Protein
HGEGTFTSDKSQQLEKRLARLFYEWLIAGGHSKIKPPPKGGGGGGGSGGGGSGGGGSADKTHTCPPCPAPELLGGPSVFLFPPKPKDTLMISRTPEVTCVVVDVSHEDPEVKFNWYVDGVEVHNAKTKPREEQYNNASRVVSVLTVLHQDWLNGKEYKCKVSNKALPAPIEKTISKAKGQPREPQVYTLPPSRDELTKNQVSLTCLVKGFYPSDIAVEWESNGQPENNYKTTPPVLDSDGSFFLYSKLTVDKSRWQQGNVFSCSVMHEALHNHYTQKSLSLSPGGGGSGSAHPIPDSSPLLQFGGQVRQRYLYTDDACQTEAHLEIREDGTVGGAADQSPESLLQLKALKPGVIQILGVKTSRFLCQRPDGALYGSLHFDPEACSFRELLLEDGYNVYQSEAHGLPLHLPGCKSPHRDPAPRGPARFLPLPGLPPAPPEPPGILAPQPPDVGSSDPLSMVGSQGRSPSYAS

SEQ ID NO: 3255 - protein, 472 aa, Artificial Sequence
  Fusion Protein
HGEGTFTSDKSQQLEKRLARLFYEWLIAGGHSKIKPPPKGGGGGGGSGGGGSGGGGSADKTHTCPPCPAPELLGGPSVFLFPPKPKDTLMISRTPEVTCVVVDVSHEDPEVKFNWYVDGVEVHNAKTKPREEQYNNASRVVSVLTVLHQDWLNGKEYKCKVSNKALPAPIEKTISKAKGQPREPQVYTLPPSRDELTKNQVSLTCLVKGFYPSDIAVEWESNGQPENNYKTTPPVLDSDGSFFLYSKLTVDKSRWQQGNVFSCSVMHEALHNHYTQKSLSLSPGGGGSGSAHPIPDSSPLLQFGGQVRQRYLYTDDACQTEAHLEIREDGTVGGAADQSPESLLQLKALKPGVIQILGVKTSRFLCQRPDGALYGSLHFDPEACSFRELLLEDGYNVYQSEAHGLPLHLPGCKSPHRDPAPRGPARFLPLPGLPPAPPEPPGILAPQPPDVGSSDPLSMVYPSQGRSPSYAS

SEQ ID NO: 3256 - protein, 471 aa, Artificial Sequence
  Fusion Protein
HGEGTFTSDKSQQLEKRLARLFYEWLIAGGHSKIKPPPKGGGGGGGSGGGGSGGGGSADKTHTCPPCPAPELLGGPSVFLFPPKPKDTLMISRTPEVTCVVVDVSHEDPEVKFNWYVDGVEVHNAKTKPREEQYNNASRVVSVLTVLHQDWLNGKEYKCKVSNKALPAPIEKTISKAKGQPREPQVYTLPPSRDELTKNQVSLTCLVKGFYPSDIAVEWESNGQPENNYKTTPPVLDSDGSFFLYSKLTVDKSRWQQGNVFSCSVMHEALHNHYTQKSLSLSPGGGGSGSAHPIPDSSPLLQFGGQVRQRYLYTDDACQTEAHLEIREDGTVGGAADQSPESLLQLKALKPGVIQILGVKTSRFLCQRPDGALYGSLHFDPEACSFRELLLEDGYNVYQSEAHGLPLHLCGNKSPHRDPAPRGPARFLPLPGLPPAPPEPPGILAPQPPDVGSSDPLSMVGSQGRSPSYAS

SEQ ID NO: 3257 - protein, 472 aa, Artificial Sequence
  Fusion Protein
HGEGTFTSDKSQQLEKRLARLFYEWLIAGGHSKIKPPPKGGGGGGGSGGGGSGGGGSADKTHTCPPCPAPELLGGPSVFLFPPKPKDTLMISRTPEVTCVVVDVSHEDPEVKFNWYVDGVEVHNAKTKPREEQYNNASRVVSVLTVLHQDWLNGKEYKCKVSNKALPAPIEKTISKAKGQPREPQVYTLPPSRDELTKNQVSLTCLVKGFYPSDIAVEWESNGQPENNYKTTPPVLDSDGSFFLYSKLTVDKSRWQQGNVFSCSVMHEALHNHYTQKSLSLSPGGGGSGSAHPIPDSSPLLQFGGQVRQRYLYTDDACQTEAHLEIREDGTVGGAADQSPESLLQLKALKPGVIQILGVKTSRFLCQRPDGALYGSLHFDPEACSFRELLLEDGYNVYQSEAHGLPLHLCGNKSPHRDPAPRGPARFLPLPGLPPAPPEPPGILAPQPPDVGSSDPLSMVYPSQGRSPSYAS

SEQ ID NO: 3258 - protein, 473 aa, Artificial Sequence
  Fusion Protein
HGEGTFTSDKSQQLEKRLARLFYEWLIAGGHSKIKPPPKGGGGGGGSGGGGSGGGGSAESKYGPPCPPCPAPEFEGGPSVFLFPPKPKDTLMISRTPEVTCVVVDVSQEDPEVQFNWYVDGVEVHNAKTKPREEQFNSTYRVVSVLTVLHQDWLNGKEYKCKVSNKGLPSSIEKTISKAKGQPREPQVYTLPPSQEEMTKNQVSLTCLVKGFYPSDIAVEWESNGQPENNYKTTPPVLDSDGSFFLYSRLTVDKSRWQEGNVFSCSVMHEALHNHYTQKSLSLSLGGGGSGSAHPIPDSSPLLQFGGQVRQRYLYTDDACQTEAHLEIREDGTVGGAADQSPESLLQLKALKPGVIQILGVKTSRFLCQRPDGALYGSLHFDPEACSFRELLLEDGYNVYQSEAHGLPLHLPGCKSPHRDPAPRGPARFLPLPGLPPAPPEPPGILAPQPPDVGSSDPLSMVGSQGRSPSYAS

SEQ ID NO: 3259 - protein, 474 aa, Artificial Sequence
  Fusion Protein
HGEGTFTSDKSQQLEKRLARLFYEWLIAGGHSKIKPPPKGGGGGGGSGGGGSGGGGSAESKYGPPCPPCPAPEFEGGPSVFLFPPKPKDTLMISRTPEVTCVVVDVSQEDPEVQFNWYVDGVEVHNAKTKPREEQFNSTYRVVSVLTVLHQDWLNGKEYKCKVSNKGLPSSIEKTISKAKGQPREPQVYTLPPSQEEMTKNQVSLTCLVKGFYPSDIAVEWESNGQPENNYKTTPPVLDSDGSFFLYSRLTVDKSRWQEGNVFSCSVMHEALHNHYTQKSLSLSLGGGGSGSAHPIPDSSPLLQFGGQVRQRYLYTDDACQTEAHLEIREDGTVGGAADQSPESLLQLKALKPGVIQILGVKTSRFLCQRPDGALYGSLHFDPEACSFRELLLEDGYNVYQSEAHGLPLHLPGCKSPHRDPAPRGPARFLPLPGLPPAPPEPPGILAPQPPDVGSSDPLSMVYPSQGRSPSYAS

SEQ ID NO: 3260 - protein, 473 aa, Artificial Sequence
  Fusion Protein
HGEGTFTSDKSQQLEKRLARLFYEWLIAGGHSKIKPPPKGGGGGGGSGGGGSGGGGSAESKYGPPCPPCPAPEFEGGPSVFLFPPKPKDTLMISRTPEVTCVVVDVSQEDPEVQFNWYVDGVEVHNAKTKPREEQFNSTYRVVSVLTVLHQDWLNGKEYKCKVSNKGLPSSIEKTISKAKGQPREPQVYTLPPSQEEMTKNQVSLTCLVKGFYPSDIAVEWESNGQPENNYKTTPPVLDSDGSFFLYSRLTVDKSRWQEGNVFSCSVMHEALHNHYTQKSLSLSLGGGGSGSAHPIPDSSPLLQFGGQVRQRYLYTDDACQTEAHLEIREDGTVGGAADQSPESLLQLKALKPGVIQILGVKTSRFLCQRPDGALYGSLHFDPEACSFRELLLEDGYNVYQSEAHGLPLHLCGNKSPHRDPAPRGPARFLPLPGLPPAPPEPPGILAPQPPDVGSSDPLSMVGSQGRSPSYAS

SEQ ID NO: 3261 - protein, 474 aa, Artificial Sequence
  Fusion Protein
HGEGTFTSDKSQQLEKRLARLFYEWLIAGGHSKIKPPPKGGGGGGGSGGGGSGGGGSAESKYGPPCPPCPAPEFEGGPSVFLFPPKPKDTLMISRTPEVTCVVVDVSQEDPEVQFNWYVDGVEVHNAKTKPREEQFNSTYRVVSVLTVLHQDWLNGKEYKCKVSNKGLPSSIEKTISKAKGQPREPQVYTLPPSQEEMTKNQVSLTCLVKGFYPSDIAVEWESNGQPENNYKTTPPVLDSDGSFFLYSRLTVDKSRWQEGNVFSCSVMHEALHNHYTQKSLSLSLGGGGSGSAHPIPDSSPLLQFGGQVRQRYLYTDDACQTEAHLEIREDGTVGGAADQSPESLLQLKALKPGVIQILGVKTSRFLCQRPDGALYGSLHFDPEACSFRELLLEDGYNVYQSEAHGLPLHLCGNKSPHRDPAPRGPARFLPLPGLPPAPPEPPGILAPQPPDVGSSDPLSMVYPSQGRSPSYAS

SEQ ID NO: 3262 - protein, 471 aa, Artificial Sequence
  Fusion Protein
HGEGTFTSDKSQQLEKRRVRLFYEWLKAGGHSKGKPPPKGGGGGGGSGGGGSGGGGSADKTHTCPPCPAPEAAGGPSVFLFPPKPKDTLMISRTPEVTCVVVDVSHEDPEVKFNWYVDGVEVHNAKTKPREEQYNSTYRVVSVLTVLHQDWLNGKEYKCKVSNKALPAPIEKTISKAKGQPREPQVYTLPPSRDELTKNQVSLTCLVKGFYPSDIAVEWESNGQPENNYKTTPPVLDSDGSFFLYSKLTVDKSRWQQGNVFSCSVMHEALHNHYTQKSLSLSPGGGGSGSAHPIPDSSPLLQFGGQVRQRYLYTDDACQTEAHLEIREDGTVGGAADQSPESLLQLKALKPGVIQILGVKTSRFLCQRPDGALYGSLHFDPEACSFRELLLEDGYNVYQSEAHGLPLHLPGCKSPHRDPAPRGPARFLPLPGLPPAPPEPPGILAPQPPDVGSSDPLSMVGSQGRSPSYAS

SEQ ID NO: 3263 - protein, 472 aa, Artificial Sequence
  Fusion Protein
HGEGTFTSDKSQQLEKRRVRLFYEWLKAGGHSKGKPPPKGGGGGGGSGGGGSGGGGSADKTHTCPPCPAPEAAGGPSVFLFPPKPKDTLMISRTPEVTCVVVDVSHEDPEVKFNWYVDGVEVHNAKTKPREEQYNSTYRVVSVLTVLHQDWLNGKEYKCKVSNKALPAPIEKTISKAKGQPREPQVYTLPPSRDELTKNQVSLTCLVKGFYPSDIAVEWESNGQPENNYKTTPPVLDSDGSFFLYSKLTVDKSRWQQGNVFSCSVMHEALHNHYTQKSLSLSPGGGGSGSAHPIPDSSPLLQFGGQVRQRYLYTDDACQTEAHLEIREDGTVGGAADQSPESLLQLKALKPGVIQILGVKTSRFLCQRPDGALYGSLHFDPEACSFRELLLEDGYNVYQSEAHGLPLHLPGCKSPHRDPAPRGPARFLPLPGLPPAPPEPPGILAPQPPDVGSSDPLSMVYPSQGRSPSYAS

SEQ ID NO: 3264 - protein, 471 aa, Artificial Sequence
  Fusion Protein
HGEGTFTSDKSQQLEKRRVRLFYEWLKAGGHSKGKPPPKGGGGGGGSGGGGSGGGGSADKTHTCPPCPAPEAAGGPSVFLFPPKPKDTLMISRTPEVTCVVVDVSHEDPEVKFNWYVDGVEVHNAKTKPREEQYNSTYRVVSVLTVLHQDWLNGKEYKCKVSNKALPAPIEKTISKAKGQPREPQVYTLPPSRDELTKNQVSLTCLVKGFYPSDIAVEWESNGQPENNYKTTPPVLDSDGSFFLYSKLTVDKSRWQQGNVFSCSVMHEALHNHYTQKSLSLSPGGGGSGSAHPIPDSSPLLQFGGQVRQRYLYTDDACQTEAHLEIREDGTVGGAADQSPESLLQLKALKPGVIQILGVKTSRFLCQRPDGALYGSLHFDPEACSFRELLLEDGYNVYQSEAHGLPLHLCGNKSPHRDPAPRGPARFLPLPGLPPAPPEPPGILAPQPPDVGSSDPLSMVGSQGRSPSYAS

SEQ ID NO: 3265 - protein, 472 aa, Artificial Sequence
  Fusion Protein
HGEGTFTSDKSQQLEKRRVRLFYEWLKAGGHSKGKPPPKGGGGGGGSGGGGSGGGGSADKTHTCPPCPAPEAAGGPSVFLFPPKPKDTLMISRTPEVTCVVVDVSHEDPEVKFNWYVDGVEVHNAKTKPREEQYNSTYRVVSVLTVLHQDWLNGKEYKCKVSNKALPAPIEKTISKAKGQPREPQVYTLPPSRDELTKNQVSLTCLVKGFYPSDIAVEWESNGQPENNYKTTPPVLDSDGSFFLYSKLTVDKSRWQQGNVFSCSVMHEALHNHYTQKSLSLSPGGGGSGSAHPIPDSSPLLQFGGQVRQRYLYTDDACQTEAHLEIREDGTVGGAADQSPESLLQLKALKPGVIQILGVKTSRFLCQRPDGALYGSLHFDPEACSFRELLLEDGYNVYQSEAHGLPLHLCGNKSPHRDPAPRGPARFLPLPGLPPAPPEPPGILAPQPPDVGSSDPLSMVYPSQGRSPSYAS

SEQ ID NO: 3266 - protein, 471 aa, Artificial Sequence
  Fusion Protein
HGEGTFTSDKSQQLEKRRVRLFYEWLKAGGHSKGKPPPKGGGGGGGSGGGGSGGGGSADKTHTCPPCPAPELLGGPSVFLFPPKPKDTLMISRTPEVTCVVVDVSHEDPEVKFNWYVDGVEVHNAKTKPREEQYNNASRVVSVLTVLHQDWLNGKEYKCKVSNKALPAPIEKTISKAKGQPREPQVYTLPPSRDELTKNQVSLTCLVKGFYPSDIAVEWESNGQPENNYKTTPPVLDSDGSFFLYSKLTVDKSRWQQGNVFSCSVMHEALHNHYTQKSLSLSPGGGGSGSAHPIPDSSPLLQFGGQVRQRYLYTDDACQTEAHLEIREDGTVGGAADQSPESLLQLKALKPGVIQILGVKTSRFLCQRPDGALYGSLHFDPEACSFRELLLEDGYNVYQSEAHGLPLHLPGCKSPHRDPAPRGPARFLPLPGLPPAPPEPPGILAPQPPDVGSSDPLSMVGSQGRSPSYAS

SEQ ID NO: 3267 - protein, 472 aa, Artificial Sequence
  Fusion Protein
HGEGTFTSDKSQQLEKRRVRLFYEWLKAGGHSKGKPPPKGGGGGGGSGGGGSGGGGSADKTHTCPPCPAPELLGGPSVFLFPPKPKDTLMISRTPEVTCVVVDVSHEDPEVKFNWYVDGVEVHNAKTKPREEQYNNASRVVSVLTVLHQDWLNGKEYKCKVSNKALPAPIEKTISKAKGQPREPQVYTLPPSRDELTKNQVSLTCLVKGFYPSDIAVEWESNGQPENNYKTTPPVLDSDGSFFLYSKLTVDKSRWQQGNVFSCSVMHEALHNHYTQKSLSLSPGGGGSGSAHPIPDSSPLLQFGGQVRQRYLYTDDACQTEAHLEIREDGTVGGAADQSPESLLQLKALKPGVIQILGVKTSRFLCQRPDGALYGSLHFDPEACSFRELLLEDGYNVYQSEAHGLPLHLPGCKSPHRDPAPRGPARFLPLPGLPPAPPEPPGILAPQPPDVGSSDPLSMVYPSQGRSPSYAS

SEQ ID NO: 3268 - protein, 471 aa, Artificial Sequence
  Fusion Protein
HGEGTFTSDKSQQLEKRRVRLFYEWLKAGGHSKGKPPPKGGGGGGGSGGGGSGGGGSADKTHTCPPCPAPELLGGPSVFLFPPKPKDTLMISRTPEVTCVVVDVSHEDPEVKFNWYVDGVEVHNAKTKPREEQYNNASRVVSVLTVLHQDWLNGKEYKCKVSNKALPAPIEKTISKAKGQPREPQVYTLPPSRDELTKNQVSLTCLVKGFYPSDIAVEWESNGQPENNYKTTPPVLDSDGSFFLYSKLTVDKSRWQQGNVFSCSVMHEALHNHYTQKSLSLSPGGGGSGSAHPIPDSSPLLQFGGQVRQRYLYTDDACQTEAHLEIREDGTVGGAADQSPESLLQLKALKPGVIQILGVKTSRFLCQRPDGALYGSLHFDPEACSFRELLLEDGYNVYQSEAHGLPLHLCGNKSPHRDPAPRGPARFLPLPGLPPAPPEPPGILAPQPPDVGSSDPLSMVGSQGRSPSYAS

SEQ ID NO: 3269 - protein, 472 aa, Artificial Sequence
  Fusion Protein
HGEGTFTSDKSQQLEKRRVRLFYEWLKAGGHSKGKPPPKGGGGGGGSGGGGSGGGGSADKTHTCPPCPAPELLGGPSVFLFPPKPKDTLMISRTPEVTCVVVDVSHEDPEVKFNWYVDGVEVHNAKTKPREEQYNNASRVVSVLTVLHQDWLNGKEYKCKVSNKALPAPIEKTISKAKGQPREPQVYTLPPSRDELTKNQVSLTCLVKGFYPSDIAVEWESNGQPENNYKTTPPVLDSDGSFFLYSKLTVDKSRWQQGNVFSCSVMHEALHNHYTQKSLSLSPGGGGSGSAHPIPDSSPLLQFGGQVRQRYLYTDDACQTEAHLEIREDGTVGGAADQSPESLLQLKALKPGVIQILGVKTSRFLCQRPDGALYGSLHFDPEACSFRELLLEDGYNVYQSEAHGLPLHLCGNKSPHRDPAPRGPARFLPLPGLPPAPPEPPGILAPQPPDVGSSDPLSMVYPSQGRSPSYAS

SEQ ID NO: 3270 - protein, 473 aa, Artificial Sequence
  Fusion Protein
HGEGTFTSDKSQQLEKRRVRLFYEWLKAGGHSKGKPPPKGGGGGGGSGGGGSGGGGSAESKYGPPCPPCPAPEFEGGPSVFLFPPKPKDTLMISRTPEVTCVVVDVSQEDPEVQFNWYVDGVEVHNAKTKPREEQFNSTYRVVSVLTVLHQDWLNGKEYKCKVSNKGLPSSIEKTISKAKGQPREPQVYTLPPSQEEMTKNQVSLTCLVKGFYPSDIAVEWESNGQPENNYKTTPPVLDSDGSFFLYSRLTVDKSRWQEGNVFSCSVMHEALHNHYTQKSLSLSLGGGGSGSAHPIPDSSPLLQFGGQVRQRYLYTDDACQTEAHLEIREDGTVGGAADQSPESLLQLKALKPGVIQILGVKTSRFLCQRPDGALYGSLHFDPEACSFRELLLEDGYNVYQSEAHGLPLHLPGCKSPHRDPAPRGPARFLPLPGLPPAPPEPPGILAPQPPDVGSSDPLSMVGSQGRSPSYAS

SEQ ID NO: 3271 - protein, 474 aa, Artificial Sequence
  Fusion Protein
HGEGTFTSDKSQQLEKRRVRLFYEWLKAGGHSKGKPPPKGGGGGGGSGGGGSGGGGSAESKYGPPCPPCPAPEFEGGPSVFLFPPKPKDTLMISRTPEVTCVVVDVSQEDPEVQFNWYVDGVEVHNAKTKPREEQFNSTYRVVSVLTVLHQDWLNGKEYKCKVSNKGLPSSIEKTISKAKGQPREPQVYTLPPSQEEMTKNQVSLTCLVKGFYPSDIAVEWESNGQPENNYKTTPPVLDSDGSFFLYSRLTVDKSRWQEGNVFSCSVMHEALHNHYTQKSLSLSLGGGGSGSAHPIPDSSPLLQFGGQVRQRYLYTDDACQTEAHLEIREDGTVGGAADQSPESLLQLKALKPGVIQILGVKTSRFLCQRPDGALYGSLHFDPEACSFRELLLEDGYNVYQSEAHGLPLHLPGCKSPHRDPAPRGPARFLPLPGLPPAPPEPPGILAPQPPDVGSSDPLSMVYPSQGRSPSYAS

SEQ ID NO: 3272 - protein, 473 aa, Artificial Sequence
  Fusion Protein
HGEGTFTSDKSQQLEKRRVRLFYEWLKAGGHSKGKPPPKGGGGGGGSGGGGSGGGGSAESKYGPPCPPCPAPEFEGGPSVFLFPPKPKDTLMISRTPEVTCVVVDVSQEDPEVQFNWYVDGVEVHNAKTKPREEQFNSTYRVVSVLTVLHQDWLNGKEYKCKVSNKGLPSSIEKTISKAKGQPREPQVYTLPPSQEEMTKNQVSLTCLVKGFYPSDIAVEWESNGQPENNYKTTPPVLDSDGSFFLYSRLTVDKSRWQEGNVFSCSVMHEALHNHYTQKSLSLSLGGGGSGSAHPIPDSSPLLQFGGQVRQRYLYTDDACQTEAHLEIREDGTVGGAADQSPESLLQLKALKPGVIQILGVKTSRFLCQRPDGALYGSLHFDPEACSFRELLLEDGYNVYQSEAHGLPLHLCGNKSPHRDPAPRGPARFLPLPGLPPAPPEPPGILAPQPPDVGSSDPLSMVGSQGRSPSYAS

SEQ ID NO: 3273 - protein, 474 aa, Artificial Sequence
  Fusion Protein
HGEGTFTSDKSQQLEKRRVRLFYEWLKAGGHSKGKPPPKGGGGGGGSGGGGSGGGGSAESKYGPPCPPCPAPEFEGGPSVFLFPPKPKDTLMISRTPEVTCVVVDVSQEDPEVQFNWYVDGVEVHNAKTKPREEQFNSTYRVVSVLTVLHQDWLNGKEYKCKVSNKGLPSSIEKTISKAKGQPREPQVYTLPPSQEEMTKNQVSLTCLVKGFYPSDIAVEWESNGQPENNYKTTPPVLDSDGSFFLYSRLTVDKSRWQEGNVFSCSVMHEALHNHYTQKSLSLSLGGGGSGSAHPIPDSSPLLQFGGQVRQRYLYTDDACQTEAHLEIREDGTVGGAADQSPESLLQLKALKPGVIQILGVKTSRFLCQRPDGALYGSLHFDPEACSFRELLLEDGYNVYQSEAHGLPLHLCGNKSPHRDPAPRGPARFLPLPGLPPAPPEPPGILAPQPPDVGSSDPLSMVYPSQGRSPSYAS

SEQ ID NO: 3274 - protein, 471 aa, Artificial Sequence
  Fusion Protein
HGEGTFTSDKSQQLEKRLVRLFYEWLINGGHSSIRPPPKGGGGGGGSGGGGSGGGGSADKTHTCPPCPAPEAAGGPSVFLFPPKPKDTLMISRTPEVTCVVVDVSHEDPEVKFNWYVDGVEVHNAKTKPREEQYNSTYRVVSVLTVLHQDWLNGKEYKCKVSNKALPAPIEKTISKAKGQPREPQVYTLPPSRDELTKNQVSLTCLVKGFYPSDIAVEWESNGQPENNYKTTPPVLDSDGSFFLYSKLTVDKSRWQQGNVFSCSVMHEALHNHYTQKSLSLSPGGGGSGSAHPIPDSSPLLQFGGQVRQRYLYTDDACQTEAHLEIREDGTVGGAADQSPESLLQLKALKPGVIQILGVKTSRFLCQRPDGALYGSLHFDPEACSFRELLLEDGYNVYQSEAHGLPLHLPGCKSPHRDPAPRGPARFLPLPGLPPAPPEPPGILAPQPPDVGSSDPLSMVGSQGRSPSYAS

SEQ ID NO: 3275 - protein, 472 aa, Artificial Sequence
  Fusion Protein
HGEGTFTSDKSQQLEKRLVRLFYEWLINGGHSSIRPPPKGGGGGGGSGGGGSGGGGSADKTHTCPPCPAPEAAGGPSVFLFPPKPKDTLMISRTPEVTCVVVDVSHEDPEVKFNWYVDGVEVHNAKTKPREEQYNSTYRVVSVLTVLHQDWLNGKEYKCKVSNKALPAPIEKTISKAKGQPREPQVYTLPPSRDELTKNQVSLTCLVKGFYPSDIAVEWESNGQPENNYKTTPPVLDSDGSFFLYSKLTVDKSRWQQGNVFSCSVMHEALHNHYTQKSLSLSPGGGGSGSAHPIPDSSPLLQFGGQVRQRYLYTDDACQTEAHLEIREDGTVGGAADQSPESLLQLKALKPGVIQILGVKTSRFLCQRPDGALYGSLHFDPEACSFRELLLEDGYNVYQSEAHGLPLHLPGCKSPHRDPAPRGPARFLPLPGLPPAPPEPPGILAPQPPDVGSSDPLSMVYPSQGRSPSYAS

SEQ ID NO: 3276 - protein, 471 aa, Artificial Sequence
  Fusion Protein
HGEGTFTSDKSQQLEKRLVRLFYEWLINGGHSSIRPPPKGGGGGGGSGGGGSGGGGSADKTHTCPPCPAPEAAGGPSVFLFPPKPKDTLMISRTPEVTCVVVDVSHEDPEVKFNWYVDGVEVHNAKTKPREEQYNSTYRVVSVLTVLHQDWLNGKEYKCKVSNKALPAPIEKTISKAKGQPREPQVYTLPPSRDELTKNQVSLTCLVKGFYPSDIAVEWESNGQPENNYKTTPPVLDSDGSFFLYSKLTVDKSRWQQGNVFSCSVMHEALHNHYTQKSLSLSPGGGGSGSAHPIPDSSPLLQFGGQVRQRYLYTDDACQTEAHLEIREDGTVGGAADQSPESLLQLKALKPGVIQILGVKTSRFLCQRPDGALYGSLHFDPEACSFRELLLEDGYNVYQSEAHGLPLHLCGNKSPHRDPAPRGPARFLPLPGLPPAPPEPPGILAPQPPDVGSSDPLSMVGSQGRSPSYAS

SEQ ID NO: 3277 - protein, 472 aa, Artificial Sequence
  Fusion Protein
HGEGTFTSDKSQQLEKRLVRLFYEWLINGGHSSIRPPPKGGGGGGGSGGGGSGGGGSADKTHTCPPCPAPEAAGGPSVFLFPPKPKDTLMISRTPEVTCVVVDVSHEDPEVKFNWYVDGVEVHNAKTKPREEQYNSTYRVVSVLTVLHQDWLNGKEYKCKVSNKALPAPIEKTISKAKGQPREPQVYTLPPSRDELTKNQVSLTCLVKGFYPSDIAVEWESNGQPENNYKTTPPVLDSDGSFFLYSKLTVDKSRWQQGNVFSCSVMHEALHNHYTQKSLSLSPGGGGSGSAHPIPDSSPLLQFGGQVRQRYLYTDDACQTEAHLEIREDGTVGGAADQSPESLLQLKALKPGVIQILGVKTSRFLCQRPDGALYGSLHFDPEACSFRELLLEDGYNVYQSEAHGLPLHLCGNKSPHRDPAPRGPARFLPLPGLPPAPPEPPGILAPQPPDVGSSDPLSMVYPSQGRSPSYAS

SEQ ID NO: 3278 - protein, 471 aa, Artificial Sequence
  Fusion Protein
HGEGTFTSDKSQQLEKRLVRLFYEWLINGGHSSIRPPPKGGGGGGGSGGGGSGGGGSADKTHTCPPCPAPELLGGPSVFLFPPKPKDTLMISRTPEVTCVVVDVSHEDPEVKFNWYVDGVEVHNAKTKPREEQYNNASRVVSVLTVLHQDWLNGKEYKCKVSNKALPAPIEKTISKAKGQPREPQVYTLPPSRDELTKNQVSLTCLVKGFYPSDIAVEWESNGQPENNYKTTPPVLDSDGSFFLYSKLTVDKSRWQQGNVFSCSVMHEALHNHYTQKSLSLSPGGGGSGSAHPIPDSSPLLQFGGQVRQRYLYTDDACQTEAHLEIREDGTVGGAADQSPESLLQLKALKPGVIQILGVKTSRFLCQRPDGALYGSLHFDPEACSFRELLLEDGYNVYQSEAHGLPLHLPGCKSPHRDPAPRGPARFLPLPGLPPAPPEPPGILAPQPPDVGSSDPLSMVGSQGRSPSYAS

SEQ ID NO: 3279 - protein, 472 aa, Artificial Sequence
  Fusion Protein
HGEGTFTSDKSQQLEKRLVRLFYEWLINGGHSSIRPPPKGGGGGGGSGGGGSGGGGSADKTHTCPPCPAPELLGGPSVFLFPPKPKDTLMISRTPEVTCVVVDVSHEDPEVKFNWYVDGVEVHNAKTKPREEQYNNASRVVSVLTVLHQDWLNGKEYKCKVSNKALPAPIEKTISKAKGQPREPQVYTLPPSRDELTKNQVSLTCLVKGFYPSDIAVEWESNGQPENNYKTTPPVLDSDGSFFLYSKLTVDKSRWQQGNVFSCSVMHEALHNHYTQKSLSLSPGGGGSGSAHPIPDSSPLLQFGGQVRQRYLYTDDACQTEAHLEIREDGTVGGAADQSPESLLQLKALKPGVIQILGVKTSRFLCQRPDGALYGSLHFDPEACSFRELLLEDGYNVYQSEAHGLPLHLPGCKSPHRDPAPRGPARFLPLPGLPPAPPEPPGILAPQPPDVGSSDPLSMVYPSQGRSPSYAS

SEQ ID NO: 3280 - protein, 471 aa, Artificial Sequence
  Fusion Protein
HGEGTFTSDKSQQLEKRLVRLFYEWLINGGHSSIRPPPKGGGGGGGSGGGGSGGGGSADKTHTCPPCPAPELLGGPSVFLFPPKPKDTLMISRTPEVTCVVVDVSHEDPEVKFNWYVDGVEVHNAKTKPREEQYNNASRVVSVLTVLHQDWLNGKEYKCKVSNKALPAPIEKTISKAKGQPREPQVYTLPPSRDELTKNQVSLTCLVKGFYPSDIAVEWESNGQPENNYKTTPPVLDSDGSFFLYSKLTVDKSRWQQGNVFSCSVMHEALHNHYTQKSLSLSPGGGGSGSAHPIPDSSPLLQFGGQVRQRYLYTDDACQTEAHLEIREDGTVGGAADQSPESLLQLKALKPGVIQILGVKTSRFLCQRPDGALYGSLHFDPEACSFRELLLEDGYNVYQSEAHGLPLHLCGNKSPHRDPAPRGPARFLPLPGLPPAPPEPPGILAPQPPDVGSSDPLSMVGSQGRSPSYAS

SEQ ID NO: 3281 - protein, 472 aa, Artificial Sequence
  Fusion Protein
HGEGTFTSDKSQQLEKRLVRLFYEWLINGGHSSIRPPPKGGGGGGGSGGGGSGGGGSADKTHTCPPCPAPELLGGPSVFLFPPKPKDTLMISRTPEVTCVVVDVSHEDPEVKFNWYVDGVEVHNAKTKPREEQYNNASRVVSVLTVLHQDWLNGKEYKCKVSNKALPAPIEKTISKAKGQPREPQVYTLPPSRDELTKNQVSLTCLVKGFYPSDIAVEWESNGQPENNYKTTPPVLDSDGSFFLYSKLTVDKSRWQQGNVFSCSVMHEALHNHYTQKSLSLSPGGGGSGSAHPIPDSSPLLQFGGQVRQRYLYTDDACQTEAHLEIREDGTVGGAADQSPESLLQLKALKPGVIQILGVKTSRFLCQRPDGALYGSLHFDPEACSFRELLLEDGYNVYQSEAHGLPLHLCGNKSPHRDPAPRGPARFLPLPGLPPAPPEPPGILAPQPPDVGSSDPLSMVYPSQGRSPSYAS

SEQ ID NO: 3282 - protein, 473 aa, Artificial Sequence
  Fusion Protein
HGEGTFTSDKSQQLEKRLVRLFYEWLINGGHSSIRPPPKGGGGGGGSGGGGSGGGGSAESKYGPPCPPCPAPEFEGGPSVFLFPPKPKDTLMISRTPEVTCVVVDVSQEDPEVQFNWYVDGVEVHNAKTKPREEQFNSTYRVVSVLTVLHQDWLNGKEYKCKVSNKGLPSSIEKTISKAKGQPREPQVYTLPPSQEEMTKNQVSLTCLVKGFYPSDIAVEWESNGQPENNYKTTPPVLDSDGSFFLYSRLTVDKSRWQEGNVFSCSVMHEALHNHYTQKSLSLSLGGGGSGSAHPIPDSSPLLQFGGQVRQRYLYTDDACQTEAHLEIREDGTVGGAADQSPESLLQLKALKPGVIQILGVKTSRFLCQRPDGALYGSLHFDPEACSFRELLLEDGYNVYQSEAHGLPLHLPGCKSPHRDPAPRGPARFLPLPGLPPAPPEPPGILAPQPPDVGSSDPLSMVGSQGRSPSYAS

SEQ ID NO: 3283 - protein, 474 aa, Artificial Sequence
  Fusion Protein
HGEGTFTSDKSQQLEKRLVRLFYEWLINGGHSSIRPPPKGGGGGGGSGGGGSGGGGSAESKYGPPCPPCPAPEFEGGPSVFLFPPKPKDTLMISRTPEVTCVVVDVSQEDPEVQFNWYVDGVEVHNAKTKPREEQFNSTYRVVSVLTVLHQDWLNGKEYKCKVSNKGLPSSIEKTISKAKGQPREPQVYTLPPSQEEMTKNQVSLTCLVKGFYPSDIAVEWESNGQPENNYKTTPPVLDSDGSFFLYSRLTVDKSRWQEGNVFSCSVMHEALHNHYTQKSLSLSLGGGGSGSAHPIPDSSPLLQFGGQVRQRYLYTDDACQTEAHLEIREDGTVGGAADQSPESLLQLKALKPGVIQILGVKTSRFLCQRPDGALYGSLHFDPEACSFRELLLEDGYNVYQSEAHGLPLHLPGCKSPHRDPAPRGPARFLPLPGLPPAPPEPPGILAPQPPDVGSSDPLSMVYPSQGRSPSYAS

SEQ ID NO: 3284 - protein, 473 aa, Artificial Sequence
  Fusion Protein
HGEGTFTSDKSQQLEKRLVRLFYEWLINGGHSSIRPPPKGGGGGGGSGGGGSGGGGSAESKYGPPCPPCPAPEFEGGPSVFLFPPKPKDTLMISRTPEVTCVVVDVSQEDPEVQFNWYVDGVEVHNAKTKPREEQFNSTYRVVSVLTVLHQDWLNGKEYKCKVSNKGLPSSIEKTISKAKGQPREPQVYTLPPSQEEMTKNQVSLTCLVKGFYPSDIAVEWESNGQPENNYKTTPPVLDSDGSFFLYSRLTVDKSRWQEGNVFSCSVMHEALHNHYTQKSLSLSLGGGGSGSAHPIPDSSPLLQFGGQVRQRYLYTDDACQTEAHLEIREDGTVGGAADQSPESLLQLKALKPGVIQILGVKTSRFLCQRPDGALYGSLHFDPEACSFRELLLEDGYNVYQSEAHGLPLHLCGNKSPHRDPAPRGPARFLPLPGLPPAPPEPPGILAPQPPDVGSSDPLSMVGSQGRSPSYAS

SEQ ID NO: 3285 - protein, 474 aa, Artificial Sequence
  Fusion Protein
HGEGTFTSDKSQQLEKRLVRLFYEWLINGGHSSIRPPPKGGGGGGGSGGGGSGGGGSAESKYGPPCPPCPAPEFEGGPSVFLFPPKPKDTLMISRTPEVTCVVVDVSQEDPEVQFNWYVDGVEVHNAKTKPREEQFNSTYRVVSVLTVLHQDWLNGKEYKCKVSNKGLPSSIEKTISKAKGQPREPQVYTLPPSQEEMTKNQVSLTCLVKGFYPSDIAVEWESNGQPENNYKTTPPVLDSDGSFFLYSRLTVDKSRWQEGNVFSCSVMHEALHNHYTQKSLSLSLGGGGSGSAHPIPDSSPLLQFGGQVRQRYLYTDDACQTEAHLEIREDGTVGGAADQSPESLLQLKALKPGVIQILGVKTSRFLCQRPDGALYGSLHFDPEACSFRELLLEDGYNVYQSEAHGLPLHLCGNKSPHRDPAPRGPARFLPLPGLPPAPPEPPGILAPQPPDVGSSDPLSMVYPSQGRSPSYAS

SEQ ID NO: 3286 - protein, 471 aa, Artificial Sequence
  Fusion Protein
HGEGTFTSDKSQQLEKRLVRLFYEWLINGGHSKIKPPPKGGGGGGGSGGGGSGGGGSADKTHTCPPCPAPEAAGGPSVFLFPPKPKDTLMISRTPEVTCVVVDVSHEDPEVKFNWYVDGVEVHNAKTKPREEQYNSTYRVVSVLTVLHQDWLNGKEYKCKVSNKALPAPIEKTISKAKGQPREPQVYTLPPSRDELTKNQVSLTCLVKGFYPSDIAVEWESNGQPENNYKTTPPVLDSDGSFFLYSKLTVDKSRWQQGNVFSCSVMHEALHNHYTQKSLSLSPGGGGSGSAHPIPDSSPLLQFGGQVRQRYLYTDDACQTEAHLEIREDGTVGGAADQSPESLLQLKALKPGVIQILGVKTSRFLCQRPDGALYGSLHFDPEACSFRELLLEDGYNVYQSEAHGLPLHLPGCKSPHRDPAPRGPARFLPLPGLPPAPPEPPGILAPQPPDVGSSDPLSMVGSQGRSPSYAS

SEQ ID NO: 3287 - protein, 472 aa, Artificial Sequence
  Fusion Protein
HGEGTFTSDKSQQLEKRLVRLFYEWLINGGHSKIKPPPKGGGGGGGSGGGGSGGGGSADKTHTCPPCPAPEAAGGPSVFLFPPKPKDTLMISRTPEVTCVVVDVSHEDPEVKFNWYVDGVEVHNAKTKPREEQYNSTYRVVSVLTVLHQDWLNGKEYKCKVSNKALPAPIEKTISKAKGQPREPQVYTLPPSRDELTKNQVSLTCLVKGFYPSDIAVEWESNGQPENNYKTTPPVLDSDGSFFLYSKLTVDKSRWQQGNVFSCSVMHEALHNHYTQKSLSLSPGGGGSGSAHPIPDSSPLLQFGGQVRQRYLYTDDACQTEAHLEIREDGTVGGAADQSPESLLQLKALKPGVIQILGVKTSRFLCQRPDGALYGSLHFDPEACSFRELLLEDGYNVYQSEAHGLPLHLPGCKSPHRDPAPRGPARFLPLPGLPPAPPEPPGILAPQPPDVGSSDPLSMVYPSQGRSPSYAS

SEQ ID NO: 3288 - protein, 471 aa, Artificial Sequence
  Fusion Protein
HGEGTFTSDKSQQLEKRLVRLFYEWLINGGHSKIKPPPKGGGGGGGSGGGGSGGGGSADKTHTCPPCPAPEAAGGPSVFLFPPKPKDTLMISRTPEVTCVVVDVSHEDPEVKFNWYVDGVEVHNAKTKPREEQYNSTYRVVSVLTVLHQDWLNGKEYKCKVSNKALPAPIEKTISKAKGQPREPQVYTLPPSRDELTKNQVSLTCLVKGFYPSDIAVEWESNGQPENNYKTTPPVLDSDGSFFLYSKLTVDKSRWQQGNVFSCSVMHEALHNHYTQKSLSLSPGGGGSGSAHPIPDSSPLLQFGGQVRQRYLYTDDACQTEAHLEIREDGTVGGAADQSPESLLQLKALKPGVIQILGVKTSRFLCQRPDGALYGSLHFDPEACSFRELLLEDGYNVYQSEAHGLPLHLCGNKSPHRDPAPRGPARFLPLPGLPPAPPEPPGILAPQPPDVGSSDPLSMVGSQGRSPSYAS

SEQ ID NO: 3289 - protein, 472 aa, Artificial Sequence
  Fusion Protein
HGEGTFTSDKSQQLEKRLVRLFYEWLINGGHSKIKPPPKGGGGGGGSGGGGSGGGGSADKTHTCPPCPAPEAAGGPSVFLFPPKPKDTLMISRTPEVTCVVVDVSHEDPEVKFNWYVDGVEVHNAKTKPREEQYNSTYRVVSVLTVLHQDWLNGKEYKCKVSNKALPAPIEKTISKAKGQPREPQVYTLPPSRDELTKNQVSLTCLVKGFYPSDIAVEWESNGQPENNYKTTPPVLDSDGSFFLYSKLTVDKSRWQQGNVFSCSVMHEALHNHYTQKSLSLSPGGGGSGSAHPIPDSSPLLQFGGQVRQRYLYTDDACQTEAHLEIREDGTVGGAADQSPESLLQLKALKPGVIQILGVKTSRFLCQRPDGALYGSLHFDPEACSFRELLLEDGYNVYQSEAHGLPLHLCGNKSPHRDPAPRGPARFLPLPGLPPAPPEPPGILAPQPPDVGSSDPLSMVYPSQGRSPSYAS

SEQ ID NO: 3290 - protein, 471 aa, Artificial Sequence
  Fusion Protein
HGEGTFTSDKSQQLEKRLVRLFYEWLINGGHSKIKPPPKGGGGGGGSGGGGSGGGGSADKTHTCPPCPAPELLGGPSVFLFPPKPKDTLMISRTPEVTCVVVDVSHEDPEVKFNWYVDGVEVHNAKTKPREEQYNNASRVVSVLTVLHQDWLNGKEYKCKVSNKALPAPIEKTISKAKGQPREPQVYTLPPSRDELTKNQVSLTCLVKGFYPSDIAVEWESNGQPENNYKTTPPVLDSDGSFFLYSKLTVDKSRWQQGNVFSCSVMHEALHNHYTQKSLSLSPGGGGSGSAHPIPDSSPLLQFGGQVRQRYLYTDDACQTEAHLEIREDGTVGGAADQSPESLLQLKALKPGVIQILGVKTSRFLCQRPDGALYGSLHFDPEACSFRELLLEDGYNVYQSEAHGLPLHLPGCKSPHRDPAPRGPARFLPLPGLPPAPPEPPGILAPQPPDVGSSDPLSMVGSQGRSPSYAS

SEQ ID NO: 3291 - protein, 472 aa, Artificial Sequence
  Fusion Protein
HGEGTFTSDKSQQLEKRLVRLFYEWLINGGHSKIKPPPKGGGGGGGSGGGGSGGGGSADKTHTCPPCPAPELLGGPSVFLFPPKPKDTLMISRTPEVTCVVVDVSHEDPEVKFNWYVDGVEVHNAKTKPREEQYNNASRVVSVLTVLHQDWLNGKEYKCKVSNKALPAPIEKTISKAKGQPREPQVYTLPPSRDELTKNQVSLTCLVKGFYPSDIAVEWESNGQPENNYKTTPPVLDSDGSFFLYSKLTVDKSRWQQGNVFSCSVMHEALHNHYTQKSLSLSPGGGGSGSAHPIPDSSPLLQFGGQVRQRYLYTDDACQTEAHLEIREDGTVGGAADQSPESLLQLKALKPGVIQILGVKTSRFLCQRPDGALYGSLHFDPEACSFRELLLEDGYNVYQSEAHGLPLHLPGCKSPHRDPAPRGPARFLPLPGLPPAPPEPPGILAPQPPDVGSSDPLSMVYPSQGRSPSYAS

SEQ ID NO: 3292 - protein, 471 aa, Artificial Sequence
  Fusion Protein
HGEGTFTSDKSQQLEKRLVRLFYEWLINGGHSKIKPPPKGGGGGGGSGGGGSGGGGSADKTHTCPPCPAPELLGGPSVFLFPPKPKDTLMISRTPEVTCVVVDVSHEDPEVKFNWYVDGVEVHNAKTKPREEQYNNASRVVSVLTVLHQDWLNGKEYKCKVSNKALPAPIEKTISKAKGQPREPQVYTLPPSRDELTKNQVSLTCLVKGFYPSDIAVEWESNGQPENNYKTTPPVLDSDGSFFLYSKLTVDKSRWQQGNVFSCSVMHEALHNHYTQKSLSLSPGGGGSGSAHPIPDSSPLLQFGGQVRQRYLYTDDACQTEAHLEIREDGTVGGAADQSPESLLQLKALKPGVIQILGVKTSRFLCQRPDGALYGSLHFDPEACSFRELLLEDGYNVYQSEAHGLPLHLCGNKSPHRDPAPRGPARFLPLPGLPPAPPEPPGILAPQPPDVGSSDPLSMVGSQGRSPSYAS

SEQ ID NO: 3293 - protein, 472 aa, Artificial Sequence
  Fusion Protein
HGEGTFTSDKSQQLEKRLVRLFYEWLINGGHSKIKPPPKGGGGGGGSGGGGSGGGGSADKTHTCPPCPAPELLGGPSVFLFPPKPKDTLMISRTPEVTCVVVDVSHEDPEVKFNWYVDGVEVHNAKTKPREEQYNNASRVVSVLTVLHQDWLNGKEYKCKVSNKALPAPIEKTISKAKGQPREPQVYTLPPSRDELTKNQVSLTCLVKGFYPSDIAVEWESNGQPENNYKTTPPVLDSDGSFFLYSKLTVDKSRWQQGNVFSCSVMHEALHNHYTQKSLSLSPGGGGSGSAHPIPDSSPLLQFGGQVRQRYLYTDDACQTEAHLEIREDGTVGGAADQSPESLLQLKALKPGVIQILGVKTSRFLCQRPDGALYGSLHFDPEACSFRELLLEDGYNVYQSEAHGLPLHLCGNKSPHRDPAPRGPARFLPLPGLPPAPPEPPGILAPQPPDVGSSDPLSMVYPSQGRSPSYAS

SEQ ID NO: 3294 - protein, 473 aa, Artificial Sequence
  Fusion Protein
HGEGTFTSDKSQQLEKRLVRLFYEWLINGGHSKIKPPPKGGGGGGGSGGGGSGGGGSAESKYGPPCPPCPAPEFEGGPSVFLFPPKPKDTLMISRTPEVTCVVVDVSQEDPEVQFNWYVDGVEVHNAKTKPREEQFNSTYRVVSVLTVLHQDWLNGKEYKCKVSNKGLPSSIEKTISKAKGQPREPQVYTLPPSQEEMTKNQVSLTCLVKGFYPSDIAVEWESNGQPENNYKTTPPVLDSDGSFFLYSRLTVDKSRWQEGNVFSCSVMHEALHNHYTQKSLSLSLGGGGSGSAHPIPDSSPLLQFGGQVRQRYLYTDDACQTEAHLEIREDGTVGGAADQSPESLLQLKALKPGVIQILGVKTSRFLCQRPDGALYGSLHFDPEACSFRELLLEDGYNVYQSEAHGLPLHLPGCKSPHRDPAPRGPARFLPLPGLPPAPPEPPGILAPQPPDVGSSDPLSMVGSQGRSPSYAS

SEQ ID NO: 3295 - protein, 474 aa, Artificial Sequence
  Fusion Protein
HGEGTFTSDKSQQLEKRLVRLFYEWLINGGHSKIKPPPKGGGGGGGSGGGGSGGGGSAESKYGPPCPPCPAPEFEGGPSVFLFPPKPKDTLMISRTPEVTCVVVDVSQEDPEVQFNWYVDGVEVHNAKTKPREEQFNSTYRVVSVLTVLHQDWLNGKEYKCKVSNKGLPSSIEKTISKAKGQPREPQVYTLPPSQEEMTKNQVSLTCLVKGFYPSDIAVEWESNGQPENNYKTTPPVLDSDGSFFLYSRLTVDKSRWQEGNVFSCSVMHEALHNHYTQKSLSLSLGGGGSGSAHPIPDSSPLLQFGGQVRQRYLYTDDACQTEAHLEIREDGTVGGAADQSPESLLQLKALKPGVIQILGVKTSRFLCQRPDGALYGSLHFDPEACSFRELLLEDGYNVYQSEAHGLPLHLPGCKSPHRDPAPRGPARFLPLPGLPPAPPEPPGILAPQPPDVGSSDPLSMVYPSQGRSPSYAS

SEQ ID NO: 3296 - protein, 473 aa, Artificial Sequence
  Fusion Protein
HGEGTFTSDKSQQLEKRLVRLFYEWLINGGHSKIKPPPKGGGGGGGSGGGGSGGGGSAESKYGPPCPPCPAPEFEGGPSVFLFPPKPKDTLMISRTPEVTCVVVDVSQEDPEVQFNWYVDGVEVHNAKTKPREEQFNSTYRVVSVLTVLHQDWLNGKEYKCKVSNKGLPSSIEKTISKAKGQPREPQVYTLPPSQEEMTKNQVSLTCLVKGFYPSDIAVEWESNGQPENNYKTTPPVLDSDGSFFLYSRLTVDKSRWQEGNVFSCSVMHEALHNHYTQKSLSLSLGGGGSGSAHPIPDSSPLLQFGGQVRQRYLYTDDACQTEAHLEIREDGTVGGAADQSPESLLQLKALKPGVIQILGVKTSRFLCQRPDGALYGSLHFDPEACSFRELLLEDGYNVYQSEAHGLPLHLCGNKSPHRDPAPRGPARFLPLPGLPPAPPEPPGILAPQPPDVGSSDPLSMVGSQGRSPSYAS

SEQ ID NO: 3297 - protein, 474 aa, Artificial Sequence
  Fusion Protein
HGEGTFTSDKSQQLEKRLVRLFYEWLINGGHSKIKPPPKGGGGGGGSGGGGSGGGGSAESKYGPPCPPCPAPEFEGGPSVFLFPPKPKDTLMISRTPEVTCVVVDVSQEDPEVQFNWYVDGVEVHNAKTKPREEQFNSTYRVVSVLTVLHQDWLNGKEYKCKVSNKGLPSSIEKTISKAKGQPREPQVYTLPPSQEEMTKNQVSLTCLVKGFYPSDIAVEWESNGQPENNYKTTPPVLDSDGSFFLYSRLTVDKSRWQEGNVFSCSVMHEALHNHYTQKSLSLSLGGGGSGSAHPIPDSSPLLQFGGQVRQRYLYTDDACQTEAHLEIREDGTVGGAADQSPESLLQLKALKPGVIQILGVKTSRFLCQRPDGALYGSLHFDPEACSFRELLLEDGYNVYQSEAHGLPLHLCGNKSPHRDPAPRGPARFLPLPGLPPAPPEPPGILAPQPPDVGSSDPLSMVYPSQGRSPSYAS

SEQ ID NO: 3298 - protein, 471 aa, Artificial Sequence
  Fusion Protein
HGEGTFTSDKSQQLEEELVRLFYEWLIAGGHSSIKPPPKGGGGGGGSGGGGSGGGGSADKTHTCPPCPAPEAAGGPSVFLFPPKPKDTLMISRTPEVTCVVVDVSHEDPEVKFNWYVDGVEVHNAKTKPREEQYNSTYRVVSVLTVLHQDWLNGKEYKCKVSNKALPAPIEKTISKAKGQPREPQVYTLPPSRDELTKNQVSLTCLVKGFYPSDIAVEWESNGQPENNYKTTPPVLDSDGSFFLYSKLTVDKSRWQQGNVFSCSVMHEALHNHYTQKSLSLSPGGGGSGSAHPIPDSSPLLQFGGQVRQRYLYTDDACQTEAHLEIREDGTVGGAADQSPESLLQLKALKPGVIQILGVKTSRFLCQRPDGALYGSLHFDPEACSFRELLLEDGYNVYQSEAHGLPLHLPGCKSPHRDPAPRGPARFLPLPGLPPAPPEPPGILAPQPPDVGSSDPLSMVGSQGRSPSYAS

SEQ ID NO: 3299 - protein, 472 aa, Artificial Sequence
  Fusion Protein
HGEGTFTSDKSQQLEEELVRLFYEWLIAGGHSSIKPPPKGGGGGGGSGGGGSGGGGSADKTHTCPPCPAPEAAGGPSVFLFPPKPKDTLMISRTPEVTCVVVDVSHEDPEVKFNWYVDGVEVHNAKTKPREEQYNSTYRVVSVLTVLHQDWLNGKEYKCKVSNKALPAPIEKTISKAKGQPREPQVYTLPPSRDELTKNQVSLTCLVKGFYPSDIAVEWESNGQPENNYKTTPPVLDSDGSFFLYSKLTVDKSRWQQGNVFSCSVMHEALHNHYTQKSLSLSPGGGGSGSAHPIPDSSPLLQFGGQVRQRYLYTDDACQTEAHLEIREDGTVGGAADQSPESLLQLKALKPGVIQILGVKTSRFLCQRPDGALYGSLHFDPEACSFRELLLEDGYNVYQSEAHGLPLHLPGCKSPHRDPAPRGPARFLPLPGLPPAPPEPPGILAPQPPDVGSSDPLSMVYPSQGRSPSYAS

SEQ ID NO: 3300 - protein, 471 aa, Artificial Sequence
  Fusion Protein
HGEGTFTSDKSQQLEEELVRLFYEWLIAGGHSSIKPPPKGGGGGGGSGGGGSGGGGSADKTHTCPPCPAPEAAGGPSVFLFPPKPKDTLMISRTPEVTCVVVDVSHEDPEVKFNWYVDGVEVHNAKTKPREEQYNSTYRVVSVLTVLHQDWLNGKEYKCKVSNKALPAPIEKTISKAKGQPREPQVYTLPPSRDELTKNQVSLTCLVKGFYPSDIAVEWESNGQPENNYKTTPPVLDSDGSFFLYSKLTVDKSRWQQGNVFSCSVMHEALHNHYTQKSLSLSPGGGGSGSAHPIPDSSPLLQFGGQVRQRYLYTDDACQTEAHLEIREDGTVGGAADQSPESLLQLKALKPGVIQILGVKTSRFLCQRPDGALYGSLHFDPEACSFRELLLEDGYNVYQSEAHGLPLHLCGNKSPHRDPAPRGPARFLPLPGLPPAPPEPPGILAPQPPDVGSSDPLSMVGSQGRSPSYAS

SEQ ID NO: 3301 - protein, 472 aa, Artificial Sequence
  Fusion Protein
HGEGTFTSDKSQQLEEELVRLFYEWLIAGGHSSIKPPPKGGGGGGGSGGGGSGGGGSADKTHTCPPCPAPEAAGGPSVFLFPPKPKDTLMISRTPEVTCVVVDVSHEDPEVKFNWYVDGVEVHNAKTKPREEQYNSTYRVVSVLTVLHQDWLNGKEYKCKVSNKALPAPIEKTISKAKGQPREPQVYTLPPSRDELTKNQVSLTCLVKGFYPSDIAVEWESNGQPENNYKTTPPVLDSDGSFFLYSKLTVDKSRWQQGNVFSCSVMHEALHNHYTQKSLSLSPGGGGSGSAHPIPDSSPLLQFGGQVRQRYLYTDDACQTEAHLEIREDGTVGGAADQSPESLLQLKALKPGVIQILGVKTSRFLCQRPDGALYGSLHFDPEACSFRELLLEDGYNVYQSEAHGLPLHLCGNKSPHRDPAPRGPARFLPLPGLPPAPPEPPGILAPQPPDVGSSDPLSMVYPSQGRSPSYAS

SEQ ID NO: 3302 - protein, 471 aa, Artificial Sequence
  Fusion Protein
HGEGTFTSDKSQQLEEELVRLFYEWLIAGGHSSIKPPPKGGGGGGGSGGGGSGGGGSADKTHTCPPCPAPELLGGPSVFLFPPKPKDTLMISRTPEVTCVVVDVSHEDPEVKFNWYVDGVEVHNAKTKPREEQYNNASRVVSVLTVLHQDWLNGKEYKCKVSNKALPAPIEKTISKAKGQPREPQVYTLPPSRDELTKNQVSLTCLVKGFYPSDIAVEWESNGQPENNYKTTPPVLDSDGSFFLYSKLTVDKSRWQQGNVFSCSVMHEALHNHYTQKSLSLSPGGGGSGSAHPIPDSSPLLQFGGQVRQRYLYTDDACQTEAHLEIREDGTVGGAADQSPESLLQLKALKPGVIQILGVKTSRFLCQRPDGALYGSLHFDPEACSFRELLLEDGYNVYQSEAHGLPLHLPGCKSPHRDPAPRGPARFLPLPGLPPAPPEPPGILAPQPPDVGSSDPLSMVGSQGRSPSYAS

SEQ ID NO: 3303 - protein, 472 aa, Artificial Sequence
  Fusion Protein
HGEGTFTSDKSQQLEEELVRLFYEWLIAGGHSSIKPPPKGGGGGGGSGGGGSGGGGSADKTHTCPPCPAPELLGGPSVFLFPPKPKDTLMISRTPEVTCVVVDVSHEDPEVKFNWYVDGVEVHNAKTKPREEQYNNASRVVSVLTVLHQDWLNGKEYKCKVSNKALPAPIEKTISKAKGQPREPQVYTLPPSRDELTKNQVSLTCLVKGFYPSDIAVEWESNGQPENNYKTTPPVLDSDGSFFLYSKLTVDKSRWQQGNVFSCSVMHEALHNHYTQKSLSLSPGGGGSGSAHPIPDSSPLLQFGGQVRQRYLYTDDACQTEAHLEIREDGTVGGAADQSPESLLQLKALKPGVIQILGVKTSRFLCQRPDGALYGSLHFDPEACSFRELLLEDGYNVYQSEAHGLPLHLPGCKSPHRDPAPRGPARFLPLPGLPPAPPEPPGILAPQPPDVGSSDPLSMVYPSQGRSPSYAS

SEQ ID NO: 3304 - protein, 471 aa, Artificial Sequence
  Fusion Protein
HGEGTFTSDKSQQLEEELVRLFYEWLIAGGHSSIKPPPKGGGGGGGSGGGGSGGGGSADKTHTCPPCPAPELLGGPSVFLFPPKPKDTLMISRTPEVTCVVVDVSHEDPEVKFNWYVDGVEVHNAKTKPREEQYNNASRVVSVLTVLHQDWLNGKEYKCKVSNKALPAPIEKTISKAKGQPREPQVYTLPPSRDELTKNQVSLTCLVKGFYPSDIAVEWESNGQPENNYKTTPPVLDSDGSFFLYSKLTVDKSRWQQGNVFSCSVMHEALHNHYTQKSLSLSPGGGGSGSAHPIPDSSPLLQFGGQVRQRYLYTDDACQTEAHLEIREDGTVGGAADQSPESLLQLKALKPGVIQILGVKTSRFLCQRPDGALYGSLHFDPEACSFRELLLEDGYNVYQSEAHGLPLHLCGNKSPHRDPAPRGPARFLPLPGLPPAPPEPPGILAPQPPDVGSSDPLSMVGSQGRSPSYAS

SEQ ID NO: 3305 - protein, 472 aa, Artificial Sequence
  Fusion Protein
HGEGTFTSDKSQQLEEELVRLFYEWLIAGGHSSIKPPPKGGGGGGGSGGGGSGGGGSADKTHTCPPCPAPELLGGPSVFLFPPKPKDTLMISRTPEVTCVVVDVSHEDPEVKFNWYVDGVEVHNAKTKPREEQYNNASRVVSVLTVLHQDWLNGKEYKCKVSNKALPAPIEKTISKAKGQPREPQVYTLPPSRDELTKNQVSLTCLVKGFYPSDIAVEWESNGQPENNYKTTPPVLDSDGSFFLYSKLTVDKSRWQQGNVFSCSVMHEALHNHYTQKSLSLSPGGGGSGSAHPIPDSSPLLQFGGQVRQRYLYTDDACQTEAHLEIREDGTVGGAADQSPESLLQLKALKPGVIQILGVKTSRFLCQRPDGALYGSLHFDPEACSFRELLLEDGYNVYQSEAHGLPLHLCGNKSPHRDPAPRGPARFLPLPGLPPAPPEPPGILAPQPPDVGSSDPLSMVYPSQGRSPSYAS

SEQ ID NO: 3306 - protein, 473 aa, Artificial Sequence
  Fusion Protein
HGEGTFTSDKSQQLEEELVRLFYEWLIAGGHSSIKPPPKGGGGGGGSGGGGSGGGGSAESKYGPPCPPCPAPEFEGGPSVFLFPPKPKDTLMISRTPEVTCVVVDVSQEDPEVQFNWYVDGVEVHNAKTKPREEQFNSTYRVVSVLTVLHQDWLNGKEYKCKVSNKGLPSSIEKTISKAKGQPREPQVYTLPPSQEEMTKNQVSLTCLVKGFYPSDIAVEWESNGQPENNYKTTPPVLDSDGSFFLYSRLTVDKSRWQEGNVFSCSVMHEALHNHYTQKSLSLSLGGGGSGSAHPIPDSSPLLQFGGQVRQRYLYTDDACQTEAHLEIREDGTVGGAADQSPESLLQLKALKPGVIQILGVKTSRFLCQRPDGALYGSLHFDPEACSFRELLLEDGYNVYQSEAHGLPLHLPGCKSPHRDPAPRGPARFLPLPGLPPAPPEPPGILAPQPPDVGSSDPLSMVGSQGRSPSYAS

SEQ ID NO: 3307 - protein, 474 aa, Artificial Sequence
  Fusion Protein
HGEGTFTSDKSQQLEEELVRLFYEWLIAGGHSSIKPPPKGGGGGGGSGGGGSGGGGSAESKYGPPCPPCPAPEFEGGPSVFLFPPKPKDTLMISRTPEVTCVVVDVSQEDPEVQFNWYVDGVEVHNAKTKPREEQFNSTYRVVSVLTVLHQDWLNGKEYKCKVSNKGLPSSIEKTISKAKGQPREPQVYTLPPSQEEMTKNQVSLTCLVKGFYPSDIAVEWESNGQPENNYKTTPPVLDSDGSFFLYSRLTVDKSRWQEGNVFSCSVMHEALHNHYTQKSLSLSLGGGGSGSAHPIPDSSPLLQFGGQVRQRYLYTDDACQTEAHLEIREDGTVGGAADQSPESLLQLKALKPGVIQILGVKTSRFLCQRPDGALYGSLHFDPEACSFRELLLEDGYNVYQSEAHGLPLHLPGCKSPHRDPAPRGPARFLPLPGLPPAPPEPPGILAPQPPDVGSSDPLSMVYPSQGRSPSYAS

SEQ ID NO: 3308 - protein, 473 aa, Artificial Sequence
  Fusion Protein
HGEGTFTSDKSQQLEEELVRLFYEWLIAGGHSSIKPPPKGGGGGGGSGGGGSGGGGSAESKYGPPCPPCPAPEFEGGPSVFLFPPKPKDTLMISRTPEVTCVVVDVSQEDPEVQFNWYVDGVEVHNAKTKPREEQFNSTYRVVSVLTVLHQDWLNGKEYKCKVSNKGLPSSIEKTISKAKGQPREPQVYTLPPSQEEMTKNQVSLTCLVKGFYPSDIAVEWESNGQPENNYKTTPPVLDSDGSFFLYSRLTVDKSRWQEGNVFSCSVMHEALHNHYTQKSLSLSLGGGGSGSAHPIPDSSPLLQFGGQVRQRYLYTDDACQTEAHLEIREDGTVGGAADQSPESLLQLKALKPGVIQILGVKTSRFLCQRPDGALYGSLHFDPEACSFRELLLEDGYNVYQSEAHGLPLHLCGNKSPHRDPAPRGPARFLPLPGLPPAPPEPPGILAPQPPDVGSSDPLSMVGSQGRSPSYAS

SEQ ID NO: 3309 - protein, 474 aa, Artificial Sequence
  Fusion Protein
HGEGTFTSDKSQQLEEELVRLFYEWLIAGGHSSIKPPPKGGGGGGGSGGGGSGGGGSAESKYGPPCPPCPAPEFEGGPSVFLFPPKPKDTLMISRTPEVTCVVVDVSQEDPEVQFNWYVDGVEVHNAKTKPREEQFNSTYRVVSVLTVLHQDWLNGKEYKCKVSNKGLPSSIEKTISKAKGQPREPQVYTLPPSQEEMTKNQVSLTCLVKGFYPSDIAVEWESNGQPENNYKTTPPVLDSDGSFFLYSRLTVDKSRWQEGNVFSCSVMHEALHNHYTQKSLSLSLGGGGSGSAHPIPDSSPLLQFGGQVRQRYLYTDDACQTEAHLEIREDGTVGGAADQSPESLLQLKALKPGVIQILGVKTSRFLCQRPDGALYGSLHFDPEACSFRELLLEDGYNVYQSEAHGLPLHLCGNKSPHRDPAPRGPARFLPLPGLPPAPPEPPGILAPQPPDVGSSDPLSMVYPSQGRSPSYAS

SEQ ID NO: 3310 - protein, 471 aa, Artificial Sequence
  Fusion Protein
HGEGTFTSDKSQQLEEELVRLFYEWLIAGGHSKGKPPPKGGGGGGGSGGGGSGGGGSADKTHTCPPCPAPEAAGGPSVFLFPPKPKDTLMISRTPEVTCVVVDVSHEDPEVKFNWYVDGVEVHNAKTKPREEQYNSTYRVVSVLTVLHQDWLNGKEYKCKVSNKALPAPIEKTISKAKGQPREPQVYTLPPSRDELTKNQVSLTCLVKGFYPSDIAVEWESNGQPENNYKTTPPVLDSDGSFFLYSKLTVDKSRWQQGNVFSCSVMHEALHNHYTQKSLSLSPGGGGSGSAHPIPDSSPLLQFGGQVRQRYLYTDDACQTEAHLEIREDGTVGGAADQSPESLLQLKALKPGVIQILGVKTSRFLCQRPDGALYGSLHFDPEACSFRELLLEDGYNVYQSEAHGLPLHLPGCKSPHRDPAPRGPARFLPLPGLPPAPPEPPGILAPQPPDVGSSDPLSMVGSQGRSPSYAS

SEQ ID NO: 3311 - protein, 472 aa, Artificial Sequence
  Fusion Protein
HGEGTFTSDKSQQLEEELVRLFYEWLIAGGHSKGKPPPKGGGGGGGSGGGGSGGGGSADKTHTCPPCPAPEAAGGPSVFLFPPKPKDTLMISRTPEVTCVVVDVSHEDPEVKFNWYVDGVEVHNAKTKPREEQYNSTYRVVSVLTVLHQDWLNGKEYKCKVSNKALPAPIEKTISKAKGQPREPQVYTLPPSRDELTKNQVSLTCLVKGFYPSDIAVEWESNGQPENNYKTTPPVLDSDGSFFLYSKLTVDKSRWQQGNVFSCSVMHEALHNHYTQKSLSLSPGGGGSGSAHPIPDSSPLLQFGGQVRQRYLYTDDACQTEAHLEIREDGTVGGAADQSPESLLQLKALKPGVIQILGVKTSRFLCQRPDGALYGSLHFDPEACSFRELLLEDGYNVYQSEAHGLPLHLPGCKSPHRDPAPRGPARFLPLPGLPPAPPEPPGILAPQPPDVGSSDPLSMVYPSQGRSPSYAS

SEQ ID NO: 3312 - protein, 471 aa, Artificial Sequence
  Fusion Protein
HGEGTFTSDKSQQLEEELVRLFYEWLIAGGHSKGKPPPKGGGGGGGSGGGGSGGGGSADKTHTCPPCPAPEAAGGPSVFLFPPKPKDTLMISRTPEVTCVVVDVSHEDPEVKFNWYVDGVEVHNAKTKPREEQYNSTYRVVSVLTVLHQDWLNGKEYKCKVSNKALPAPIEKTISKAKGQPREPQVYTLPPSRDELTKNQVSLTCLVKGFYPSDIAVEWESNGQPENNYKTTPPVLDSDGSFFLYSKLTVDKSRWQQGNVFSCSVMHEALHNHYTQKSLSLSPGGGGSGSAHPIPDSSPLLQFGGQVRQRYLYTDDACQTEAHLEIREDGTVGGAADQSPESLLQLKALKPGVIQILGVKTSRFLCQRPDGALYGSLHFDPEACSFRELLLEDGYNVYQSEAHGLPLHLCGNKSPHRDPAPRGPARFLPLPGLPPAPPEPPGILAPQPPDVGSSDPLSMVGSQGRSPSYAS

SEQ ID NO: 3313 - protein, 472 aa, Artificial Sequence
  Fusion Protein
HGEGTFTSDKSQQLEEELVRLFYEWLIAGGHSKGKPPPKGGGGGGGSGGGGSGGGGSADKTHTCPPCPAPEAAGGPSVFLFPPKPKDTLMISRTPEVTCVVVDVSHEDPEVKFNWYVDGVEVHNAKTKPREEQYNSTYRVVSVLTVLHQDWLNGKEYKCKVSNKALPAPIEKTISKAKGQPREPQVYTLPPSRDELTKNQVSLTCLVKGFYPSDIAVEWESNGQPENNYKTTPPVLDSDGSFFLYSKLTVDKSRWQQGNVFSCSVMHEALHNHYTQKSLSLSPGGGGSGSAHPIPDSSPLLQFGGQVRQRYLYTDDACQTEAHLEIREDGTVGGAADQSPESLLQLKALKPGVIQILGVKTSRFLCQRPDGALYGSLHFDPEACSFRELLLEDGYNVYQSEAHGLPLHLCGNKSPHRDPAPRGPARFLPLPGLPPAPPEPPGILAPQPPDVGSSDPLSMVYPSQGRSPSYAS

SEQ ID NO: 3314 - protein, 471 aa, Artificial Sequence
  Fusion Protein
HGEGTFTSDKSQQLEEELVRLFYEWLIAGGHSKGKPPPKGGGGGGGSGGGGSGGGGSADKTHTCPPCPAPELLGGPSVFLFPPKPKDTLMISRTPEVTCVVVDVSHEDPEVKFNWYVDGVEVHNAKTKPREEQYNNASRVVSVLTVLHQDWLNGKEYKCKVSNKALPAPIEKTISKAKGQPREPQVYTLPPSRDELTKNQVSLTCLVKGFYPSDIAVEWESNGQPENNYKTTPPVLDSDGSFFLYSKLTVDKSRWQQGNVFSCSVMHEALHNHYTQKSLSLSPGGGGSGSAHPIPDSSPLLQFGGQVRQRYLYTDDACQTEAHLEIREDGTVGGAADQSPESLLQLKALKPGVIQILGVKTSRFLCQRPDGALYGSLHFDPEACSFRELLLEDGYNVYQSEAHGLPLHLPGCKSPHRDPAPRGPARFLPLPGLPPAPPEPPGILAPQPPDVGSSDPLSMVGSQGRSPSYAS

SEQ ID NO: 3315 - protein, 472 aa, Artificial Sequence
  Fusion Protein
HGEGTFTSDKSQQLEEELVRLFYEWLIAGGHSKGKPPPKGGGGGGGSGGGGSGGGGSADKTHTCPPCPAPELLGGPSVFLFPPKPKDTLMISRTPEVTCVVVDVSHEDPEVKFNWYVDGVEVHNAKTKPREEQYNNASRVVSVLTVLHQDWLNGKEYKCKVSNKALPAPIEKTISKAKGQPREPQVYTLPPSRDELTKNQVSLTCLVKGFYPSDIAVEWESNGQPENNYKTTPPVLDSDGSFFLYSKLTVDKSRWQQGNVFSCSVMHEALHNHYTQKSLSLSPGGGGSGSAHPIPDSSPLLQFGGQVRQRYLYTDDACQTEAHLEIREDGTVGGAADQSPESLLQLKALKPGVIQILGVKTSRFLCQRPDGALYGSLHFDPEACSFRELLLEDGYNVYQSEAHGLPLHLPGCKSPHRDPAPRGPARFLPLPGLPPAPPEPPGILAPQPPDVGSSDPLSMVYPSQGRSPSYAS

SEQ ID NO: 3316 - protein, 471 aa, Artificial Sequence
  Fusion Protein
HGEGTFTSDKSQQLEEELVRLFYEWLIAGGHSKGKPPPKGGGGGGGSGGGGSGGGGSADKTHTCPPCPAPELLGGPSVFLFPPKPKDTLMISRTPEVTCVVVDVSHEDPEVKFNWYVDGVEVHNAKTKPREEQYNNASRVVSVLTVLHQDWLNGKEYKCKVSNKALPAPIEKTISKAKGQPREPQVYTLPPSRDELTKNQVSLTCLVKGFYPSDIAVEWESNGQPENNYKTTPPVLDSDGSFFLYSKLTVDKSRWQQGNVFSCSVMHEALHNHYTQKSLSLSPGGGGSGSAHPIPDSSPLLQFGGQVRQRYLYTDDACQTEAHLEIREDGTVGGAADQSPESLLQLKALKPGVIQILGVKTSRFLCQRPDGALYGSLHFDPEACSFRELLLEDGYNVYQSEAHGLPLHLCGNKSPHRDPAPRGPARFLPLPGLPPAPPEPPGILAPQPPDVGSSDPLSMVGSQGRSPSYAS

SEQ ID NO: 3317 - protein, 472 aa, Artificial Sequence
  Fusion Protein
HGEGTFTSDKSQQLEEELVRLFYEWLIAGGHSKGKPPPKGGGGGGGSGGGGSGGGGSADKTHTCPPCPAPELLGGPSVFLFPPKPKDTLMISRTPEVTCVVVDVSHEDPEVKFNWYVDGVEVHNAKTKPREEQYNNASRVVSVLTVLHQDWLNGKEYKCKVSNKALPAPIEKTISKAKGQPREPQVYTLPPSRDELTKNQVSLTCLVKGFYPSDIAVEWESNGQPENNYKTTPPVLDSDGSFFLYSKLTVDKSRWQQGNVFSCSVMHEALHNHYTQKSLSLSPGGGGSGSAHPIPDSSPLLQFGGQVRQRYLYTDDACQTEAHLEIREDGTVGGAADQSPESLLQLKALKPGVIQILGVKTSRFLCQRPDGALYGSLHFDPEACSFRELLLEDGYNVYQSEAHGLPLHLCGNKSPHRDPAPRGPARFLPLPGLPPAPPEPPGILAPQPPDVGSSDPLSMVYPSQGRSPSYAS

SEQ ID NO: 3318 - protein, 473 aa, Artificial Sequence
  Fusion Protein
HGEGTFTSDKSQQLEEELVRLFYEWLIAGGHSKGKPPPKGGGGGGGSGGGGSGGGGSAESKYGPPCPPCPAPEFEGGPSVFLFPPKPKDTLMISRTPEVTCVVVDVSQEDPEVQFNWYVDGVEVHNAKTKPREEQFNSTYRVVSVLTVLHQDWLNGKEYKCKVSNKGLPSSIEKTISKAKGQPREPQVYTLPPSQEEMTKNQVSLTCLVKGFYPSDIAVEWESNGQPENNYKTTPPVLDSDGSFFLYSRLTVDKSRWQEGNVFSCSVMHEALHNHYTQKSLSLSLGGGGSGSAHPIPDSSPLLQFGGQVRQRYLYTDDACQTEAHLEIREDGTVGGAADQSPESLLQLKALKPGVIQILGVKTSRFLCQRPDGALYGSLHFDPEACSFRELLLEDGYNVYQSEAHGLPLHLPGCKSPHRDPAPRGPARFLPLPGLPPAPPEPPGILAPQPPDVGSSDPLSMVGSQGRSPSYAS

SEQ ID NO: 3319 - protein, 474 aa, Artificial Sequence
  Fusion Protein
HGEGTFTSDKSQQLEEELVRLFYEWLIAGGHSKGKPPPKGGGGGGGSGGGGSGGGGSAESKYGPPCPPCPAPEFEGGPSVFLFPPKPKDTLMISRTPEVTCVVVDVSQEDPEVQFNWYVDGVEVHNAKTKPREEQFNSTYRVVSVLTVLHQDWLNGKEYKCKVSNKGLPSSIEKTISKAKGQPREPQVYTLPPSQEEMTKNQVSLTCLVKGFYPSDIAVEWESNGQPENNYKTTPPVLDSDGSFFLYSRLTVDKSRWQEGNVFSCSVMHEALHNHYTQKSLSLSLGGGGSGSAHPIPDSSPLLQFGGQVRQRYLYTDDACQTEAHLEIREDGTVGGAADQSPESLLQLKALKPGVIQILGVKTSRFLCQRPDGALYGSLHFDPEACSFRELLLEDGYNVYQSEAHGLPLHLPGCKSPHRDPAPRGPARFLPLPGLPPAPPEPPGILAPQPPDVGSSDPLSMVYPSQGRSPSYAS

SEQ ID NO: 3320 - protein, 473 aa, Artificial Sequence
  Fusion Protein
HGEGTFTSDKSQQLEEELVRLFYEWLIAGGHSKGKPPPKGGGGGGGSGGGGSGGGGSAESKYGPPCPPCPAPEFEGGPSVFLFPPKPKDTLMISRTPEVTCVVVDVSQEDPEVQFNWYVDGVEVHNAKTKPREEQFNSTYRVVSVLTVLHQDWLNGKEYKCKVSNKGLPSSIEKTISKAKGQPREPQVYTLPPSQEEMTKNQVSLTCLVKGFYPSDIAVEWESNGQPENNYKTTPPVLDSDGSFFLYSRLTVDKSRWQEGNVFSCSVMHEALHNHYTQKSLSLSLGGGGSGSAHPIPDSSPLLQFGGQVRQRYLYTDDACQTEAHLEIREDGTVGGAADQSPESLLQLKALKPGVIQILGVKTSRFLCQRPDGALYGSLHFDPEACSFRELLLEDGYNVYQSEAHGLPLHLCGNKSPHRDPAPRGPARFLPLPGLPPAPPEPPGILAPQPPDVGSSDPLSMVGSQGRSPSYAS

SEQ ID NO: 3321 - protein, 474 aa, Artificial Sequence
  Fusion Protein
HGEGTFTSDKSQQLEEELVRLFYEWLIAGGHSKGKPPPKGGGGGGGSGGGGSGGGGSAESKYGPPCPPCPAPEFEGGPSVFLFPPKPKDTLMISRTPEVTCVVVDVSQEDPEVQFNWYVDGVEVHNAKTKPREEQFNSTYRVVSVLTVLHQDWLNGKEYKCKVSNKGLPSSIEKTISKAKGQPREPQVYTLPPSQEEMTKNQVSLTCLVKGFYPSDIAVEWESNGQPENNYKTTPPVLDSDGSFFLYSRLTVDKSRWQEGNVFSCSVMHEALHNHYTQKSLSLSLGGGGSGSAHPIPDSSPLLQFGGQVRQRYLYTDDACQTEAHLEIREDGTVGGAADQSPESLLQLKALKPGVIQILGVKTSRFLCQRPDGALYGSLHFDPEACSFRELLLEDGYNVYQSEAHGLPLHLCGNKSPHRDPAPRGPARFLPLPGLPPAPPEPPGILAPQPPDVGSSDPLSMVYPSQGRSPSYAS

SEQ ID NO: 3322 - protein, 471 aa, Artificial Sequence
  Fusion Protein
HGEGTFTSDKSQQLEKELVRLFYEWLLAGGHSSIKPPPKGGGGGGGSGGGGSGGGGSADKTHTCPPCPAPEAAGGPSVFLFPPKPKDTLMISRTPEVTCVVVDVSHEDPEVKFNWYVDGVEVHNAKTKPREEQYNSTYRVVSVLTVLHQDWLNGKEYKCKVSNKALPAPIEKTISKAKGQPREPQVYTLPPSRDELTKNQVSLTCLVKGFYPSDIAVEWESNGQPENNYKTTPPVLDSDGSFFLYSKLTVDKSRWQQGNVFSCSVMHEALHNHYTQKSLSLSPGGGGSGSAHPIPDSSPLLQFGGQVRQRYLYTDDACQTEAHLEIREDGTVGGAADQSPESLLQLKALKPGVIQILGVKTSRFLCQRPDGALYGSLHFDPEACSFRELLLEDGYNVYQSEAHGLPLHLPGCKSPHRDPAPRGPARFLPLPGLPPAPPEPPGILAPQPPDVGSSDPLSMVGSQGRSPSYAS

SEQ ID NO: 3323 - protein, 472 aa, Artificial Sequence
  Fusion Protein
HGEGTFTSDKSQQLEKELVRLFYEWLLAGGHSSIKPPPKGGGGGGGSGGGGSGGGGSADKTHTCPPCPAPEAAGGPSVFLFPPKPKDTLMISRTPEVTCVVVDVSHEDPEVKFNWYVDGVEVHNAKTKPREEQYNSTYRVVSVLTVLHQDWLNGKEYKCKVSNKALPAPIEKTISKAKGQPREPQVYTLPPSRDELTKNQVSLTCLVKGFYPSDIAVEWESNGQPENNYKTTPPVLDSDGSFFLYSKLTVDKSRWQQGNVFSCSVMHEALHNHYTQKSLSLSPGGGGSGSAHPIPDSSPLLQFGGQVRQRYLYTDDACQTEAHLEIREDGTVGGAADQSPESLLQLKALKPGVIQILGVKTSRFLCQRPDGALYGSLHFDPEACSFRELLLEDGYNVYQSEAHGLPLHLPGCKSPHRDPAPRGPARFLPLPGLPPAPPEPPGILAPQPPDVGSSDPLSMVYPSQGRSPSYAS

SEQ ID NO: 3324 - protein, 471 aa, Artificial Sequence
  Fusion Protein
HGEGTFTSDKSQQLEKELVRLFYEWLLAGGHSSIKPPPKGGGGGGGSGGGGSGGGGSADKTHTCPPCPAPEAAGGPSVFLFPPKPKDTLMISRTPEVTCVVVDVSHEDPEVKFNWYVDGVEVHNAKTKPREEQYNSTYRVVSVLTVLHQDWLNGKEYKCKVSNKALPAPIEKTISKAKGQPREPQVYTLPPSRDELTKNQVSLTCLVKGFYPSDIAVEWESNGQPENNYKTTPPVLDSDGSFFLYSKLTVDKSRWQQGNVFSCSVMHEALHNHYTQKSLSLSPGGGGSGSAHPIPDSSPLLQFGGQVRQRYLYTDDACQTEAHLEIREDGTVGGAADQSPESLLQLKALKPGVIQILGVKTSRFLCQRPDGALYGSLHFDPEACSFRELLLEDGYNVYQSEAHGLPLHLCGNKSPHRDPAPRGPARFLPLPGLPPAPPEPPGILAPQPPDVGSSDPLSMVGSQGRSPSYAS

SEQ ID NO: 3325 - protein, 472 aa, Artificial Sequence
  Fusion Protein
HGEGTFTSDKSQQLEKELVRLFYEWLLAGGHSSIKPPPKGGGGGGGSGGGGSGGGGSADKTHTCPPCPAPEAAGGPSVFLFPPKPKDTLMISRTPEVTCVVVDVSHEDPEVKFNWYVDGVEVHNAKTKPREEQYNSTYRVVSVLTVLHQDWLNGKEYKCKVSNKALPAPIEKTISKAKGQPREPQVYTLPPSRDELTKNQVSLTCLVKGFYPSDIAVEWESNGQPENNYKTTPPVLDSDGSFFLYSKLTVDKSRWQQGNVFSCSVMHEALHNHYTQKSLSLSPGGGGSGSAHPIPDSSPLLQFGGQVRQRYLYTDDACQTEAHLEIREDGTVGGAADQSPESLLQLKALKPGVIQILGVKTSRFLCQRPDGALYGSLHFDPEACSFRELLLEDGYNVYQSEAHGLPLHLCGNKSPHRDPAPRGPARFLPLPGLPPAPPEPPGILAPQPPDVGSSDPLSMVYPSQGRSPSYAS

SEQ ID NO: 3326 - protein, 471 aa, Artificial Sequence
  Fusion Protein
HGEGTFTSDKSQQLEKELVRLFYEWLLAGGHSSIKPPPKGGGGGGGSGGGGSGGGGSADKTHTCPPCPAPELLGGPSVFLFPPKPKDTLMISRTPEVTCVVVDVSHEDPEVKFNWYVDGVEVHNAKTKPREEQYNNASRVVSVLTVLHQDWLNGKEYKCKVSNKALPAPIEKTISKAKGQPREPQVYTLPPSRDELTKNQVSLTCLVKGFYPSDIAVEWESNGQPENNYKTTPPVLDSDGSFFLYSKLTVDKSRWQQGNVFSCSVMHEALHNHYTQKSLSLSPGGGGSGSAHPIPDSSPLLQFGGQVRQRYLYTDDACQTEAHLEIREDGTVGGAADQSPESLLQLKALKPGVIQILGVKTSRFLCQRPDGALYGSLHFDPEACSFRELLLEDGYNVYQSEAHGLPLHLPGCKSPHRDPAPRGPARFLPLPGLPPAPPEPPGILAPQPPDVGSSDPLSMVGSQGRSPSYAS

SEQ ID NO: 3327 - protein, 472 aa, Artificial Sequence
  Fusion Protein
HGEGTFTSDKSQQLEKELVRLFYEWLLAGGHSSIKPPPKGGGGGGGSGGGGSGGGGSADKTHTCPPCPAPELLGGPSVFLFPPKPKDTLMISRTPEVTCVVVDVSHEDPEVKFNWYVDGVEVHNAKTKPREEQYNNASRVVSVLTVLHQDWLNGKEYKCKVSNKALPAPIEKTISKAKGQPREPQVYTLPPSRDELTKNQVSLTCLVKGFYPSDIAVEWESNGQPENNYKTTPPVLDSDGSFFLYSKLTVDKSRWQQGNVFSCSVMHEALHNHYTQKSLSLSPGGGGSGSAHPIPDSSPLLQFGGQVRQRYLYTDDACQTEAHLEIREDGTVGGAADQSPESLLQLKALKPGVIQILGVKTSRFLCQRPDGALYGSLHFDPEACSFRELLLEDGYNVYQSEAHGLPLHLPGCKSPHRDPAPRGPARFLPLPGLPPAPPEPPGILAPQPPDVGSSDPLSMVYPSQGRSPSYAS

SEQ ID NO: 3328 - protein, 471 aa, Artificial Sequence
  Fusion Protein
HGEGTFTSDKSQQLEKELVRLFYEWLLAGGHSSIKPPPKGGGGGGGSGGGGSGGGGSADKTHTCPPCPAPELLGGPSVFLFPPKPKDTLMISRTPEVTCVVVDVSHEDPEVKFNWYVDGVEVHNAKTKPREEQYNNASRVVSVLTVLHQDWLNGKEYKCKVSNKALPAPIEKTISKAKGQPREPQVYTLPPSRDELTKNQVSLTCLVKGFYPSDIAVEWESNGQPENNYKTTPPVLDSDGSFFLYSKLTVDKSRWQQGNVFSCSVMHEALHNHYTQKSLSLSPGGGGSGSAHPIPDSSPLLQFGGQVRQRYLYTDDACQTEAHLEIREDGTVGGAADQSPESLLQLKALKPGVIQILGVKTSRFLCQRPDGALYGSLHFDPEACSFRELLLEDGYNVYQSEAHGLPLHLCGNKSPHRDPAPRGPARFLPLPGLPPAPPEPPGILAPQPPDVGSSDPLSMVGSQGRSPSYAS

SEQ ID NO: 3329 - protein, 472 aa, Artificial Sequence
  Fusion Protein
HGEGTFTSDKSQQLEKELVRLFYEWLLAGGHSSIKPPPKGGGGGGGSGGGGSGGGGSADKTHTCPPCPAPELLGGPSVFLFPPKPKDTLMISRTPEVTCVVVDVSHEDPEVKFNWYVDGVEVHNAKTKPREEQYNNASRVVSVLTVLHQDWLNGKEYKCKVSNKALPAPIEKTISKAKGQPREPQVYTLPPSRDELTKNQVSLTCLVKGFYPSDIAVEWESNGQPENNYKTTPPVLDSDGSFFLYSKLTVDKSRWQQGNVFSCSVMHEALHNHYTQKSLSLSPGGGGSGSAHPIPDSSPLLQFGGQVRQRYLYTDDACQTEAHLEIREDGTVGGAADQSPESLLQLKALKPGVIQILGVKTSRFLCQRPDGALYGSLHFDPEACSFRELLLEDGYNVYQSEAHGLPLHLCGNKSPHRDPAPRGPARFLPLPGLPPAPPEPPGILAPQPPDVGSSDPLSMVYPSQGRSPSYAS

SEQ ID NO: 3330 - protein, 473 aa, Artificial Sequence
  Fusion Protein
HGEGTFTSDKSQQLEKELVRLFYEWLLAGGHSSIKPPPKGGGGGGGSGGGGSGGGGSAESKYGPPCPPCPAPEFEGGPSVFLFPPKPKDTLMISRTPEVTCVVVDVSQEDPEVQFNWYVDGVEVHNAKTKPREEQFNSTYRVVSVLTVLHQDWLNGKEYKCKVSNKGLPSSIEKTISKAKGQPREPQVYTLPPSQEEMTKNQVSLTCLVKGFYPSDIAVEWESNGQPENNYKTTPPVLDSDGSFFLYSRLTVDKSRWQEGNVFSCSVMHEALHNHYTQKSLSLSLGGGGSGSAHPIPDSSPLLQFGGQVRQRYLYTDDACQTEAHLEIREDGTVGGAADQSPESLLQLKALKPGVIQILGVKTSRFLCQRPDGALYGSLHFDPEACSFRELLLEDGYNVYQSEAHGLPLHLPGCKSPHRDPAPRGPARFLPLPGLPPAPPEPPGILAPQPPDVGSSDPLSMVGSQGRSPSYAS

SEQ ID NO: 3331 - protein, 474 aa, Artificial Sequence
  Fusion Protein
HGEGTFTSDKSQQLEKELVRLFYEWLLAGGHSSIKPPPKGGGGGGGSGGGGSGGGGSAESKYGPPCPPCPAPEFEGGPSVFLFPPKPKDTLMISRTPEVTCVVVDVSQEDPEVQFNWYVDGVEVHNAKTKPREEQFNSTYRVVSVLTVLHQDWLNGKEYKCKVSNKGLPSSIEKTISKAKGQPREPQVYTLPPSQEEMTKNQVSLTCLVKGFYPSDIAVEWESNGQPENNYKTTPPVLDSDGSFFLYSRLTVDKSRWQEGNVFSCSVMHEALHNHYTQKSLSLSLGGGGSGSAHPIPDSSPLLQFGGQVRQRYLYTDDACQTEAHLEIREDGTVGGAADQSPESLLQLKALKPGVIQILGVKTSRFLCQRPDGALYGSLHFDPEACSFRELLLEDGYNVYQSEAHGLPLHLPGCKSPHRDPAPRGPARFLPLPGLPPAPPEPPGILAPQPPDVGSSDPLSMVYPSQGRSPSYAS

SEQ ID NO: 3332 - protein, 473 aa, Artificial Sequence
  Fusion Protein
HGEGTFTSDKSQQLEKELVRLFYEWLLAGGHSSIKPPPKGGGGGGGSGGGGSGGGGSAESKYGPPCPPCPAPEFEGGPSVFLFPPKPKDTLMISRTPEVTCVVVDVSQEDPEVQFNWYVDGVEVHNAKTKPREEQFNSTYRVVSVLTVLHQDWLNGKEYKCKVSNKGLPSSIEKTISKAKGQPREPQVYTLPPSQEEMTKNQVSLTCLVKGFYPSDIAVEWESNGQPENNYKTTPPVLDSDGSFFLYSRLTVDKSRWQEGNVFSCSVMHEALHNHYTQKSLSLSLGGGGSGSAHPIPDSSPLLQFGGQVRQRYLYTDDACQTEAHLEIREDGTVGGAADQSPESLLQLKALKPGVIQILGVKTSRFLCQRPDGALYGSLHFDPEACSFRELLLEDGYNVYQSEAHGLPLHLCGNKSPHRDPAPRGPARFLPLPGLPPAPPEPPGILAPQPPDVGSSDPLSMVGSQGRSPSYAS

SEQ ID NO: 3333 - protein, 474 aa, Artificial Sequence
  Fusion Protein
HGEGTFTSDKSQQLEKELVRLFYEWLLAGGHSSIKPPPKGGGGGGGSGGGGSGGGGSAESKYGPPCPPCPAPEFEGGPSVFLFPPKPKDTLMISRTPEVTCVVVDVSQEDPEVQFNWYVDGVEVHNAKTKPREEQFNSTYRVVSVLTVLHQDWLNGKEYKCKVSNKGLPSSIEKTISKAKGQPREPQVYTLPPSQEEMTKNQVSLTCLVKGFYPSDIAVEWESNGQPENNYKTTPPVLDSDGSFFLYSRLTVDKSRWQEGNVFSCSVMHEALHNHYTQKSLSLSLGGGGSGSAHPIPDSSPLLQFGGQVRQRYLYTDDACQTEAHLEIREDGTVGGAADQSPESLLQLKALKPGVIQILGVKTSRFLCQRPDGALYGSLHFDPEACSFRELLLEDGYNVYQSEAHGLPLHLCGNKSPHRDPAPRGPARFLPLPGLPPAPPEPPGILAPQPPDVGSSDPLSMVYPSQGRSPSYAS

SEQ ID NO: 3334 - protein, 471 aa, Artificial Sequence
  Fusion Protein
HGEGTFTSDKSQQLEKELVRLFYEWLKAGGHSSIKPPPKGGGGGGGSGGGGSGGGGSADKTHTCPPCPAPEAAGGPSVFLFPPKPKDTLMISRTPEVTCVVVDVSHEDPEVKFNWYVDGVEVHNAKTKPREEQYNSTYRVVSVLTVLHQDWLNGKEYKCKVSNKALPAPIEKTISKAKGQPREPQVYTLPPSRDELTKNQVSLTCLVKGFYPSDIAVEWESNGQPENNYKTTPPVLDSDGSFFLYSKLTVDKSRWQQGNVFSCSVMHEALHNHYTQKSLSLSPGGGGSGSAHPIPDSSPLLQFGGQVRQRYLYTDDACQTEAHLEIREDGTVGGAADQSPESLLQLKALKPGVIQILGVKTSRFLCQRPDGALYGSLHFDPEACSFRELLLEDGYNVYQSEAHGLPLHLPGCKSPHRDPAPRGPARFLPLPGLPPAPPEPPGILAPQPPDVGSSDPLSMVGSQGRSPSYAS

SEQ ID NO: 3335 - protein, 472 aa, Artificial Sequence
  Fusion Protein
HGEGTFTSDKSQQLEKELVRLFYEWLKAGGHSSIKPPPKGGGGGGGSGGGGSGGGGSADKTHTCPPCPAPEAAGGPSVFLFPPKPKDTLMISRTPEVTCVVVDVSHEDPEVKFNWYVDGVEVHNAKTKPREEQYNSTYRVVSVLTVLHQDWLNGKEYKCKVSNKALPAPIEKTISKAKGQPREPQVYTLPPSRDELTKNQVSLTCLVKGFYPSDIAVEWESNGQPENNYKTTPPVLDSDGSFFLYSKLTVDKSRWQQGNVFSCSVMHEALHNHYTQKSLSLSPGGGGSGSAHPIPDSSPLLQFGGQVRQRYLYTDDACQTEAHLEIREDGTVGGAADQSPESLLQLKALKPGVIQILGVKTSRFLCQRPDGALYGSLHFDPEACSFRELLLEDGYNVYQSEAHGLPLHLPGCKSPHRDPAPRGPARFLPLPGLPPAPPEPPGILAPQPPDVGSSDPLSMVYPSQGRSPSYAS

SEQ ID NO: 3336 - protein, 471 aa, Artificial Sequence
  Fusion Protein
HGEGTFTSDKSQQLEKELVRLFYEWLKAGGHSSIKPPPKGGGGGGGSGGGGSGGGGSADKTHTCPPCPAPEAAGGPSVFLFPPKPKDTLMISRTPEVTCVVVDVSHEDPEVKFNWYVDGVEVHNAKTKPREEQYNSTYRVVSVLTVLHQDWLNGKEYKCKVSNKALPAPIEKTISKAKGQPREPQVYTLPPSRDELTKNQVSLTCLVKGFYPSDIAVEWESNGQPENNYKTTPPVLDSDGSFFLYSKLTVDKSRWQQGNVFSCSVMHEALHNHYTQKSLSLSPGGGGSGSAHPIPDSSPLLQFGGQVRQRYLYTDDACQTEAHLEIREDGTVGGAADQSPESLLQLKALKPGVIQILGVKTSRFLCQRPDGALYGSLHFDPEACSFRELLLEDGYNVYQSEAHGLPLHLCGNKSPHRDPAPRGPARFLPLPGLPPAPPEPPGILAPQPPDVGSSDPLSMVGSQGRSPSYAS

SEQ ID NO: 3337 - protein, 472 aa, Artificial Sequence
  Fusion Protein
HGEGTFTSDKSQQLEKELVRLFYEWLKAGGHSSIKPPPKGGGGGGGSGGGGSGGGGSADKTHTCPPCPAPEAAGGPSVFLFPPKPKDTLMISRTPEVTCVVVDVSHEDPEVKFNWYVDGVEVHNAKTKPREEQYNSTYRVVSVLTVLHQDWLNGKEYKCKVSNKALPAPIEKTISKAKGQPREPQVYTLPPSRDELTKNQVSLTCLVKGFYPSDIAVEWESNGQPENNYKTTPPVLDSDGSFFLYSKLTVDKSRWQQGNVFSCSVMHEALHNHYTQKSLSLSPGGGGSGSAHPIPDSSPLLQFGGQVRQRYLYTDDACQTEAHLEIREDGTVGGAADQSPESLLQLKALKPGVIQILGVKTSRFLCQRPDGALYGSLHFDPEACSFRELLLEDGYNVYQSEAHGLPLHLCGNKSPHRDPAPRGPARFLPLPGLPPAPPEPPGILAPQPPDVGSSDPLSMVYPSQGRSPSYAS

SEQ ID NO: 3338 - protein, 471 aa, Artificial Sequence
  Fusion Protein
HGEGTFTSDKSQQLEKELVRLFYEWLKAGGHSSIKPPPKGGGGGGGSGGGGSGGGGSADKTHTCPPCPAPELLGGPSVFLFPPKPKDTLMISRTPEVTCVVVDVSHEDPEVKFNWYVDGVEVHNAKTKPREEQYNNASRVVSVLTVLHQDWLNGKEYKCKVSNKALPAPIEKTISKAKGQPREPQVYTLPPSRDELTKNQVSLTCLVKGFYPSDIAVEWESNGQPENNYKTTPPVLDSDGSFFLYSKLTVDKSRWQQGNVFSCSVMHEALHNHYTQKSLSLSPGGGGSGSAHPIPDSSPLLQFGGQVRQRYLYTDDACQTEAHLEIREDGTVGGAADQSPESLLQLKALKPGVIQILGVKTSRFLCQRPDGALYGSLHFDPEACSFRELLLEDGYNVYQSEAHGLPLHLPGCKSPHRDPAPRGPARFLPLPGLPPAPPEPPGILAPQPPDVGSSDPLSMVGSQGRSPSYAS

SEQ ID NO: 3339 - protein, 472 aa, Artificial Sequence
  Fusion Protein
HGEGTFTSDKSQQLEKELVRLFYEWLKAGGHSSIKPPPKGGGGGGGSGGGGSGGGGSADKTHTCPPCPAPELLGGPSVFLFPPKPKDTLMISRTPEVTCVVVDVSHEDPEVKFNWYVDGVEVHNAKTKPREEQYNNASRVVSVLTVLHQDWLNGKEYKCKVSNKALPAPIEKTISKAKGQPREPQVYTLPPSRDELTKNQVSLTCLVKGFYPSDIAVEWESNGQPENNYKTTPPVLDSDGSFFLYSKLTVDKSRWQQGNVFSCSVMHEALHNHYTQKSLSLSPGGGGSGSAHPIPDSSPLLQFGGQVRQRYLYTDDACQTEAHLEIREDGTVGGAADQSPESLLQLKALKPGVIQILGVKTSRFLCQRPDGALYGSLHFDPEACSFRELLLEDGYNVYQSEAHGLPLHLPGCKSPHRDPAPRGPARFLPLPGLPPAPPEPPGILAPQPPDVGSSDPLSMVYPSQGRSPSYAS

SEQ ID NO: 3340 - protein, 471 aa, Artificial Sequence
  Fusion Protein
HGEGTFTSDKSQQLEKELVRLFYEWLKAGGHSSIKPPPKGGGGGGGSGGGGSGGGGSADKTHTCPPCPAPELLGGPSVFLFPPKPKDTLMISRTPEVTCVVVDVSHEDPEVKFNWYVDGVEVHNAKTKPREEQYNNASRVVSVLTVLHQDWLNGKEYKCKVSNKALPAPIEKTISKAKGQPREPQVYTLPPSRDELTKNQVSLTCLVKGFYPSDIAVEWESNGQPENNYKTTPPVLDSDGSFFLYSKLTVDKSRWQQGNVFSCSVMHEALHNHYTQKSLSLSPGGGGSGSAHPIPDSSPLLQFGGQVRQRYLYTDDACQTEAHLEIREDGTVGGAADQSPESLLQLKALKPGVIQILGVKTSRFLCQRPDGALYGSLHFDPEACSFRELLLEDGYNVYQSEAHGLPLHLCGNKSPHRDPAPRGPARFLPLPGLPPAPPEPPGILAPQPPDVGSSDPLSMVGSQGRSPSYAS

SEQ ID NO: 3341 - protein, 472 aa, Artificial Sequence
  Fusion Protein
HGEGTFTSDKSQQLEKELVRLFYEWLKAGGHSSIKPPPKGGGGGGGSGGGGSGGGGSADKTHTCPPCPAPELLGGPSVFLFPPKPKDTLMISRTPEVTCVVVDVSHEDPEVKFNWYVDGVEVHNAKTKPREEQYNNASRVVSVLTVLHQDWLNGKEYKCKVSNKALPAPIEKTISKAKGQPREPQVYTLPPSRDELTKNQVSLTCLVKGFYPSDIAVEWESNGQPENNYKTTPPVLDSDGSFFLYSKLTVDKSRWQQGNVFSCSVMHEALHNHYTQKSLSLSPGGGGSGSAHPIPDSSPLLQFGGQVRQRYLYTDDACQTEAHLEIREDGTVGGAADQSPESLLQLKALKPGVIQILGVKTSRFLCQRPDGALYGSLHFDPEACSFRELLLEDGYNVYQSEAHGLPLHLCGNKSPHRDPAPRGPARFLPLPGLPPAPPEPPGILAPQPPDVGSSDPLSMVYPSQGRSPSYAS

SEQ ID NO: 3342 - protein, 473 aa, Artificial Sequence
  Fusion Protein
HGEGTFTSDKSQQLEKELVRLFYEWLKAGGHSSIKPPPKGGGGGGGSGGGGSGGGGSAESKYGPPCPPCPAPEFEGGPSVFLFPPKPKDTLMISRTPEVTCVVVDVSQEDPEVQFNWYVDGVEVHNAKTKPREEQFNSTYRVVSVLTVLHQDWLNGKEYKCKVSNKGLPSSIEKTISKAKGQPREPQVYTLPPSQEEMTKNQVSLTCLVKGFYPSDIAVEWESNGQPENNYKTTPPVLDSDGSFFLYSRLTVDKSRWQEGNVFSCSVMHEALHNHYTQKSLSLSLGGGGSGSAHPIPDSSPLLQFGGQVRQRYLYTDDACQTEAHLEIREDGTVGGAADQSPESLLQLKALKPGVIQILGVKTSRFLCQRPDGALYGSLHFDPEACSFRELLLEDGYNVYQSEAHGLPLHLPGCKSPHRDPAPRGPARFLPLPGLPPAPPEPPGILAPQPPDVGSSDPLSMVGSQGRSPSYAS

SEQ ID NO: 3343 - protein, 474 aa, Artificial Sequence
  Fusion Protein
HGEGTFTSDKSQQLEKELVRLFYEWLKAGGHSSIKPPPKGGGGGGGSGGGGSGGGGSAESKYGPPCPPCPAPEFEGGPSVFLFPPKPKDTLMISRTPEVTCVVVDVSQEDPEVQFNWYVDGVEVHNAKTKPREEQFNSTYRVVSVLTVLHQDWLNGKEYKCKVSNKGLPSSIEKTISKAKGQPREPQVYTLPPSQEEMTKNQVSLTCLVKGFYPSDIAVEWESNGQPENNYKTTPPVLDSDGSFFLYSRLTVDKSRWQEGNVFSCSVMHEALHNHYTQKSLSLSLGGGGSGSAHPIPDSSPLLQFGGQVRQRYLYTDDACQTEAHLEIREDGTVGGAADQSPESLLQLKALKPGVIQILGVKTSRFLCQRPDGALYGSLHFDPEACSFRELLLEDGYNVYQSEAHGLPLHLPGCKSPHRDPAPRGPARFLPLPGLPPAPPEPPGILAPQPPDVGSSDPLSMVYPSQGRSPSYAS

SEQ ID NO: 3344 - protein, 473 aa, Artificial Sequence
  Fusion Protein
HGEGTFTSDKSQQLEKELVRLFYEWLKAGGHSSIKPPPKGGGGGGGSGGGGSGGGGSAESKYGPPCPPCPAPEFEGGPSVFLFPPKPKDTLMISRTPEVTCVVVDVSQEDPEVQFNWYVDGVEVHNAKTKPREEQFNSTYRVVSVLTVLHQDWLNGKEYKCKVSNKGLPSSIEKTISKAKGQPREPQVYTLPPSQEEMTKNQVSLTCLVKGFYPSDIAVEWESNGQPENNYKTTPPVLDSDGSFFLYSRLTVDKSRWQEGNVFSCSVMHEALHNHYTQKSLSLSLGGGGSGSAHPIPDSSPLLQFGGQVRQRYLYTDDACQTEAHLEIREDGTVGGAADQSPESLLQLKALKPGVIQILGVKTSRFLCQRPDGALYGSLHFDPEACSFRELLLEDGYNVYQSEAHGLPLHLCGNKSPHRDPAPRGPARFLPLPGLPPAPPEPPGILAPQPPDVGSSDPLSMVGSQGRSPSYAS

SEQ ID NO: 3345 - protein, 474 aa, Artificial Sequence
  Fusion Protein
HGEGTFTSDKSQQLEKELVRLFYEWLKAGGHSSIKPPPKGGGGGGGSGGGGSGGGGSAESKYGPPCPPCPAPEFEGGPSVFLFPPKPKDTLMISRTPEVTCVVVDVSQEDPEVQFNWYVDGVEVHNAKTKPREEQFNSTYRVVSVLTVLHQDWLNGKEYKCKVSNKGLPSSIEKTISKAKGQPREPQVYTLPPSQEEMTKNQVSLTCLVKGFYPSDIAVEWESNGQPENNYKTTPPVLDSDGSFFLYSRLTVDKSRWQEGNVFSCSVMHEALHNHYTQKSLSLSLGGGGSGSAHPIPDSSPLLQFGGQVRQRYLYTDDACQTEAHLEIREDGTVGGAADQSPESLLQLKALKPGVIQILGVKTSRFLCQRPDGALYGSLHFDPEACSFRELLLEDGYNVYQSEAHGLPLHLCGNKSPHRDPAPRGPARFLPLPGLPPAPPEPPGILAPQPPDVGSSDPLSMVYPSQGRSPSYAS

SEQ ID NO: 3346 - protein, 471 aa, Artificial Sequence
  Fusion Protein
HGEGTFTSDKSQQLEKELVRLFYEWLKAGGHSKGKPPPKGGGGGGGSGGGGSGGGGSADKTHTCPPCPAPEAAGGPSVFLFPPKPKDTLMISRTPEVTCVVVDVSHEDPEVKFNWYVDGVEVHNAKTKPREEQYNSTYRVVSVLTVLHQDWLNGKEYKCKVSNKALPAPIEKTISKAKGQPREPQVYTLPPSRDELTKNQVSLTCLVKGFYPSDIAVEWESNGQPENNYKTTPPVLDSDGSFFLYSKLTVDKSRWQQGNVFSCSVMHEALHNHYTQKSLSLSPGGGGSGSAHPIPDSSPLLQFGGQVRQRYLYTDDACQTEAHLEIREDGTVGGAADQSPESLLQLKALKPGVIQILGVKTSRFLCQRPDGALYGSLHFDPEACSFRELLLEDGYNVYQSEAHGLPLHLPGCKSPHRDPAPRGPARFLPLPGLPPAPPEPPGILAPQPPDVGSSDPLSMVGSQGRSPSYAS

SEQ ID NO: 3347 - protein, 472 aa, Artificial Sequence
  Fusion Protein
HGEGTFTSDKSQQLEKELVRLFYEWLKAGGHSKGKPPPKGGGGGGGSGGGGSGGGGSADKTHTCPPCPAPEAAGGPSVFLFPPKPKDTLMISRTPEVTCVVVDVSHEDPEVKFNWYVDGVEVHNAKTKPREEQYNSTYRVVSVLTVLHQDWLNGKEYKCKVSNKALPAPIEKTISKAKGQPREPQVYTLPPSRDELTKNQVSLTCLVKGFYPSDIAVEWESNGQPENNYKTTPPVLDSDGSFFLYSKLTVDKSRWQQGNVFSCSVMHEALHNHYTQKSLSLSPGGGGSGSAHPIPDSSPLLQFGGQVRQRYLYTDDACQTEAHLEIREDGTVGGAADQSPESLLQLKALKPGVIQILGVKTSRFLCQRPDGALYGSLHFDPEACSFRELLLEDGYNVYQSEAHGLPLHLPGCKSPHRDPAPRGPARFLPLPGLPPAPPEPPGILAPQPPDVGSSDPLSMVYPSQGRSPSYAS

SEQ ID NO: 3348 - protein, 471 aa, Artificial Sequence
  Fusion Protein
HGEGTFTSDKSQQLEKELVRLFYEWLKAGGHSKGKPPPKGGGGGGGSGGGGSGGGGSADKTHTCPPCPAPEAAGGPSVFLFPPKPKDTLMISRTPEVTCVVVDVSHEDPEVKFNWYVDGVEVHNAKTKPREEQYNSTYRVVSVLTVLHQDWLNGKEYKCKVSNKALPAPIEKTISKAKGQPREPQVYTLPPSRDELTKNQVSLTCLVKGFYPSDIAVEWESNGQPENNYKTTPPVLDSDGSFFLYSKLTVDKSRWQQGNVFSCSVMHEALHNHYTQKSLSLSPGGGGSGSAHPIPDSSPLLQFGGQVRQRYLYTDDACQTEAHLEIREDGTVGGAADQSPESLLQLKALKPGVIQILGVKTSRFLCQRPDGALYGSLHFDPEACSFRELLLEDGYNVYQSEAHGLPLHLCGNKSPHRDPAPRGPARFLPLPGLPPAPPEPPGILAPQPPDVGSSDPLSMVGSQGRSPSYAS

SEQ ID NO: 3349 - protein, 472 aa, Artificial Sequence
  Fusion Protein
HGEGTFTSDKSQQLEKELVRLFYEWLKAGGHSKGKPPPKGGGGGGGSGGGGSGGGGSADKTHTCPPCPAPEAAGGPSVFLFPPKPKDTLMISRTPEVTCVVVDVSHEDPEVKFNWYVDGVEVHNAKTKPREEQYNSTYRVVSVLTVLHQDWLNGKEYKCKVSNKALPAPIEKTISKAKGQPREPQVYTLPPSRDELTKNQVSLTCLVKGFYPSDIAVEWESNGQPENNYKTTPPVLDSDGSFFLYSKLTVDKSRWQQGNVFSCSVMHEALHNHYTQKSLSLSPGGGGSGSAHPIPDSSPLLQFGGQVRQRYLYTDDACQTEAHLEIREDGTVGGAADQSPESLLQLKALKPGVIQILGVKTSRFLCQRPDGALYGSLHFDPEACSFRELLLEDGYNVYQSEAHGLPLHLCGNKSPHRDPAPRGPARFLPLPGLPPAPPEPPGILAPQPPDVGSSDPLSMVYPSQGRSPSYAS

SEQ ID NO: 3350 - protein, 471 aa, Artificial Sequence
  Fusion Protein
HGEGTFTSDKSQQLEKELVRLFYEWLKAGGHSKGKPPPKGGGGGGGSGGGGSGGGGSADKTHTCPPCPAPELLGGPSVFLFPPKPKDTLMISRTPEVTCVVVDVSHEDPEVKFNWYVDGVEVHNAKTKPREEQYNNASRVVSVLTVLHQDWLNGKEYKCKVSNKALPAPIEKTISKAKGQPREPQVYTLPPSRDELTKNQVSLTCLVKGFYPSDIAVEWESNGQPENNYKTTPPVLDSDGSFFLYSKLTVDKSRWQQGNVFSCSVMHEALHNHYTQKSLSLSPGGGGSGSAHPIPDSSPLLQFGGQVRQRYLYTDDACQTEAHLEIREDGTVGGAADQSPESLLQLKALKPGVIQILGVKTSRFLCQRPDGALYGSLHFDPEACSFRELLLEDGYNVYQSEAHGLPLHLPGCKSPHRDPAPRGPARFLPLPGLPPAPPEPPGILAPQPPDVGSSDPLSMVGSQGRSPSYAS

SEQ ID NO: 3351 - protein, 472 aa, Artificial Sequence
  Fusion Protein
HGEGTFTSDKSQQLEKELVRLFYEWLKAGGHSKGKPPPKGGGGGGGSGGGGSGGGGSADKTHTCPPCPAPELLGGPSVFLFPPKPKDTLMISRTPEVTCVVVDVSHEDPEVKFNWYVDGVEVHNAKTKPREEQYNNASRVVSVLTVLHQDWLNGKEYKCKVSNKALPAPIEKTISKAKGQPREPQVYTLPPSRDELTKNQVSLTCLVKGFYPSDIAVEWESNGQPENNYKTTPPVLDSDGSFFLYSKLTVDKSRWQQGNVFSCSVMHEALHNHYTQKSLSLSPGGGGSGSAHPIPDSSPLLQFGGQVRQRYLYTDDACQTEAHLEIREDGTVGGAADQSPESLLQLKALKPGVIQILGVKTSRFLCQRPDGALYGSLHFDPEACSFRELLLEDGYNVYQSEAHGLPLHLPGCKSPHRDPAPRGPARFLPLPGLPPAPPEPPGILAPQPPDVGSSDPLSMVYPSQGRSPSYAS

SEQ ID NO: 3352 - protein, 471 aa, Artificial Sequence
  Fusion Protein
HGEGTFTSDKSQQLEKELVRLFYEWLKAGGHSKGKPPPKGGGGGGGSGGGGSGGGGSADKTHTCPPCPAPELLGGPSVFLFPPKPKDTLMISRTPEVTCVVVDVSHEDPEVKFNWYVDGVEVHNAKTKPREEQYNNASRVVSVLTVLHQDWLNGKEYKCKVSNKALPAPIEKTISKAKGQPREPQVYTLPPSRDELTKNQVSLTCLVKGFYPSDIAVEWESNGQPENNYKTTPPVLDSDGSFFLYSKLTVDKSRWQQGNVFSCSVMHEALHNHYTQKSLSLSPGGGGSGSAHPIPDSSPLLQFGGQVRQRYLYTDDACQTEAHLEIREDGTVGGAADQSPESLLQLKALKPGVIQILGVKTSRFLCQRPDGALYGSLHFDPEACSFRELLLEDGYNVYQSEAHGLPLHLCGNKSPHRDPAPRGPARFLPLPGLPPAPPEPPGILAPQPPDVGSSDPLSMVGSQGRSPSYAS

SEQ ID NO: 3353 - protein, 472 aa, Artificial Sequence
  Fusion Protein
HGEGTFTSDKSQQLEKELVRLFYEWLKAGGHSKGKPPPKGGGGGGGSGGGGSGGGGSADKTHTCPPCPAPELLGGPSVFLFPPKPKDTLMISRTPEVTCVVVDVSHEDPEVKFNWYVDGVEVHNAKTKPREEQYNNASRVVSVLTVLHQDWLNGKEYKCKVSNKALPAPIEKTISKAKGQPREPQVYTLPPSRDELTKNQVSLTCLVKGFYPSDIAVEWESNGQPENNYKTTPPVLDSDGSFFLYSKLTVDKSRWQQGNVFSCSVMHEALHNHYTQKSLSLSPGGGGSGSAHPIPDSSPLLQFGGQVRQRYLYTDDACQTEAHLEIREDGTVGGAADQSPESLLQLKALKPGVIQILGVKTSRFLCQRPDGALYGSLHFDPEACSFRELLLEDGYNVYQSEAHGLPLHLCGNKSPHRDPAPRGPARFLPLPGLPPAPPEPPGILAPQPPDVGSSDPLSMVYPSQGRSPSYAS

SEQ ID NO: 3354 - protein, 473 aa, Artificial Sequence
  Fusion Protein
HGEGTFTSDKSQQLEKELVRLFYEWLKAGGHSKGKPPPKGGGGGGGSGGGGSGGGGSAESKYGPPCPPCPAPEFEGGPSVFLFPPKPKDTLMISRTPEVTCVVVDVSQEDPEVQFNWYVDGVEVHNAKTKPREEQFNSTYRVVSVLTVLHQDWLNGKEYKCKVSNKGLPSSIEKTISKAKGQPREPQVYTLPPSQEEMTKNQVSLTCLVKGFYPSDIAVEWESNGQPENNYKTTPPVLDSDGSFFLYSRLTVDKSRWQEGNVFSCSVMHEALHNHYTQKSLSLSLGGGGSGSAHPIPDSSPLLQFGGQVRQRYLYTDDACQTEAHLEIREDGTVGGAADQSPESLLQLKALKPGVIQILGVKTSRFLCQRPDGALYGSLHFDPEACSFRELLLEDGYNVYQSEAHGLPLHLPGCKSPHRDPAPRGPARFLPLPGLPPAPPEPPGILAPQPPDVGSSDPLSMVGSQGRSPSYAS

SEQ ID NO: 3355 - protein, 474 aa, Artificial Sequence
  Fusion Protein
HGEGTFTSDKSQQLEKELVRLFYEWLKAGGHSKGKPPPKGGGGGGGSGGGGSGGGGSAESKYGPPCPPCPAPEFEGGPSVFLFPPKPKDTLMISRTPEVTCVVVDVSQEDPEVQFNWYVDGVEVHNAKTKPREEQFNSTYRVVSVLTVLHQDWLNGKEYKCKVSNKGLPSSIEKTISKAKGQPREPQVYTLPPSQEEMTKNQVSLTCLVKGFYPSDIAVEWESNGQPENNYKTTPPVLDSDGSFFLYSRLTVDKSRWQEGNVFSCSVMHEALHNHYTQKSLSLSLGGGGSGSAHPIPDSSPLLQFGGQVRQRYLYTDDACQTEAHLEIREDGTVGGAADQSPESLLQLKALKPGVIQILGVKTSRFLCQRPDGALYGSLHFDPEACSFRELLLEDGYNVYQSEAHGLPLHLPGCKSPHRDPAPRGPARFLPLPGLPPAPPEPPGILAPQPPDVGSSDPLSMVYPSQGRSPSYAS

SEQ ID NO: 3356 - protein, 473 aa, Artificial Sequence
  Fusion Protein
HGEGTFTSDKSQQLEKELVRLFYEWLKAGGHSKGKPPPKGGGGGGGSGGGGSGGGGSAESKYGPPCPPCPAPEFEGGPSVFLFPPKPKDTLMISRTPEVTCVVVDVSQEDPEVQFNWYVDGVEVHNAKTKPREEQFNSTYRVVSVLTVLHQDWLNGKEYKCKVSNKGLPSSIEKTISKAKGQPREPQVYTLPPSQEEMTKNQVSLTCLVKGFYPSDIAVEWESNGQPENNYKTTPPVLDSDGSFFLYSRLTVDKSRWQEGNVFSCSVMHEALHNHYTQKSLSLSLGGGGSGSAHPIPDSSPLLQFGGQVRQRYLYTDDACQTEAHLEIREDGTVGGAADQSPESLLQLKALKPGVIQILGVKTSRFLCQRPDGALYGSLHFDPEACSFRELLLEDGYNVYQSEAHGLPLHLCGNKSPHRDPAPRGPARFLPLPGLPPAPPEPPGILAPQPPDVGSSDPLSMVGSQGRSPSYAS

SEQ ID NO: 3357 - protein, 474 aa, Artificial Sequence
  Fusion Protein
HGEGTFTSDKSQQLEKELVRLFYEWLKAGGHSKGKPPPKGGGGGGGSGGGGSGGGGSAESKYGPPCPPCPAPEFEGGPSVFLFPPKPKDTLMISRTPEVTCVVVDVSQEDPEVQFNWYVDGVEVHNAKTKPREEQFNSTYRVVSVLTVLHQDWLNGKEYKCKVSNKGLPSSIEKTISKAKGQPREPQVYTLPPSQEEMTKNQVSLTCLVKGFYPSDIAVEWESNGQPENNYKTTPPVLDSDGSFFLYSRLTVDKSRWQEGNVFSCSVMHEALHNHYTQKSLSLSLGGGGSGSAHPIPDSSPLLQFGGQVRQRYLYTDDACQTEAHLEIREDGTVGGAADQSPESLLQLKALKPGVIQILGVKTSRFLCQRPDGALYGSLHFDPEACSFRELLLEDGYNVYQSEAHGLPLHLCGNKSPHRDPAPRGPARFLPLPGLPPAPPEPPGILAPQPPDVGSSDPLSMVYPSQGRSPSYAS

SEQ ID NO: 3358 - protein, 471 aa, Artificial Sequence
  Fusion Protein
HGEGTFTSDKSQQLEKELVRLFYEWLIAGGHSKIKPPPKGGGGGGGSGGGGSGGGGSADKTHTCPPCPAPEAAGGPSVFLFPPKPKDTLMISRTPEVTCVVVDVSHEDPEVKFNWYVDGVEVHNAKTKPREEQYNSTYRVVSVLTVLHQDWLNGKEYKCKVSNKALPAPIEKTISKAKGQPREPQVYTLPPSRDELTKNQVSLTCLVKGFYPSDIAVEWESNGQPENNYKTTPPVLDSDGSFFLYSKLTVDKSRWQQGNVFSCSVMHEALHNHYTQKSLSLSPGGGGSGSAHPIPDSSPLLQFGGQVRQRYLYTDDACQTEAHLEIREDGTVGGAADQSPESLLQLKALKPGVIQILGVKTSRFLCQRPDGALYGSLHFDPEACSFRELLLEDGYNVYQSEAHGLPLHLPGCKSPHRDPAPRGPARFLPLPGLPPAPPEPPGILAPQPPDVGSSDPLSMVGSQGRSPSYAS

SEQ ID NO: 3359 - protein, 472 aa, Artificial Sequence
  Fusion Protein
HGEGTFTSDKSQQLEKELVRLFYEWLIAGGHSKIKPPPKGGGGGGGSGGGGSGGGGSADKTHTCPPCPAPEAAGGPSVFLFPPKPKDTLMISRTPEVTCVVVDVSHEDPEVKFNWYVDGVEVHNAKTKPREEQYNSTYRVVSVLTVLHQDWLNGKEYKCKVSNKALPAPIEKTISKAKGQPREPQVYTLPPSRDELTKNQVSLTCLVKGFYPSDIAVEWESNGQPENNYKTTPPVLDSDGSFFLYSKLTVDKSRWQQGNVFSCSVMHEALHNHYTQKSLSLSPGGGGSGSAHPIPDSSPLLQFGGQVRQRYLYTDDACQTEAHLEIREDGTVGGAADQSPESLLQLKALKPGVIQILGVKTSRFLCQRPDGALYGSLHFDPEACSFRELLLEDGYNVYQSEAHGLPLHLPGCKSPHRDPAPRGPARFLPLPGLPPAPPEPPGILAPQPPDVGSSDPLSMVYPSQGRSPSYAS

SEQ ID NO: 3360 - protein, 471 aa, Artificial Sequence
  Fusion Protein
HGEGTFTSDKSQQLEKELVRLFYEWLIAGGHSKIKPPPKGGGGGGGSGGGGSGGGGSADKTHTCPPCPAPEAAGGPSVFLFPPKPKDTLMISRTPEVTCVVVDVSHEDPEVKFNWYVDGVEVHNAKTKPREEQYNSTYRVVSVLTVLHQDWLNGKEYKCKVSNKALPAPIEKTISKAKGQPREPQVYTLPPSRDELTKNQVSLTCLVKGFYPSDIAVEWESNGQPENNYKTTPPVLDSDGSFFLYSKLTVDKSRWQQGNVFSCSVMHEALHNHYTQKSLSLSPGGGGSGSAHPIPDSSPLLQFGGQVRQRYLYTDDACQTEAHLEIREDGTVGGAADQSPESLLQLKALKPGVIQILGVKTSRFLCQRPDGALYGSLHFDPEACSFRELLLEDGYNVYQSEAHGLPLHLCGNKSPHRDPAPRGPARFLPLPGLPPAPPEPPGILAPQPPDVGSSDPLSMVGSQGRSPSYAS

SEQ ID NO: 3361 - protein, 472 aa, Artificial Sequence
  Fusion Protein
HGEGTFTSDKSQQLEKELVRLFYEWLIAGGHSKIKPPPKGGGGGGGSGGGGSGGGGSADKTHTCPPCPAPEAAGGPSVFLFPPKPKDTLMISRTPEVTCVVVDVSHEDPEVKFNWYVDGVEVHNAKTKPREEQYNSTYRVVSVLTVLHQDWLNGKEYKCKVSNKALPAPIEKTISKAKGQPREPQVYTLPPSRDELTKNQVSLTCLVKGFYPSDIAVEWESNGQPENNYKTTPPVLDSDGSFFLYSKLTVDKSRWQQGNVFSCSVMHEALHNHYTQKSLSLSPGGGGSGSAHPIPDSSPLLQFGGQVRQRYLYTDDACQTEAHLEIREDGTVGGAADQSPESLLQLKALKPGVIQILGVKTSRFLCQRPDGALYGSLHFDPEACSFRELLLEDGYNVYQSEAHGLPLHLCGNKSPHRDPAPRGPARFLPLPGLPPAPPEPPGILAPQPPDVGSSDPLSMVYPSQGRSPSYAS

SEQ ID NO: 3362 - protein, 471 aa, Artificial Sequence
  Fusion Protein
HGEGTFTSDKSQQLEKELVRLFYEWLIAGGHSKIKPPPKGGGGGGGSGGGGSGGGGSADKTHTCPPCPAPELLGGPSVFLFPPKPKDTLMISRTPEVTCVVVDVSHEDPEVKFNWYVDGVEVHNAKTKPREEQYNNASRVVSVLTVLHQDWLNGKEYKCKVSNKALPAPIEKTISKAKGQPREPQVYTLPPSRDELTKNQVSLTCLVKGFYPSDIAVEWESNGQPENNYKTTPPVLDSDGSFFLYSKLTVDKSRWQQGNVFSCSVMHEALHNHYTQKSLSLSPGGGGSGSAHPIPDSSPLLQFGGQVRQRYLYTDDACQTEAHLEIREDGTVGGAADQSPESLLQLKALKPGVIQILGVKTSRFLCQRPDGALYGSLHFDPEACSFRELLLEDGYNVYQSEAHGLPLHLPGCKSPHRDPAPRGPARFLPLPGLPPAPPEPPGILAPQPPDVGSSDPLSMVGSQGRSPSYAS

SEQ ID NO: 3363 - protein, 472 aa, Artificial Sequence
  Fusion Protein
HGEGTFTSDKSQQLEKELVRLFYEWLIAGGHSKIKPPPKGGGGGGGSGGGGSGGGGSADKTHTCPPCPAPELLGGPSVFLFPPKPKDTLMISRTPEVTCVVVDVSHEDPEVKFNWYVDGVEVHNAKTKPREEQYNNASRVVSVLTVLHQDWLNGKEYKCKVSNKALPAPIEKTISKAKGQPREPQVYTLPPSRDELTKNQVSLTCLVKGFYPSDIAVEWESNGQPENNYKTTPPVLDSDGSFFLYSKLTVDKSRWQQGNVFSCSVMHEALHNHYTQKSLSLSPGGGGSGSAHPIPDSSPLLQFGGQVRQRYLYTDDACQTEAHLEIREDGTVGGAADQSPESLLQLKALKPGVIQILGVKTSRFLCQRPDGALYGSLHFDPEACSFRELLLEDGYNVYQSEAHGLPLHLPGCKSPHRDPAPRGPARFLPLPGLPPAPPEPPGILAPQPPDVGSSDPLSMVYPSQGRSPSYAS

SEQ ID NO: 3364 - protein, 471 aa, Artificial Sequence
  Fusion Protein
HGEGTFTSDKSQQLEKELVRLFYEWLIAGGHSKIKPPPKGGGGGGGSGGGGSGGGGSADKTHTCPPCPAPELLGGPSVFLFPPKPKDTLMISRTPEVTCVVVDVSHEDPEVKFNWYVDGVEVHNAKTKPREEQYNNASRVVSVLTVLHQDWLNGKEYKCKVSNKALPAPIEKTISKAKGQPREPQVYTLPPSRDELTKNQVSLTCLVKGFYPSDIAVEWESNGQPENNYKTTPPVLDSDGSFFLYSKLTVDKSRWQQGNVFSCSVMHEALHNHYTQKSLSLSPGGGGSGSAHPIPDSSPLLQFGGQVRQRYLYTDDACQTEAHLEIREDGTVGGAADQSPESLLQLKALKPGVIQILGVKTSRFLCQRPDGALYGSLHFDPEACSFRELLLEDGYNVYQSEAHGLPLHLCGNKSPHRDPAPRGPARFLPLPGLPPAPPEPPGILAPQPPDVGSSDPLSMVGSQGRSPSYAS

SEQ ID NO: 3365 - protein, 472 aa, Artificial Sequence
  Fusion Protein
HGEGTFTSDKSQQLEKELVRLFYEWLIAGGHSKIKPPPKGGGGGGGSGGGGSGGGGSADKTHTCPPCPAPELLGGPSVFLFPPKPKDTLMISRTPEVTCVVVDVSHEDPEVKFNWYVDGVEVHNAKTKPREEQYNNASRVVSVLTVLHQDWLNGKEYKCKVSNKALPAPIEKTISKAKGQPREPQVYTLPPSRDELTKNQVSLTCLVKGFYPSDIAVEWESNGQPENNYKTTPPVLDSDGSFFLYSKLTVDKSRWQQGNVFSCSVMHEALHNHYTQKSLSLSPGGGGSGSAHPIPDSSPLLQFGGQVRQRYLYTDDACQTEAHLEIREDGTVGGAADQSPESLLQLKALKPGVIQILGVKTSRFLCQRPDGALYGSLHFDPEACSFRELLLEDGYNVYQSEAHGLPLHLCGNKSPHRDPAPRGPARFLPLPGLPPAPPEPPGILAPQPPDVGSSDPLSMVYPSQGRSPSYAS

SEQ ID NO: 3366 - protein, 473 aa, Artificial Sequence
  Fusion Protein
HGEGTFTSDKSQQLEKELVRLFYEWLIAGGHSKIKPPPKGGGGGGGSGGGGSGGGGSAESKYGPPCPPCPAPEFEGGPSVFLFPPKPKDTLMISRTPEVTCVVVDVSQEDPEVQFNWYVDGVEVHNAKTKPREEQFNSTYRVVSVLTVLHQDWLNGKEYKCKVSNKGLPSSIEKTISKAKGQPREPQVYTLPPSQEEMTKNQVSLTCLVKGFYPSDIAVEWESNGQPENNYKTTPPVLDSDGSFFLYSRLTVDKSRWQEGNVFSCSVMHEALHNHYTQKSLSLSLGGGGSGSAHPIPDSSPLLQFGGQVRQRYLYTDDACQTEAHLEIREDGTVGGAADQSPESLLQLKALKPGVIQILGVKTSRFLCQRPDGALYGSLHFDPEACSFRELLLEDGYNVYQSEAHGLPLHLPGCKSPHRDPAPRGPARFLPLPGLPPAPPEPPGILAPQPPDVGSSDPLSMVGSQGRSPSYAS

SEQ ID NO: 3367 - protein, 474 aa, Artificial Sequence
  Fusion Protein
HGEGTFTSDKSQQLEKELVRLFYEWLIAGGHSKIKPPPKGGGGGGGSGGGGSGGGGSAESKYGPPCPPCPAPEFEGGPSVFLFPPKPKDTLMISRTPEVTCVVVDVSQEDPEVQFNWYVDGVEVHNAKTKPREEQFNSTYRVVSVLTVLHQDWLNGKEYKCKVSNKGLPSSIEKTISKAKGQPREPQVYTLPPSQEEMTKNQVSLTCLVKGFYPSDIAVEWESNGQPENNYKTTPPVLDSDGSFFLYSRLTVDKSRWQEGNVFSCSVMHEALHNHYTQKSLSLSLGGGGSGSAHPIPDSSPLLQFGGQVRQRYLYTDDACQTEAHLEIREDGTVGGAADQSPESLLQLKALKPGVIQILGVKTSRFLCQRPDGALYGSLHFDPEACSFRELLLEDGYNVYQSEAHGLPLHLPGCKSPHRDPAPRGPARFLPLPGLPPAPPEPPGILAPQPPDVGSSDPLSMVYPSQGRSPSYAS

SEQ ID NO: 3368 - protein, 473 aa, Artificial Sequence
  Fusion Protein
HGEGTFTSDKSQQLEKELVRLFYEWLIAGGHSKIKPPPKGGGGGGGSGGGGSGGGGSAESKYGPPCPPCPAPEFEGGPSVFLFPPKPKDTLMISRTPEVTCVVVDVSQEDPEVQFNWYVDGVEVHNAKTKPREEQFNSTYRVVSVLTVLHQDWLNGKEYKCKVSNKGLPSSIEKTISKAKGQPREPQVYTLPPSQEEMTKNQVSLTCLVKGFYPSDIAVEWESNGQPENNYKTTPPVLDSDGSFFLYSRLTVDKSRWQEGNVFSCSVMHEALHNHYTQKSLSLSLGGGGSGSAHPIPDSSPLLQFGGQVRQRYLYTDDACQTEAHLEIREDGTVGGAADQSPESLLQLKALKPGVIQILGVKTSRFLCQRPDGALYGSLHFDPEACSFRELLLEDGYNVYQSEAHGLPLHLCGNKSPHRDPAPRGPARFLPLPGLPPAPPEPPGILAPQPPDVGSSDPLSMVGSQGRSPSYAS

SEQ ID NO: 3369 - protein, 474 aa, Artificial Sequence
  Fusion Protein
HGEGTFTSDKSQQLEKELVRLFYEWLIAGGHSKIKPPPKGGGGGGGSGGGGSGGGGSAESKYGPPCPPCPAPEFEGGPSVFLFPPKPKDTLMISRTPEVTCVVVDVSQEDPEVQFNWYVDGVEVHNAKTKPREEQFNSTYRVVSVLTVLHQDWLNGKEYKCKVSNKGLPSSIEKTISKAKGQPREPQVYTLPPSQEEMTKNQVSLTCLVKGFYPSDIAVEWESNGQPENNYKTTPPVLDSDGSFFLYSRLTVDKSRWQEGNVFSCSVMHEALHNHYTQKSLSLSLGGGGSGSAHPIPDSSPLLQFGGQVRQRYLYTDDACQTEAHLEIREDGTVGGAADQSPESLLQLKALKPGVIQILGVKTSRFLCQRPDGALYGSLHFDPEACSFRELLLEDGYNVYQSEAHGLPLHLCGNKSPHRDPAPRGPARFLPLPGLPPAPPEPPGILAPQPPDVGSSDPLSMVYPSQGRSPSYAS

SEQ ID NO: 3370 - protein, 471 aa, Artificial Sequence
  Fusion Protein
HGEGTFTSDKSQQLEKELVRLFFEWLIAGGHSSIKPPPKGGGGGGGSGGGGSGGGGSADKTHTCPPCPAPEAAGGPSVFLFPPKPKDTLMISRTPEVTCVVVDVSHEDPEVKFNWYVDGVEVHNAKTKPREEQYNSTYRVVSVLTVLHQDWLNGKEYKCKVSNKALPAPIEKTISKAKGQPREPQVYTLPPSRDELTKNQVSLTCLVKGFYPSDIAVEWESNGQPENNYKTTPPVLDSDGSFFLYSKLTVDKSRWQQGNVFSCSVMHEALHNHYTQKSLSLSPGGGGSGSAHPIPDSSPLLQFGGQVRQRYLYTDDACQTEAHLEIREDGTVGGAADQSPESLLQLKALKPGVIQILGVKTSRFLCQRPDGALYGSLHFDPEACSFRELLLEDGYNVYQSEAHGLPLHLPGCKSPHRDPAPRGPARFLPLPGLPPAPPEPPGILAPQPPDVGSSDPLSMVGSQGRSPSYAS

SEQ ID NO: 3371 - protein, 472 aa, Artificial Sequence
  Fusion Protein
HGEGTFTSDKSQQLEKELVRLFFEWLIAGGHSSIKPPPKGGGGGGGSGGGGSGGGGSADKTHTCPPCPAPEAAGGPSVFLFPPKPKDTLMISRTPEVTCVVVDVSHEDPEVKFNWYVDGVEVHNAKTKPREEQYNSTYRVVSVLTVLHQDWLNGKEYKCKVSNKALPAPIEKTISKAKGQPREPQVYTLPPSRDELTKNQVSLTCLVKGFYPSDIAVEWESNGQPENNYKTTPPVLDSDGSFFLYSKLTVDKSRWQQGNVFSCSVMHEALHNHYTQKSLSLSPGGGGSGSAHPIPDSSPLLQFGGQVRQRYLYTDDACQTEAHLEIREDGTVGGAADQSPESLLQLKALKPGVIQILGVKTSRFLCQRPDGALYGSLHFDPEACSFRELLLEDGYNVYQSEAHGLPLHLPGCKSPHRDPAPRGPARFLPLPGLPPAPPEPPGILAPQPPDVGSSDPLSMVYPSQGRSPSYAS

SEQ ID NO: 3372 - protein, 471 aa, Artificial Sequence
  Fusion Protein
HGEGTFTSDKSQQLEKELVRLFFEWLIAGGHSSIKPPPKGGGGGGGSGGGGSGGGGSADKTHTCPPCPAPEAAGGPSVFLFPPKPKDTLMISRTPEVTCVVVDVSHEDPEVKFNWYVDGVEVHNAKTKPREEQYNSTYRVVSVLTVLHQDWLNGKEYKCKVSNKALPAPIEKTISKAKGQPREPQVYTLPPSRDELTKNQVSLTCLVKGFYPSDIAVEWESNGQPENNYKTTPPVLDSDGSFFLYSKLTVDKSRWQQGNVFSCSVMHEALHNHYTQKSLSLSPGGGGSGSAHPIPDSSPLLQFGGQVRQRYLYTDDACQTEAHLEIREDGTVGGAADQSPESLLQLKALKPGVIQILGVKTSRFLCQRPDGALYGSLHFDPEACSFRELLLEDGYNVYQSEAHGLPLHLCGNKSPHRDPAPRGPARFLPLPGLPPAPPEPPGILAPQPPDVGSSDPLSMVGSQGRSPSYAS

SEQ ID NO: 3373 - protein, 472 aa, Artificial Sequence
  Fusion Protein
HGEGTFTSDKSQQLEKELVRLFFEWLIAGGHSSIKPPPKGGGGGGGSGGGGSGGGGSADKTHTCPPCPAPEAAGGPSVFLFPPKPKDTLMISRTPEVTCVVVDVSHEDPEVKFNWYVDGVEVHNAKTKPREEQYNSTYRVVSVLTVLHQDWLNGKEYKCKVSNKALPAPIEKTISKAKGQPREPQVYTLPPSRDELTKNQVSLTCLVKGFYPSDIAVEWESNGQPENNYKTTPPVLDSDGSFFLYSKLTVDKSRWQQGNVFSCSVMHEALHNHYTQKSLSLSPGGGGSGSAHPIPDSSPLLQFGGQVRQRYLYTDDACQTEAHLEIREDGTVGGAADQSPESLLQLKALKPGVIQILGVKTSRFLCQRPDGALYGSLHFDPEACSFRELLLEDGYNVYQSEAHGLPLHLCGNKSPHRDPAPRGPARFLPLPGLPPAPPEPPGILAPQPPDVGSSDPLSMVYPSQGRSPSYAS

SEQ ID NO: 3374 - protein, 471 aa, Artificial Sequence
  Fusion Protein
HGEGTFTSDKSQQLEKELVRLFFEWLIAGGHSSIKPPPKGGGGGGGSGGGGSGGGGSADKTHTCPPCPAPELLGGPSVFLFPPKPKDTLMISRTPEVTCVVVDVSHEDPEVKFNWYVDGVEVHNAKTKPREEQYNNASRVVSVLTVLHQDWLNGKEYKCKVSNKALPAPIEKTISKAKGQPREPQVYTLPPSRDELTKNQVSLTCLVKGFYPSDIAVEWESNGQPENNYKTTPPVLDSDGSFFLYSKLTVDKSRWQQGNVFSCSVMHEALHNHYTQKSLSLSPGGGGSGSAHPIPDSSPLLQFGGQVRQRYLYTDDACQTEAHLEIREDGTVGGAADQSPESLLQLKALKPGVIQILGVKTSRFLCQRPDGALYGSLHFDPEACSFRELLLEDGYNVYQSEAHGLPLHLPGCKSPHRDPAPRGPARFLPLPGLPPAPPEPPGILAPQPPDVGSSDPLSMVGSQGRSPSYAS

SEQ ID NO: 3375 - protein, 472 aa, Artificial Sequence
  Fusion Protein
HGEGTFTSDKSQQLEKELVRLFFEWLIAGGHSSIKPPPKGGGGGGGSGGGGSGGGGSADKTHTCPPCPAPELLGGPSVFLFPPKPKDTLMISRTPEVTCVVVDVSHEDPEVKFNWYVDGVEVHNAKTKPREEQYNNASRVVSVLTVLHQDWLNGKEYKCKVSNKALPAPIEKTISKAKGQPREPQVYTLPPSRDELTKNQVSLTCLVKGFYPSDIAVEWESNGQPENNYKTTPPVLDSDGSFFLYSKLTVDKSRWQQGNVFSCSVMHEALHNHYTQKSLSLSPGGGGSGSAHPIPDSSPLLQFGGQVRQRYLYTDDACQTEAHLEIREDGTVGGAADQSPESLLQLKALKPGVIQILGVKTSRFLCQRPDGALYGSLHFDPEACSFRELLLEDGYNVYQSEAHGLPLHLPGCKSPHRDPAPRGPARFLPLPGLPPAPPEPPGILAPQPPDVGSSDPLSMVYPSQGRSPSYAS

SEQ ID NO: 3376 - protein, 471 aa, Artificial Sequence
  Fusion Protein
HGEGTFTSDKSQQLEKELVRLFFEWLIAGGHSSIKPPPKGGGGGGGSGGGGSGGGGSADKTHTCPPCPAPELLGGPSVFLFPPKPKDTLMISRTPEVTCVVVDVSHEDPEVKFNWYVDGVEVHNAKTKPREEQYNNASRVVSVLTVLHQDWLNGKEYKCKVSNKALPAPIEKTISKAKGQPREPQVYTLPPSRDELTKNQVSLTCLVKGFYPSDIAVEWESNGQPENNYKTTPPVLDSDGSFFLYSKLTVDKSRWQQGNVFSCSVMHEALHNHYTQKSLSLSPGGGGSGSAHPIPDSSPLLQFGGQVRQRYLYTDDACQTEAHLEIREDGTVGGAADQSPESLLQLKALKPGVIQILGVKTSRFLCQRPDGALYGSLHFDPEACSFRELLLEDGYNVYQSEAHGLPLHLCGNKSPHRDPAPRGPARFLPLPGLPPAPPEPPGILAPQPPDVGSSDPLSMVGSQGRSPSYAS

SEQ ID NO: 3377 - protein, 472 aa, Artificial Sequence
  Fusion Protein
HGEGTFTSDKSQQLEKELVRLFFEWLIAGGHSSIKPPPKGGGGGGGSGGGGSGGGGSADKTHTCPPCPAPELLGGPSVFLFPPKPKDTLMISRTPEVTCVVVDVSHEDPEVKFNWYVDGVEVHNAKTKPREEQYNNASRVVSVLTVLHQDWLNGKEYKCKVSNKALPAPIEKTISKAKGQPREPQVYTLPPSRDELTKNQVSLTCLVKGFYPSDIAVEWESNGQPENNYKTTPPVLDSDGSFFLYSKLTVDKSRWQQGNVFSCSVMHEALHNHYTQKSLSLSPGGGGSGSAHPIPDSSPLLQFGGQVRQRYLYTDDACQTEAHLEIREDGTVGGAADQSPESLLQLKALKPGVIQILGVKTSRFLCQRPDGALYGSLHFDPEACSFRELLLEDGYNVYQSEAHGLPLHLCGNKSPHRDPAPRGPARFLPLPGLPPAPPEPPGILAPQPPDVGSSDPLSMVYPSQGRSPSYAS

SEQ ID NO: 3378 - protein, 473 aa, Artificial Sequence
  Fusion Protein
HGEGTFTSDKSQQLEKELVRLFFEWLIAGGHSSIKPPPKGGGGGGGSGGGGSGGGGSAESKYGPPCPPCPAPEFEGGPSVFLFPPKPKDTLMISRTPEVTCVVVDVSQEDPEVQFNWYVDGVEVHNAKTKPREEQFNSTYRVVSVLTVLHQDWLNGKEYKCKVSNKGLPSSIEKTISKAKGQPREPQVYTLPPSQEEMTKNQVSLTCLVKGFYPSDIAVEWESNGQPENNYKTTPPVLDSDGSFFLYSRLTVDKSRWQEGNVFSCSVMHEALHNHYTQKSLSLSLGGGGSGSAHPIPDSSPLLQFGGQVRQRYLYTDDACQTEAHLEIREDGTVGGAADQSPESLLQLKALKPGVIQILGVKTSRFLCQRPDGALYGSLHFDPEACSFRELLLEDGYNVYQSEAHGLPLHLPGCKSPHRDPAPRGPARFLPLPGLPPAPPEPPGILAPQPPDVGSSDPLSMVGSQGRSPSYAS

SEQ ID NO: 3379 - protein, 474 aa, Artificial Sequence
  Fusion Protein
HGEGTFTSDKSQQLEKELVRLFFEWLIAGGHSSIKPPPKGGGGGGGSGGGGSGGGGSAESKYGPPCPPCPAPEFEGGPSVFLFPPKPKDTLMISRTPEVTCVVVDVSQEDPEVQFNWYVDGVEVHNAKTKPREEQFNSTYRVVSVLTVLHQDWLNGKEYKCKVSNKGLPSSIEKTISKAKGQPREPQVYTLPPSQEEMTKNQVSLTCLVKGFYPSDIAVEWESNGQPENNYKTTPPVLDSDGSFFLYSRLTVDKSRWQEGNVFSCSVMHEALHNHYTQKSLSLSLGGGGSGSAHPIPDSSPLLQFGGQVRQRYLYTDDACQTEAHLEIREDGTVGGAADQSPESLLQLKALKPGVIQILGVKTSRFLCQRPDGALYGSLHFDPEACSFRELLLEDGYNVYQSEAHGLPLHLPGCKSPHRDPAPRGPARFLPLPGLPPAPPEPPGILAPQPPDVGSSDPLSMVYPSQGRSPSYAS

SEQ ID NO: 3380 - protein, 473 aa, Artificial Sequence
  Fusion Protein
HGEGTFTSDKSQQLEKELVRLFFEWLIAGGHSSIKPPPKGGGGGGGSGGGGSGGGGSAESKYGPPCPPCPAPEFEGGPSVFLFPPKPKDTLMISRTPEVTCVVVDVSQEDPEVQFNWYVDGVEVHNAKTKPREEQFNSTYRVVSVLTVLHQDWLNGKEYKCKVSNKGLPSSIEKTISKAKGQPREPQVYTLPPSQEEMTKNQVSLTCLVKGFYPSDIAVEWESNGQPENNYKTTPPVLDSDGSFFLYSRLTVDKSRWQEGNVFSCSVMHEALHNHYTQKSLSLSLGGGGSGSAHPIPDSSPLLQFGGQVRQRYLYTDDACQTEAHLEIREDGTVGGAADQSPESLLQLKALKPGVIQILGVKTSRFLCQRPDGALYGSLHFDPEACSFRELLLEDGYNVYQSEAHGLPLHLCGNKSPHRDPAPRGPARFLPLPGLPPAPPEPPGILAPQPPDVGSSDPLSMVGSQGRSPSYAS

SEQ ID NO: 3381 - protein, 474 aa, Artificial Sequence
  Fusion Protein
HGEGTFTSDKSQQLEKELVRLFFEWLIAGGHSSIKPPPKGGGGGGGSGGGGSGGGGSAESKYGPPCPPCPAPEFEGGPSVFLFPPKPKDTLMISRTPEVTCVVVDVSQEDPEVQFNWYVDGVEVHNAKTKPREEQFNSTYRVVSVLTVLHQDWLNGKEYKCKVSNKGLPSSIEKTISKAKGQPREPQVYTLPPSQEEMTKNQVSLTCLVKGFYPSDIAVEWESNGQPENNYKTTPPVLDSDGSFFLYSRLTVDKSRWQEGNVFSCSVMHEALHNHYTQKSLSLSLGGGGSGSAHPIPDSSPLLQFGGQVRQRYLYTDDACQTEAHLEIREDGTVGGAADQSPESLLQLKALKPGVIQILGVKTSRFLCQRPDGALYGSLHFDPEACSFRELLLEDGYNVYQSEAHGLPLHLCGNKSPHRDPAPRGPARFLPLPGLPPAPPEPPGILAPQPPDVGSSDPLSMVYPSQGRSPSYAS

SEQ ID NO: 3382 - protein, 471 aa, Artificial Sequence
  Fusion Protein
HGEGTFTSDKSQQLEKELVRLFFEWLIAGGHSKGKPPPKGGGGGGGSGGGGSGGGGSADKTHTCPPCPAPEAAGGPSVFLFPPKPKDTLMISRTPEVTCVVVDVSHEDPEVKFNWYVDGVEVHNAKTKPREEQYNSTYRVVSVLTVLHQDWLNGKEYKCKVSNKALPAPIEKTISKAKGQPREPQVYTLPPSRDELTKNQVSLTCLVKGFYPSDIAVEWESNGQPENNYKTTPPVLDSDGSFFLYSKLTVDKSRWQQGNVFSCSVMHEALHNHYTQKSLSLSPGGGGSGSAHPIPDSSPLLQFGGQVRQRYLYTDDACQTEAHLEIREDGTVGGAADQSPESLLQLKALKPGVIQILGVKTSRFLCQRPDGALYGSLHFDPEACSFRELLLEDGYNVYQSEAHGLPLHLPGCKSPHRDPAPRGPARFLPLPGLPPAPPEPPGILAPQPPDVGSSDPLSMVGSQGRSPSYAS

SEQ ID NO: 3383 - protein, 472 aa, Artificial Sequence
  Fusion Protein
HGEGTFTSDKSQQLEKELVRLFFEWLIAGGHSKGKPPPKGGGGGGGSGGGGSGGGGSADKTHTCPPCPAPEAAGGPSVFLFPPKPKDTLMISRTPEVTCVVVDVSHEDPEVKFNWYVDGVEVHNAKTKPREEQYNSTYRVVSVLTVLHQDWLNGKEYKCKVSNKALPAPIEKTISKAKGQPREPQVYTLPPSRDELTKNQVSLTCLVKGFYPSDIAVEWESNGQPENNYKTTPPVLDSDGSFFLYSKLTVDKSRWQQGNVFSCSVMHEALHNHYTQKSLSLSPGGGGSGSAHPIPDSSPLLQFGGQVRQRYLYTDDACQTEAHLEIREDGTVGGAADQSPESLLQLKALKPGVIQILGVKTSRFLCQRPDGALYGSLHFDPEACSFRELLLEDGYNVYQSEAHGLPLHLPGCKSPHRDPAPRGPARFLPLPGLPPAPPEPPGILAPQPPDVGSSDPLSMVYPSQGRSPSYAS

SEQ ID NO: 3384 - protein, 471 aa, Artificial Sequence
  Fusion Protein
HGEGTFTSDKSQQLEKELVRLFFEWLIAGGHSKGKPPPKGGGGGGGSGGGGSGGGGSADKTHTCPPCPAPEAAGGPSVFLFPPKPKDTLMISRTPEVTCVVVDVSHEDPEVKFNWYVDGVEVHNAKTKPREEQYNSTYRVVSVLTVLHQDWLNGKEYKCKVSNKALPAPIEKTISKAKGQPREPQVYTLPPSRDELTKNQVSLTCLVKGFYPSDIAVEWESNGQPENNYKTTPPVLDSDGSFFLYSKLTVDKSRWQQGNVFSCSVMHEALHNHYTQKSLSLSPGGGGSGSAHPIPDSSPLLQFGGQVRQRYLYTDDACQTEAHLEIREDGTVGGAADQSPESLLQLKALKPGVIQILGVKTSRFLCQRPDGALYGSLHFDPEACSFRELLLEDGYNVYQSEAHGLPLHLCGNKSPHRDPAPRGPARFLPLPGLPPAPPEPPGILAPQPPDVGSSDPLSMVGSQGRSPSYAS

SEQ ID NO: 3385 - protein, 472 aa, Artificial Sequence
  Fusion Protein
HGEGTFTSDKSQQLEKELVRLFFEWLIAGGHSKGKPPPKGGGGGGGSGGGGSGGGGSADKTHTCPPCPAPEAAGGPSVFLFPPKPKDTLMISRTPEVTCVVVDVSHEDPEVKFNWYVDGVEVHNAKTKPREEQYNSTYRVVSVLTVLHQDWLNGKEYKCKVSNKALPAPIEKTISKAKGQPREPQVYTLPPSRDELTKNQVSLTCLVKGFYPSDIAVEWESNGQPENNYKTTPPVLDSDGSFFLYSKLTVDKSRWQQGNVFSCSVMHEALHNHYTQKSLSLSPGGGGSGSAHPIPDSSPLLQFGGQVRQRYLYTDDACQTEAHLEIREDGTVGGAADQSPESLLQLKALKPGVIQILGVKTSRFLCQRPDGALYGSLHFDPEACSFRELLLEDGYNVYQSEAHGLPLHLCGNKSPHRDPAPRGPARFLPLPGLPPAPPEPPGILAPQPPDVGSSDPLSMVYPSQGRSPSYAS

SEQ ID NO: 3386 - protein, 471 aa, Artificial Sequence
  Fusion Protein
HGEGTFTSDKSQQLEKELVRLFFEWLIAGGHSKGKPPPKGGGGGGGSGGGGSGGGGSADKTHTCPPCPAPELLGGPSVFLFPPKPKDTLMISRTPEVTCVVVDVSHEDPEVKFNWYVDGVEVHNAKTKPREEQYNNASRVVSVLTVLHQDWLNGKEYKCKVSNKALPAPIEKTISKAKGQPREPQVYTLPPSRDELTKNQVSLTCLVKGFYPSDIAVEWESNGQPENNYKTTPPVLDSDGSFFLYSKLTVDKSRWQQGNVFSCSVMHEALHNHYTQKSLSLSPGGGGSGSAHPIPDSSPLLQFGGQVRQRYLYTDDACQTEAHLEIREDGTVGGAADQSPESLLQLKALKPGVIQILGVKTSRFLCQRPDGALYGSLHFDPEACSFRELLLEDGYNVYQSEAHGLPLHLPGCKSPHRDPAPRGPARFLPLPGLPPAPPEPPGILAPQPPDVGSSDPLSMVGSQGRSPSYAS

SEQ ID NO: 3387 - protein, 472 aa, Artificial Sequence
  Fusion Protein
HGEGTFTSDKSQQLEKELVRLFFEWLIAGGHSKGKPPPKGGGGGGGSGGGGSGGGGSADKTHTCPPCPAPELLGGPSVFLFPPKPKDTLMISRTPEVTCVVVDVSHEDPEVKFNWYVDGVEVHNAKTKPREEQYNNASRVVSVLTVLHQDWLNGKEYKCKVSNKALPAPIEKTISKAKGQPREPQVYTLPPSRDELTKNQVSLTCLVKGFYPSDIAVEWESNGQPENNYKTTPPVLDSDGSFFLYSKLTVDKSRWQQGNVFSCSVMHEALHNHYTQKSLSLSPGGGGSGSAHPIPDSSPLLQFGGQVRQRYLYTDDACQTEAHLEIREDGTVGGAADQSPESLLQLKALKPGVIQILGVKTSRFLCQRPDGALYGSLHFDPEACSFRELLLEDGYNVYQSEAHGLPLHLPGCKSPHRDPAPRGPARFLPLPGLPPAPPEPPGILAPQPPDVGSSDPLSMVYPSQGRSPSYAS

SEQ ID NO: 3388 - protein, 471 aa, Artificial Sequence
  Fusion Protein
HGEGTFTSDKSQQLEKELVRLFFEWLIAGGHSKGKPPPKGGGGGGGSGGGGSGGGGSADKTHTCPPCPAPELLGGPSVFLFPPKPKDTLMISRTPEVTCVVVDVSHEDPEVKFNWYVDGVEVHNAKTKPREEQYNNASRVVSVLTVLHQDWLNGKEYKCKVSNKALPAPIEKTISKAKGQPREPQVYTLPPSRDELTKNQVSLTCLVKGFYPSDIAVEWESNGQPENNYKTTPPVLDSDGSFFLYSKLTVDKSRWQQGNVFSCSVMHEALHNHYTQKSLSLSPGGGGSGSAHPIPDSSPLLQFGGQVRQRYLYTDDACQTEAHLEIREDGTVGGAADQSPESLLQLKALKPGVIQILGVKTSRFLCQRPDGALYGSLHFDPEACSFRELLLEDGYNVYQSEAHGLPLHLCGNKSPHRDPAPRGPARFLPLPGLPPAPPEPPGILAPQPPDVGSSDPLSMVGSQGRSPSYAS

SEQ ID NO: 3389 - protein, 472 aa, Artificial Sequence
  Fusion Protein
HGEGTFTSDKSQQLEKELVRLFFEWLIAGGHSKGKPPPKGGGGGGGSGGGGSGGGGSADKTHTCPPCPAPELLGGPSVFLFPPKPKDTLMISRTPEVTCVVVDVSHEDPEVKFNWYVDGVEVHNAKTKPREEQYNNASRVVSVLTVLHQDWLNGKEYKCKVSNKALPAPIEKTISKAKGQPREPQVYTLPPSRDELTKNQVSLTCLVKGFYPSDIAVEWESNGQPENNYKTTPPVLDSDGSFFLYSKLTVDKSRWQQGNVFSCSVMHEALHNHYTQKSLSLSPGGGGSGSAHPIPDSSPLLQFGGQVRQRYLYTDDACQTEAHLEIREDGTVGGAADQSPESLLQLKALKPGVIQILGVKTSRFLCQRPDGALYGSLHFDPEACSFRELLLEDGYNVYQSEAHGLPLHLCGNKSPHRDPAPRGPARFLPLPGLPPAPPEPPGILAPQPPDVGSSDPLSMVYPSQGRSPSYAS

SEQ ID NO: 3390 - protein, 473 aa, Artificial Sequence
  Fusion Protein
HGEGTFTSDKSQQLEKELVRLFFEWLIAGGHSKGKPPPKGGGGGGGSGGGGSGGGGSAESKYGPPCPPCPAPEFEGGPSVFLFPPKPKDTLMISRTPEVTCVVVDVSQEDPEVQFNWYVDGVEVHNAKTKPREEQFNSTYRVVSVLTVLHQDWLNGKEYKCKVSNKGLPSSIEKTISKAKGQPREPQVYTLPPSQEEMTKNQVSLTCLVKGFYPSDIAVEWESNGQPENNYKTTPPVLDSDGSFFLYSRLTVDKSRWQEGNVFSCSVMHEALHNHYTQKSLSLSLGGGGSGSAHPIPDSSPLLQFGGQVRQRYLYTDDACQTEAHLEIREDGTVGGAADQSPESLLQLKALKPGVIQILGVKTSRFLCQRPDGALYGSLHFDPEACSFRELLLEDGYNVYQSEAHGLPLHLPGCKSPHRDPAPRGPARFLPLPGLPPAPPEPPGILAPQPPDVGSSDPLSMVGSQGRSPSYAS

SEQ ID NO: 3391 - protein, 474 aa, Artificial Sequence
  Fusion Protein
HGEGTFTSDKSQQLEKELVRLFFEWLIAGGHSKGKPPPKGGGGGGGSGGGGSGGGGSAESKYGPPCPPCPAPEFEGGPSVFLFPPKPKDTLMISRTPEVTCVVVDVSQEDPEVQFNWYVDGVEVHNAKTKPREEQFNSTYRVVSVLTVLHQDWLNGKEYKCKVSNKGLPSSIEKTISKAKGQPREPQVYTLPPSQEEMTKNQVSLTCLVKGFYPSDIAVEWESNGQPENNYKTTPPVLDSDGSFFLYSRLTVDKSRWQEGNVFSCSVMHEALHNHYTQKSLSLSLGGGGSGSAHPIPDSSPLLQFGGQVRQRYLYTDDACQTEAHLEIREDGTVGGAADQSPESLLQLKALKPGVIQILGVKTSRFLCQRPDGALYGSLHFDPEACSFRELLLEDGYNVYQSEAHGLPLHLPGCKSPHRDPAPRGPARFLPLPGLPPAPPEPPGILAPQPPDVGSSDPLSMVYPSQGRSPSYAS

SEQ ID NO: 3392 - protein, 473 aa, Artificial Sequence
  Fusion Protein
HGEGTFTSDKSQQLEKELVRLFFEWLIAGGHSKGKPPPKGGGGGGGSGGGGSGGGGSAESKYGPPCPPCPAPEFEGGPSVFLFPPKPKDTLMISRTPEVTCVVVDVSQEDPEVQFNWYVDGVEVHNAKTKPREEQFNSTYRVVSVLTVLHQDWLNGKEYKCKVSNKGLPSSIEKTISKAKGQPREPQVYTLPPSQEEMTKNQVSLTCLVKGFYPSDIAVEWESNGQPENNYKTTPPVLDSDGSFFLYSRLTVDKSRWQEGNVFSCSVMHEALHNHYTQKSLSLSLGGGGSGSAHPIPDSSPLLQFGGQVRQRYLYTDDACQTEAHLEIREDGTVGGAADQSPESLLQLKALKPGVIQILGVKTSRFLCQRPDGALYGSLHFDPEACSFRELLLEDGYNVYQSEAHGLPLHLCGNKSPHRDPAPRGPARFLPLPGLPPAPPEPPGILAPQPPDVGSSDPLSMVGSQGRSPSYAS

SEQ ID NO: 3393 - protein, 474 aa, Artificial Sequence
  Fusion Protein
HGEGTFTSDKSQQLEKELVRLFFEWLIAGGHSKGKPPPKGGGGGGGSGGGGSGGGGSAESKYGPPCPPCPAPEFEGGPSVFLFPPKPKDTLMISRTPEVTCVVVDVSQEDPEVQFNWYVDGVEVHNAKTKPREEQFNSTYRVVSVLTVLHQDWLNGKEYKCKVSNKGLPSSIEKTISKAKGQPREPQVYTLPPSQEEMTKNQVSLTCLVKGFYPSDIAVEWESNGQPENNYKTTPPVLDSDGSFFLYSRLTVDKSRWQEGNVFSCSVMHEALHNHYTQKSLSLSLGGGGSGSAHPIPDSSPLLQFGGQVRQRYLYTDDACQTEAHLEIREDGTVGGAADQSPESLLQLKALKPGVIQILGVKTSRFLCQRPDGALYGSLHFDPEACSFRELLLEDGYNVYQSEAHGLPLHLCGNKSPHRDPAPRGPARFLPLPGLPPAPPEPPGILAPQPPDVGSSDPLSMVYPSQGRSPSYAS

SEQ ID NO: 3394 - protein, 471 aa, Artificial Sequence
  Fusion Protein
HGEGTFTSDKSQQLEKRLVRLFYEWLKNGGHSSIKPPPKGGGGGGGSGGGGSGGGGSADKTHTCPPCPAPEAAGGPSVFLFPPKPKDTLMISRTPEVTCVVVDVSHEDPEVKFNWYVDGVEVHNAKTKPREEQYNSTYRVVSVLTVLHQDWLNGKEYKCKVSNKALPAPIEKTISKAKGQPREPQVYTLPPSRDELTKNQVSLTCLVKGFYPSDIAVEWESNGQPENNYKTTPPVLDSDGSFFLYSKLTVDKSRWQQGNVFSCSVMHEALHNHYTQKSLSLSPGGGGSGSAHPIPDSSPLLQFGGQVRQRYLYTDDACQTEAHLEIREDGTVGGAADQSPESLLQLKALKPGVIQILGVKTSRFLCQRPDGALYGSLHFDPEACSFRELLLEDGYNVYQSEAHGLPLHLPGCKSPHRDPAPRGPARFLPLPGLPPAPPEPPGILAPQPPDVGSSDPLSMVGSQGRSPSYAS

SEQ ID NO: 3395 - protein, 472 aa, Artificial Sequence
  Fusion Protein
HGEGTFTSDKSQQLEKRLVRLFYEWLKNGGHSSIKPPPKGGGGGGGSGGGGSGGGGSADKTHTCPPCPAPEAAGGPSVFLFPPKPKDTLMISRTPEVTCVVVDVSHEDPEVKFNWYVDGVEVHNAKTKPREEQYNSTYRVVSVLTVLHQDWLNGKEYKCKVSNKALPAPIEKTISKAKGQPREPQVYTLPPSRDELTKNQVSLTCLVKGFYPSDIAVEWESNGQPENNYKTTPPVLDSDGSFFLYSKLTVDKSRWQQGNVFSCSVMHEALHNHYTQKSLSLSPGGGGSGSAHPIPDSSPLLQFGGQVRQRYLYTDDACQTEAHLEIREDGTVGGAADQSPESLLQLKALKPGVIQILGVKTSRFLCQRPDGALYGSLHFDPEACSFRELLLEDGYNVYQSEAHGLPLHLPGCKSPHRDPAPRGPARFLPLPGLPPAPPEPPGILAPQPPDVGSSDPLSMVYPSQGRSPSYAS

SEQ ID NO: 3396 - protein, 471 aa, Artificial Sequence
  Fusion Protein
HGEGTFTSDKSQQLEKRLVRLFYEWLKNGGHSSIKPPPKGGGGGGGSGGGGSGGGGSADKTHTCPPCPAPEAAGGPSVFLFPPKPKDTLMISRTPEVTCVVVDVSHEDPEVKFNWYVDGVEVHNAKTKPREEQYNSTYRVVSVLTVLHQDWLNGKEYKCKVSNKALPAPIEKTISKAKGQPREPQVYTLPPSRDELTKNQVSLTCLVKGFYPSDIAVEWESNGQPENNYKTTPPVLDSDGSFFLYSKLTVDKSRWQQGNVFSCSVMHEALHNHYTQKSLSLSPGGGGSGSAHPIPDSSPLLQFGGQVRQRYLYTDDACQTEAHLEIREDGTVGGAADQSPESLLQLKALKPGVIQILGVKTSRFLCQRPDGALYGSLHFDPEACSFRELLLEDGYNVYQSEAHGLPLHLCGNKSPHRDPAPRGPARFLPLPGLPPAPPEPPGILAPQPPDVGSSDPLSMVGSQGRSPSYAS

SEQ ID NO: 3397 - protein, 472 aa, Artificial Sequence
  Fusion Protein
HGEGTFTSDKSQQLEKRLVRLFYEWLKNGGHSSIKPPPKGGGGGGGSGGGGSGGGGSADKTHTCPPCPAPEAAGGPSVFLFPPKPKDTLMISRTPEVTCVVVDVSHEDPEVKFNWYVDGVEVHNAKTKPREEQYNSTYRVVSVLTVLHQDWLNGKEYKCKVSNKALPAPIEKTISKAKGQPREPQVYTLPPSRDELTKNQVSLTCLVKGFYPSDIAVEWESNGQPENNYKTTPPVLDSDGSFFLYSKLTVDKSRWQQGNVFSCSVMHEALHNHYTQKSLSLSPGGGGSGSAHPIPDSSPLLQFGGQVRQRYLYTDDACQTEAHLEIREDGTVGGAADQSPESLLQLKALKPGVIQILGVKTSRFLCQRPDGALYGSLHFDPEACSFRELLLEDGYNVYQSEAHGLPLHLCGNKSPHRDPAPRGPARFLPLPGLPPAPPEPPGILAPQPPDVGSSDPLSMVYPSQGRSPSYAS

SEQ ID NO: 3398 - protein, 471 aa, Artificial Sequence
  Fusion Protein
HGEGTFTSDKSQQLEKRLVRLFYEWLKNGGHSSIKPPPKGGGGGGGSGGGGSGGGGSADKTHTCPPCPAPELLGGPSVFLFPPKPKDTLMISRTPEVTCVVVDVSHEDPEVKFNWYVDGVEVHNAKTKPREEQYNNASRVVSVLTVLHQDWLNGKEYKCKVSNKALPAPIEKTISKAKGQPREPQVYTLPPSRDELTKNQVSLTCLVKGFYPSDIAVEWESNGQPENNYKTTPPVLDSDGSFFLYSKLTVDKSRWQQGNVFSCSVMHEALHNHYTQKSLSLSPGGGGSGSAHPIPDSSPLLQFGGQVRQRYLYTDDACQTEAHLEIREDGTVGGAADQSPESLLQLKALKPGVIQILGVKTSRFLCQRPDGALYGSLHFDPEACSFRELLLEDGYNVYQSEAHGLPLHLPGCKSPHRDPAPRGPARFLPLPGLPPAPPEPPGILAPQPPDVGSSDPLSMVGSQGRSPSYAS

SEQ ID NO: 3399 - protein, 472 aa, Artificial Sequence
  Fusion Protein
HGEGTFTSDKSQQLEKRLVRLFYEWLKNGGHSSIKPPPKGGGGGGGSGGGGSGGGGSADKTHTCPPCPAPELLGGPSVFLFPPKPKDTLMISRTPEVTCVVVDVSHEDPEVKFNWYVDGVEVHNAKTKPREEQYNNASRVVSVLTVLHQDWLNGKEYKCKVSNKALPAPIEKTISKAKGQPREPQVYTLPPSRDELTKNQVSLTCLVKGFYPSDIAVEWESNGQPENNYKTTPPVLDSDGSFFLYSKLTVDKSRWQQGNVFSCSVMHEALHNHYTQKSLSLSPGGGGSGSAHPIPDSSPLLQFGGQVRQRYLYTDDACQTEAHLEIREDGTVGGAADQSPESLLQLKALKPGVIQILGVKTSRFLCQRPDGALYGSLHFDPEACSFRELLLEDGYNVYQSEAHGLPLHLPGCKSPHRDPAPRGPARFLPLPGLPPAPPEPPGILAPQPPDVGSSDPLSMVYPSQGRSPSYAS

SEQ ID NO: 3400 - protein, 471 aa, Artificial Sequence
  Fusion Protein
HGEGTFTSDKSQQLEKRLVRLFYEWLKNGGHSSIKPPPKGGGGGGGSGGGGSGGGGSADKTHTCPPCPAPELLGGPSVFLFPPKPKDTLMISRTPEVTCVVVDVSHEDPEVKFNWYVDGVEVHNAKTKPREEQYNNASRVVSVLTVLHQDWLNGKEYKCKVSNKALPAPIEKTISKAKGQPREPQVYTLPPSRDELTKNQVSLTCLVKGFYPSDIAVEWESNGQPENNYKTTPPVLDSDGSFFLYSKLTVDKSRWQQGNVFSCSVMHEALHNHYTQKSLSLSPGGGGSGSAHPIPDSSPLLQFGGQVRQRYLYTDDACQTEAHLEIREDGTVGGAADQSPESLLQLKALKPGVIQILGVKTSRFLCQRPDGALYGSLHFDPEACSFRELLLEDGYNVYQSEAHGLPLHLCGNKSPHRDPAPRGPARFLPLPGLPPAPPEPPGILAPQPPDVGSSDPLSMVGSQGRSPSYAS

SEQ ID NO: 3401 - protein, 472 aa, Artificial Sequence
  Fusion Protein
HGEGTFTSDKSQQLEKRLVRLFYEWLKNGGHSSIKPPPKGGGGGGGSGGGGSGGGGSADKTHTCPPCPAPELLGGPSVFLFPPKPKDTLMISRTPEVTCVVVDVSHEDPEVKFNWYVDGVEVHNAKTKPREEQYNNASRVVSVLTVLHQDWLNGKEYKCKVSNKALPAPIEKTISKAKGQPREPQVYTLPPSRDELTKNQVSLTCLVKGFYPSDIAVEWESNGQPENNYKTTPPVLDSDGSFFLYSKLTVDKSRWQQGNVFSCSVMHEALHNHYTQKSLSLSPGGGGSGSAHPIPDSSPLLQFGGQVRQRYLYTDDACQTEAHLEIREDGTVGGAADQSPESLLQLKALKPGVIQILGVKTSRFLCQRPDGALYGSLHFDPEACSFRELLLEDGYNVYQSEAHGLPLHLCGNKSPHRDPAPRGPARFLPLPGLPPAPPEPPGILAPQPPDVGSSDPLSMVYPSQGRSPSYAS

SEQ ID NO: 3402 - protein, 473 aa, Artificial Sequence
  Fusion Protein
HGEGTFTSDKSQQLEKRLVRLFYEWLKNGGHSSIKPPPKGGGGGGGSGGGGSGGGGSAESKYGPPCPPCPAPEFEGGPSVFLFPPKPKDTLMISRTPEVTCVVVDVSQEDPEVQFNWYVDGVEVHNAKTKPREEQFNSTYRVVSVLTVLHQDWLNGKEYKCKVSNKGLPSSIEKTISKAKGQPREPQVYTLPPSQEEMTKNQVSLTCLVKGFYPSDIAVEWESNGQPENNYKTTPPVLDSDGSFFLYSRLTVDKSRWQEGNVFSCSVMHEALHNHYTQKSLSLSLGGGGSGSAHPIPDSSPLLQFGGQVRQRYLYTDDACQTEAHLEIREDGTVGGAADQSPESLLQLKALKPGVIQILGVKTSRFLCQRPDGALYGSLHFDPEACSFRELLLEDGYNVYQSEAHGLPLHLPGCKSPHRDPAPRGPARFLPLPGLPPAPPEPPGILAPQPPDVGSSDPLSMVGSQGRSPSYAS

SEQ ID NO: 3403 - protein, 474 aa, Artificial Sequence
  Fusion Protein
HGEGTFTSDKSQQLEKRLVRLFYEWLKNGGHSSIKPPPKGGGGGGGSGGGGSGGGGSAESKYGPPCPPCPAPEFEGGPSVFLFPPKPKDTLMISRTPEVTCVVVDVSQEDPEVQFNWYVDGVEVHNAKTKPREEQFNSTYRVVSVLTVLHQDWLNGKEYKCKVSNKGLPSSIEKTISKAKGQPREPQVYTLPPSQEEMTKNQVSLTCLVKGFYPSDIAVEWESNGQPENNYKTTPPVLDSDGSFFLYSRLTVDKSRWQEGNVFSCSVMHEALHNHYTQKSLSLSLGGGGSGSAHPIPDSSPLLQFGGQVRQRYLYTDDACQTEAHLEIREDGTVGGAADQSPESLLQLKALKPGVIQILGVKTSRFLCQRPDGALYGSLHFDPEACSFRELLLEDGYNVYQSEAHGLPLHLPGCKSPHRDPAPRGPARFLPLPGLPPAPPEPPGILAPQPPDVGSSDPLSMVYPSQGRSPSYAS

SEQ ID NO: 3404 - protein, 473 aa, Artificial Sequence
  Fusion Protein
HGEGTFTSDKSQQLEKRLVRLFYEWLKNGGHSSIKPPPKGGGGGGGSGGGGSGGGGSAESKYGPPCPPCPAPEFEGGPSVFLFPPKPKDTLMISRTPEVTCVVVDVSQEDPEVQFNWYVDGVEVHNAKTKPREEQFNSTYRVVSVLTVLHQDWLNGKEYKCKVSNKGLPSSIEKTISKAKGQPREPQVYTLPPSQEEMTKNQVSLTCLVKGFYPSDIAVEWESNGQPENNYKTTPPVLDSDGSFFLYSRLTVDKSRWQEGNVFSCSVMHEALHNHYTQKSLSLSLGGGGSGSAHPIPDSSPLLQFGGQVRQRYLYTDDACQTEAHLEIREDGTVGGAADQSPESLLQLKALKPGVIQILGVKTSRFLCQRPDGALYGSLHFDPEACSFRELLLEDGYNVYQSEAHGLPLHLCGNKSPHRDPAPRGPARFLPLPGLPPAPPEPPGILAPQPPDVGSSDPLSMVGSQGRSPSYAS

SEQ ID NO: 3405 - protein, 474 aa, Artificial Sequence
  Fusion Protein
HGEGTFTSDKSQQLEKRLVRLFYEWLKNGGHSSIKPPPKGGGGGGGSGGGGSGGGGSAESKYGPPCPPCPAPEFEGGPSVFLFPPKPKDTLMISRTPEVTCVVVDVSQEDPEVQFNWYVDGVEVHNAKTKPREEQFNSTYRVVSVLTVLHQDWLNGKEYKCKVSNKGLPSSIEKTISKAKGQPREPQVYTLPPSQEEMTKNQVSLTCLVKGFYPSDIAVEWESNGQPENNYKTTPPVLDSDGSFFLYSRLTVDKSRWQEGNVFSCSVMHEALHNHYTQKSLSLSLGGGGSGSAHPIPDSSPLLQFGGQVRQRYLYTDDACQTEAHLEIREDGTVGGAADQSPESLLQLKALKPGVIQILGVKTSRFLCQRPDGALYGSLHFDPEACSFRELLLEDGYNVYQSEAHGLPLHLCGNKSPHRDPAPRGPARFLPLPGLPPAPPEPPGILAPQPPDVGSSDPLSMVYPSQGRSPSYAS

SEQ ID NO: 3406 - protein, 471 aa, Artificial Sequence
  Fusion Protein
HGEGTFTSDKSQQLEKRLVRLFYEWLKNGGHSKGKPPPKGGGGGGGSGGGGSGGGGSADKTHTCPPCPAPEAAGGPSVFLFPPKPKDTLMISRTPEVTCVVVDVSHEDPEVKFNWYVDGVEVHNAKTKPREEQYNSTYRVVSVLTVLHQDWLNGKEYKCKVSNKALPAPIEKTISKAKGQPREPQVYTLPPSRDELTKNQVSLTCLVKGFYPSDIAVEWESNGQPENNYKTTPPVLDSDGSFFLYSKLTVDKSRWQQGNVFSCSVMHEALHNHYTQKSLSLSPGGGGSGSAHPIPDSSPLLQFGGQVRQRYLYTDDACQTEAHLEIREDGTVGGAADQSPESLLQLKALKPGVIQILGVKTSRFLCQRPDGALYGSLHFDPEACSFRELLLEDGYNVYQSEAHGLPLHLPGCKSPHRDPAPRGPARFLPLPGLPPAPPEPPGILAPQPPDVGSSDPLSMVGSQGRSPSYAS

SEQ ID NO: 3407 - protein, 472 aa, Artificial Sequence
  Fusion Protein
HGEGTFTSDKSQQLEKRLVRLFYEWLKNGGHSKGKPPPKGGGGGGGSGGGGSGGGGSADKTHTCPPCPAPEAAGGPSVFLFPPKPKDTLMISRTPEVTCVVVDVSHEDPEVKFNWYVDGVEVHNAKTKPREEQYNSTYRVVSVLTVLHQDWLNGKEYKCKVSNKALPAPIEKTISKAKGQPREPQVYTLPPSRDELTKNQVSLTCLVKGFYPSDIAVEWESNGQPENNYKTTPPVLDSDGSFFLYSKLTVDKSRWQQGNVFSCSVMHEALHNHYTQKSLSLSPGGGGSGSAHPIPDSSPLLQFGGQVRQRYLYTDDACQTEAHLEIREDGTVGGAADQSPESLLQLKALKPGVIQILGVKTSRFLCQRPDGALYGSLHFDPEACSFRELLLEDGYNVYQSEAHGLPLHLPGCKSPHRDPAPRGPARFLPLPGLPPAPPEPPGILAPQPPDVGSSDPLSMVYPSQGRSPSYAS

SEQ ID NO: 3408 - protein, 471 aa, Artificial Sequence
  Fusion Protein
HGEGTFTSDKSQQLEKRLVRLFYEWLKNGGHSKGKPPPKGGGGGGGSGGGGSGGGGSADKTHTCPPCPAPEAAGGPSVFLFPPKPKDTLMISRTPEVTCVVVDVSHEDPEVKFNWYVDGVEVHNAKTKPREEQYNSTYRVVSVLTVLHQDWLNGKEYKCKVSNKALPAPIEKTISKAKGQPREPQVYTLPPSRDELTKNQVSLTCLVKGFYPSDIAVEWESNGQPENNYKTTPPVLDSDGSFFLYSKLTVDKSRWQQGNVFSCSVMHEALHNHYTQKSLSLSPGGGGSGSAHPIPDSSPLLQFGGQVRQRYLYTDDACQTEAHLEIREDGTVGGAADQSPESLLQLKALKPGVIQILGVKTSRFLCQRPDGALYGSLHFDPEACSFRELLLEDGYNVYQSEAHGLPLHLCGNKSPHRDPAPRGPARFLPLPGLPPAPPEPPGILAPQPPDVGSSDPLSMVGSQGRSPSYAS

SEQ ID NO: 3409 - protein, 472 aa, Artificial Sequence
  Fusion Protein
HGEGTFTSDKSQQLEKRLVRLFYEWLKNGGHSKGKPPPKGGGGGGGSGGGGSGGGGSADKTHTCPPCPAPEAAGGPSVFLFPPKPKDTLMISRTPEVTCVVVDVSHEDPEVKFNWYVDGVEVHNAKTKPREEQYNSTYRVVSVLTVLHQDWLNGKEYKCKVSNKALPAPIEKTISKAKGQPREPQVYTLPPSRDELTKNQVSLTCLVKGFYPSDIAVEWESNGQPENNYKTTPPVLDSDGSFFLYSKLTVDKSRWQQGNVFSCSVMHEALHNHYTQKSLSLSPGGGGSGSAHPIPDSSPLLQFGGQVRQRYLYTDDACQTEAHLEIREDGTVGGAADQSPESLLQLKALKPGVIQILGVKTSRFLCQRPDGALYGSLHFDPEACSFRELLLEDGYNVYQSEAHGLPLHLCGNKSPHRDPAPRGPARFLPLPGLPPAPPEPPGILAPQPPDVGSSDPLSMVYPSQGRSPSYAS

SEQ ID NO: 3410 - protein, 471 aa, Artificial Sequence
  Fusion Protein
HGEGTFTSDKSQQLEKRLVRLFYEWLKNGGHSKGKPPPKGGGGGGGSGGGGSGGGGSADKTHTCPPCPAPELLGGPSVFLFPPKPKDTLMISRTPEVTCVVVDVSHEDPEVKFNWYVDGVEVHNAKTKPREEQYNNASRVVSVLTVLHQDWLNGKEYKCKVSNKALPAPIEKTISKAKGQPREPQVYTLPPSRDELTKNQVSLTCLVKGFYPSDIAVEWESNGQPENNYKTTPPVLDSDGSFFLYSKLTVDKSRWQQGNVFSCSVMHEALHNHYTQKSLSLSPGGGGSGSAHPIPDSSPLLQFGGQVRQRYLYTDDACQTEAHLEIREDGTVGGAADQSPESLLQLKALKPGVIQILGVKTSRFLCQRPDGALYGSLHFDPEACSFRELLLEDGYNVYQSEAHGLPLHLPGCKSPHRDPAPRGPARFLPLPGLPPAPPEPPGILAPQPPDVGSSDPLSMVGSQGRSPSYAS

SEQ ID NO: 3411 - protein, 472 aa, Artificial Sequence
  Fusion Protein
HGEGTFTSDKSQQLEKRLVRLFYEWLKNGGHSKGKPPPKGGGGGGGSGGGGSGGGGSADKTHTCPPCPAPELLGGPSVFLFPPKPKDTLMISRTPEVTCVVVDVSHEDPEVKFNWYVDGVEVHNAKTKPREEQYNNASRVVSVLTVLHQDWLNGKEYKCKVSNKALPAPIEKTISKAKGQPREPQVYTLPPSRDELTKNQVSLTCLVKGFYPSDIAVEWESNGQPENNYKTTPPVLDSDGSFFLYSKLTVDKSRWQQGNVFSCSVMHEALHNHYTQKSLSLSPGGGGSGSAHPIPDSSPLLQFGGQVRQRYLYTDDACQTEAHLEIREDGTVGGAADQSPESLLQLKALKPGVIQILGVKTSRFLCQRPDGALYGSLHFDPEACSFRELLLEDGYNVYQSEAHGLPLHLPGCKSPHRDPAPRGPARFLPLPGLPPAPPEPPGILAPQPPDVGSSDPLSMVYPSQGRSPSYAS

SEQ ID NO: 3412 - protein, 471 aa, Artificial Sequence
  Fusion Protein
HGEGTFTSDKSQQLEKRLVRLFYEWLKNGGHSKGKPPPKGGGGGGGSGGGGSGGGGSADKTHTCPPCPAPELLGGPSVFLFPPKPKDTLMISRTPEVTCVVVDVSHEDPEVKFNWYVDGVEVHNAKTKPREEQYNNASRVVSVLTVLHQDWLNGKEYKCKVSNKALPAPIEKTISKAKGQPREPQVYTLPPSRDELTKNQVSLTCLVKGFYPSDIAVEWESNGQPENNYKTTPPVLDSDGSFFLYSKLTVDKSRWQQGNVFSCSVMHEALHNHYTQKSLSLSPGGGGSGSAHPIPDSSPLLQFGGQVRQRYLYTDDACQTEAHLEIREDGTVGGAADQSPESLLQLKALKPGVIQILGVKTSRFLCQRPDGALYGSLHFDPEACSFRELLLEDGYNVYQSEAHGLPLHLCGNKSPHRDPAPRGPARFLPLPGLPPAPPEPPGILAPQPPDVGSSDPLSMVGSQGRSPSYAS

SEQ ID NO: 3413 - protein, 472 aa, Artificial Sequence
  Fusion Protein
HGEGTFTSDKSQQLEKRLVRLFYEWLKNGGHSKGKPPPKGGGGGGGSGGGGSGGGGSADKTHTCPPCPAPELLGGPSVFLFPPKPKDTLMISRTPEVTCVVVDVSHEDPEVKFNWYVDGVEVHNAKTKPREEQYNNASRVVSVLTVLHQDWLNGKEYKCKVSNKALPAPIEKTISKAKGQPREPQVYTLPPSRDELTKNQVSLTCLVKGFYPSDIAVEWESNGQPENNYKTTPPVLDSDGSFFLYSKLTVDKSRWQQGNVFSCSVMHEALHNHYTQKSLSLSPGGGGSGSAHPIPDSSPLLQFGGQVRQRYLYTDDACQTEAHLEIREDGTVGGAADQSPESLLQLKALKPGVIQILGVKTSRFLCQRPDGALYGSLHFDPEACSFRELLLEDGYNVYQSEAHGLPLHLCGNKSPHRDPAPRGPARFLPLPGLPPAPPEPPGILAPQPPDVGSSDPLSMVYPSQGRSPSYAS

SEQ ID NO: 3414 - protein, 473 aa, Artificial Sequence
  Fusion Protein
HGEGTFTSDKSQQLEKRLVRLFYEWLKNGGHSKGKPPPKGGGGGGGSGGGGSGGGGSAESKYGPPCPPCPAPEFEGGPSVFLFPPKPKDTLMISRTPEVTCVVVDVSQEDPEVQFNWYVDGVEVHNAKTKPREEQFNSTYRVVSVLTVLHQDWLNGKEYKCKVSNKGLPSSIEKTISKAKGQPREPQVYTLPPSQEEMTKNQVSLTCLVKGFYPSDIAVEWESNGQPENNYKTTPPVLDSDGSFFLYSRLTVDKSRWQEGNVFSCSVMHEALHNHYTQKSLSLSLGGGGSGSAHPIPDSSPLLQFGGQVRQRYLYTDDACQTEAHLEIREDGTVGGAADQSPESLLQLKALKPGVIQILGVKTSRFLCQRPDGALYGSLHFDPEACSFRELLLEDGYNVYQSEAHGLPLHLPGCKSPHRDPAPRGPARFLPLPGLPPAPPEPPGILAPQPPDVGSSDPLSMVGSQGRSPSYAS

SEQ ID NO: 3415 - protein, 474 aa, Artificial Sequence
  Fusion Protein
HGEGTFTSDKSQQLEKRLVRLFYEWLKNGGHSKGKPPPKGGGGGGGSGGGGSGGGGSAESKYGPPCPPCPAPEFEGGPSVFLFPPKPKDTLMISRTPEVTCVVVDVSQEDPEVQFNWYVDGVEVHNAKTKPREEQFNSTYRVVSVLTVLHQDWLNGKEYKCKVSNKGLPSSIEKTISKAKGQPREPQVYTLPPSQEEMTKNQVSLTCLVKGFYPSDIAVEWESNGQPENNYKTTPPVLDSDGSFFLYSRLTVDKSRWQEGNVFSCSVMHEALHNHYTQKSLSLSLGGGGSGSAHPIPDSSPLLQFGGQVRQRYLYTDDACQTEAHLEIREDGTVGGAADQSPESLLQLKALKPGVIQILGVKTSRFLCQRPDGALYGSLHFDPEACSFRELLLEDGYNVYQSEAHGLPLHLPGCKSPHRDPAPRGPARFLPLPGLPPAPPEPPGILAPQPPDVGSSDPLSMVYPSQGRSPSYAS

SEQ ID NO: 3416 - protein, 473 aa, Artificial Sequence
  Fusion Protein
HGEGTFTSDKSQQLEKRLVRLFYEWLKNGGHSKGKPPPKGGGGGGGSGGGGSGGGGSAESKYGPPCPPCPAPEFEGGPSVFLFPPKPKDTLMISRTPEVTCVVVDVSQEDPEVQFNWYVDGVEVHNAKTKPREEQFNSTYRVVSVLTVLHQDWLNGKEYKCKVSNKGLPSSIEKTISKAKGQPREPQVYTLPPSQEEMTKNQVSLTCLVKGFYPSDIAVEWESNGQPENNYKTTPPVLDSDGSFFLYSRLTVDKSRWQEGNVFSCSVMHEALHNHYTQKSLSLSLGGGGSGSAHPIPDSSPLLQFGGQVRQRYLYTDDACQTEAHLEIREDGTVGGAADQSPESLLQLKALKPGVIQILGVKTSRFLCQRPDGALYGSLHFDPEACSFRELLLEDGYNVYQSEAHGLPLHLCGNKSPHRDPAPRGPARFLPLPGLPPAPPEPPGILAPQPPDVGSSDPLSMVGSQGRSPSYAS

SEQ ID NO: 3417 - protein, 474 aa, Artificial Sequence
  Fusion Protein
HGEGTFTSDKSQQLEKRLVRLFYEWLKNGGHSKGKPPPKGGGGGGGSGGGGSGGGGSAESKYGPPCPPCPAPEFEGGPSVFLFPPKPKDTLMISRTPEVTCVVVDVSQEDPEVQFNWYVDGVEVHNAKTKPREEQFNSTYRVVSVLTVLHQDWLNGKEYKCKVSNKGLPSSIEKTISKAKGQPREPQVYTLPPSQEEMTKNQVSLTCLVKGFYPSDIAVEWESNGQPENNYKTTPPVLDSDGSFFLYSRLTVDKSRWQEGNVFSCSVMHEALHNHYTQKSLSLSLGGGGSGSAHPIPDSSPLLQFGGQVRQRYLYTDDACQTEAHLEIREDGTVGGAADQSPESLLQLKALKPGVIQILGVKTSRFLCQRPDGALYGSLHFDPEACSFRELLLEDGYNVYQSEAHGLPLHLCGNKSPHRDPAPRGPARFLPLPGLPPAPPEPPGILAPQPPDVGSSDPLSMVYPSQGRSPSYAS

SEQ ID NO: 3418 - protein, 471 aa, Artificial Sequence
  Fusion Protein
HGEGTFTSDKSQQLEKRLVRLFYEWLKKGGHSSIKPPPKGGGGGGGSGGGGSGGGGSADKTHTCPPCPAPEAAGGPSVFLFPPKPKDTLMISRTPEVTCVVVDVSHEDPEVKFNWYVDGVEVHNAKTKPREEQYNSTYRVVSVLTVLHQDWLNGKEYKCKVSNKALPAPIEKTISKAKGQPREPQVYTLPPSRDELTKNQVSLTCLVKGFYPSDIAVEWESNGQPENNYKTTPPVLDSDGSFFLYSKLTVDKSRWQQGNVFSCSVMHEALHNHYTQKSLSLSPGGGGSGSAHPIPDSSPLLQFGGQVRQRYLYTDDACQTEAHLEIREDGTVGGAADQSPESLLQLKALKPGVIQILGVKTSRFLCQRPDGALYGSLHFDPEACSFRELLLEDGYNVYQSEAHGLPLHLPGCKSPHRDPAPRGPARFLPLPGLPPAPPEPPGILAPQPPDVGSSDPLSMVGSQGRSPSYAS

SEQ ID NO: 3419 - protein, 472 aa, Artificial Sequence
  Fusion Protein
HGEGTFTSDKSQQLEKRLVRLFYEWLKKGGHSSIKPPPKGGGGGGGSGGGGSGGGGSADKTHTCPPCPAPEAAGGPSVFLFPPKPKDTLMISRTPEVTCVVVDVSHEDPEVKFNWYVDGVEVHNAKTKPREEQYNSTYRVVSVLTVLHQDWLNGKEYKCKVSNKALPAPIEKTISKAKGQPREPQVYTLPPSRDELTKNQVSLTCLVKGFYPSDIAVEWESNGQPENNYKTTPPVLDSDGSFFLYSKLTVDKSRWQQGNVFSCSVMHEALHNHYTQKSLSLSPGGGGSGSAHPIPDSSPLLQFGGQVRQRYLYTDDACQTEAHLEIREDGTVGGAADQSPESLLQLKALKPGVIQILGVKTSRFLCQRPDGALYGSLHFDPEACSFRELLLEDGYNVYQSEAHGLPLHLPGCKSPHRDPAPRGPARFLPLPGLPPAPPEPPGILAPQPPDVGSSDPLSMVYPSQGRSPSYAS

SEQ ID NO: 3420 - protein, 471 aa, Artificial Sequence
  Fusion Protein
HGEGTFTSDKSQQLEKRLVRLFYEWLKKGGHSSIKPPPKGGGGGGGSGGGGSGGGGSADKTHTCPPCPAPEAAGGPSVFLFPPKPKDTLMISRTPEVTCVVVDVSHEDPEVKFNWYVDGVEVHNAKTKPREEQYNSTYRVVSVLTVLHQDWLNGKEYKCKVSNKALPAPIEKTISKAKGQPREPQVYTLPPSRDELTKNQVSLTCLVKGFYPSDIAVEWESNGQPENNYKTTPPVLDSDGSFFLYSKLTVDKSRWQQGNVFSCSVMHEALHNHYTQKSLSLSPGGGGSGSAHPIPDSSPLLQFGGQVRQRYLYTDDACQTEAHLEIREDGTVGGAADQSPESLLQLKALKPGVIQILGVKTSRFLCQRPDGALYGSLHFDPEACSFRELLLEDGYNVYQSEAHGLPLHLCGNKSPHRDPAPRGPARFLPLPGLPPAPPEPPGILAPQPPDVGSSDPLSMVGSQGRSPSYAS

SEQ ID NO: 3421 - protein, 472 aa, Artificial Sequence
  Fusion Protein
HGEGTFTSDKSQQLEKRLVRLFYEWLKKGGHSSIKPPPKGGGGGGGSGGGGSGGGGSADKTHTCPPCPAPEAAGGPSVFLFPPKPKDTLMISRTPEVTCVVVDVSHEDPEVKFNWYVDGVEVHNAKTKPREEQYNSTYRVVSVLTVLHQDWLNGKEYKCKVSNKALPAPIEKTISKAKGQPREPQVYTLPPSRDELTKNQVSLTCLVKGFYPSDIAVEWESNGQPENNYKTTPPVLDSDGSFFLYSKLTVDKSRWQQGNVFSCSVMHEALHNHYTQKSLSLSPGGGGSGSAHPIPDSSPLLQFGGQVRQRYLYTDDACQTEAHLEIREDGTVGGAADQSPESLLQLKALKPGVIQILGVKTSRFLCQRPDGALYGSLHFDPEACSFRELLLEDGYNVYQSEAHGLPLHLCGNKSPHRDPAPRGPARFLPLPGLPPAPPEPPGILAPQPPDVGSSDPLSMVYPSQGRSPSYAS

SEQ ID NO: 3422 - protein, 471 aa, Artificial Sequence
  Fusion Protein
HGEGTFTSDKSQQLEKRLVRLFYEWLKKGGHSSIKPPPKGGGGGGGSGGGGSGGGGSADKTHTCPPCPAPELLGGPSVFLFPPKPKDTLMISRTPEVTCVVVDVSHEDPEVKFNWYVDGVEVHNAKTKPREEQYNNASRVVSVLTVLHQDWLNGKEYKCKVSNKALPAPIEKTISKAKGQPREPQVYTLPPSRDELTKNQVSLTCLVKGFYPSDIAVEWESNGQPENNYKTTPPVLDSDGSFFLYSKLTVDKSRWQQGNVFSCSVMHEALHNHYTQKSLSLSPGGGGSGSAHPIPDSSPLLQFGGQVRQRYLYTDDACQTEAHLEIREDGTVGGAADQSPESLLQLKALKPGVIQILGVKTSRFLCQRPDGALYGSLHFDPEACSFRELLLEDGYNVYQSEAHGLPLHLPGCKSPHRDPAPRGPARFLPLPGLPPAPPEPPGILAPQPPDVGSSDPLSMVGSQGRSPSYAS

SEQ ID NO: 3423 - protein, 472 aa, Artificial Sequence
  Fusion Protein
HGEGTFTSDKSQQLEKRLVRLFYEWLKKGGHSSIKPPPKGGGGGGGSGGGGSGGGGSADKTHTCPPCPAPELLGGPSVFLFPPKPKDTLMISRTPEVTCVVVDVSHEDPEVKFNWYVDGVEVHNAKTKPREEQYNNASRVVSVLTVLHQDWLNGKEYKCKVSNKALPAPIEKTISKAKGQPREPQVYTLPPSRDELTKNQVSLTCLVKGFYPSDIAVEWESNGQPENNYKTTPPVLDSDGSFFLYSKLTVDKSRWQQGNVFSCSVMHEALHNHYTQKSLSLSPGGGGSGSAHPIPDSSPLLQFGGQVRQRYLYTDDACQTEAHLEIREDGTVGGAADQSPESLLQLKALKPGVIQILGVKTSRFLCQRPDGALYGSLHFDPEACSFRELLLEDGYNVYQSEAHGLPLHLPGCKSPHRDPAPRGPARFLPLPGLPPAPPEPPGILAPQPPDVGSSDPLSMVYPSQGRSPSYAS

SEQ ID NO: 3424 - protein, 471 aa, Artificial Sequence
  Fusion Protein
HGEGTFTSDKSQQLEKRLVRLFYEWLKKGGHSSIKPPPKGGGGGGGSGGGGSGGGGSADKTHTCPPCPAPELLGGPSVFLFPPKPKDTLMISRTPEVTCVVVDVSHEDPEVKFNWYVDGVEVHNAKTKPREEQYNNASRVVSVLTVLHQDWLNGKEYKCKVSNKALPAPIEKTISKAKGQPREPQVYTLPPSRDELTKNQVSLTCLVKGFYPSDIAVEWESNGQPENNYKTTPPVLDSDGSFFLYSKLTVDKSRWQQGNVFSCSVMHEALHNHYTQKSLSLSPGGGGSGSAHPIPDSSPLLQFGGQVRQRYLYTDDACQTEAHLEIREDGTVGGAADQSPESLLQLKALKPGVIQILGVKTSRFLCQRPDGALYGSLHFDPEACSFRELLLEDGYNVYQSEAHGLPLHLCGNKSPHRDPAPRGPARFLPLPGLPPAPPEPPGILAPQPPDVGSSDPLSMVGSQGRSPSYAS

SEQ ID NO: 3425 - protein, 472 aa, Artificial Sequence
  Fusion Protein
HGEGTFTSDKSQQLEKRLVRLFYEWLKKGGHSSIKPPPKGGGGGGGSGGGGSGGGGSADKTHTCPPCPAPELLGGPSVFLFPPKPKDTLMISRTPEVTCVVVDVSHEDPEVKFNWYVDGVEVHNAKTKPREEQYNNASRVVSVLTVLHQDWLNGKEYKCKVSNKALPAPIEKTISKAKGQPREPQVYTLPPSRDELTKNQVSLTCLVKGFYPSDIAVEWESNGQPENNYKTTPPVLDSDGSFFLYSKLTVDKSRWQQGNVFSCSVMHEALHNHYTQKSLSLSPGGGGSGSAHPIPDSSPLLQFGGQVRQRYLYTDDACQTEAHLEIREDGTVGGAADQSPESLLQLKALKPGVIQILGVKTSRFLCQRPDGALYGSLHFDPEACSFRELLLEDGYNVYQSEAHGLPLHLCGNKSPHRDPAPRGPARFLPLPGLPPAPPEPPGILAPQPPDVGSSDPLSMVYPSQGRSPSYAS

SEQ ID NO: 3426 - protein, 473 aa, Artificial Sequence
  Fusion Protein
HGEGTFTSDKSQQLEKRLVRLFYEWLKKGGHSSIKPPPKGGGGGGGSGGGGSGGGGSAESKYGPPCPPCPAPEFEGGPSVFLFPPKPKDTLMISRTPEVTCVVVDVSQEDPEVQFNWYVDGVEVHNAKTKPREEQFNSTYRVVSVLTVLHQDWLNGKEYKCKVSNKGLPSSIEKTISKAKGQPREPQVYTLPPSQEEMTKNQVSLTCLVKGFYPSDIAVEWESNGQPENNYKTTPPVLDSDGSFFLYSRLTVDKSRWQEGNVFSCSVMHEALHNHYTQKSLSLSLGGGGSGSAHPIPDSSPLLQFGGQVRQRYLYTDDACQTEAHLEIREDGTVGGAADQSPESLLQLKALKPGVIQILGVKTSRFLCQRPDGALYGSLHFDPEACSFRELLLEDGYNVYQSEAHGLPLHLPGCKSPHRDPAPRGPARFLPLPGLPPAPPEPPGILAPQPPDVGSSDPLSMVGSQGRSPSYAS

SEQ ID NO: 3427 - protein, 474 aa, Artificial Sequence
  Fusion Protein
HGEGTFTSDKSQQLEKRLVRLFYEWLKKGGHSSIKPPPKGGGGGGGSGGGGSGGGGSAESKYGPPCPPCPAPEFEGGPSVFLFPPKPKDTLMISRTPEVTCVVVDVSQEDPEVQFNWYVDGVEVHNAKTKPREEQFNSTYRVVSVLTVLHQDWLNGKEYKCKVSNKGLPSSIEKTISKAKGQPREPQVYTLPPSQEEMTKNQVSLTCLVKGFYPSDIAVEWESNGQPENNYKTTPPVLDSDGSFFLYSRLTVDKSRWQEGNVFSCSVMHEALHNHYTQKSLSLSLGGGGSGSAHPIPDSSPLLQFGGQVRQRYLYTDDACQTEAHLEIREDGTVGGAADQSPESLLQLKALKPGVIQILGVKTSRFLCQRPDGALYGSLHFDPEACSFRELLLEDGYNVYQSEAHGLPLHLPGCKSPHRDPAPRGPARFLPLPGLPPAPPEPPGILAPQPPDVGSSDPLSMVYPSQGRSPSYAS

SEQ ID NO: 3428 - protein, 473 aa, Artificial Sequence
  Fusion Protein
HGEGTFTSDKSQQLEKRLVRLFYEWLKKGGHSSIKPPPKGGGGGGGSGGGGSGGGGSAESKYGPPCPPCPAPEFEGGPSVFLFPPKPKDTLMISRTPEVTCVVVDVSQEDPEVQFNWYVDGVEVHNAKTKPREEQFNSTYRVVSVLTVLHQDWLNGKEYKCKVSNKGLPSSIEKTISKAKGQPREPQVYTLPPSQEEMTKNQVSLTCLVKGFYPSDIAVEWESNGQPENNYKTTPPVLDSDGSFFLYSRLTVDKSRWQEGNVFSCSVMHEALHNHYTQKSLSLSLGGGGSGSAHPIPDSSPLLQFGGQVRQRYLYTDDACQTEAHLEIREDGTVGGAADQSPESLLQLKALKPGVIQILGVKTSRFLCQRPDGALYGSLHFDPEACSFRELLLEDGYNVYQSEAHGLPLHLCGNKSPHRDPAPRGPARFLPLPGLPPAPPEPPGILAPQPPDVGSSDPLSMVGSQGRSPSYAS

SEQ ID NO: 3429 - protein, 474 aa, Artificial Sequence
  Fusion Protein
HGEGTFTSDKSQQLEKRLVRLFYEWLKKGGHSSIKPPPKGGGGGGGSGGGGSGGGGSAESKYGPPCPPCPAPEFEGGPSVFLFPPKPKDTLMISRTPEVTCVVVDVSQEDPEVQFNWYVDGVEVHNAKTKPREEQFNSTYRVVSVLTVLHQDWLNGKEYKCKVSNKGLPSSIEKTISKAKGQPREPQVYTLPPSQEEMTKNQVSLTCLVKGFYPSDIAVEWESNGQPENNYKTTPPVLDSDGSFFLYSRLTVDKSRWQEGNVFSCSVMHEALHNHYTQKSLSLSLGGGGSGSAHPIPDSSPLLQFGGQVRQRYLYTDDACQTEAHLEIREDGTVGGAADQSPESLLQLKALKPGVIQILGVKTSRFLCQRPDGALYGSLHFDPEACSFRELLLEDGYNVYQSEAHGLPLHLCGNKSPHRDPAPRGPARFLPLPGLPPAPPEPPGILAPQPPDVGSSDPLSMVYPSQGRSPSYAS

SEQ ID NO: 3430 - protein, 471 aa, Artificial Sequence
  Fusion Protein
HGEGTFTSDKSQQLEKRLVRLFYEWLKKGGHSKGKPPPKGGGGGGGSGGGGSGGGGSADKTHTCPPCPAPEAAGGPSVFLFPPKPKDTLMISRTPEVTCVVVDVSHEDPEVKFNWYVDGVEVHNAKTKPREEQYNSTYRVVSVLTVLHQDWLNGKEYKCKVSNKALPAPIEKTISKAKGQPREPQVYTLPPSRDELTKNQVSLTCLVKGFYPSDIAVEWESNGQPENNYKTTPPVLDSDGSFFLYSKLTVDKSRWQQGNVFSCSVMHEALHNHYTQKSLSLSPGGGGSGSAHPIPDSSPLLQFGGQVRQRYLYTDDACQTEAHLEIREDGTVGGAADQSPESLLQLKALKPGVIQILGVKTSRFLCQRPDGALYGSLHFDPEACSFRELLLEDGYNVYQSEAHGLPLHLPGCKSPHRDPAPRGPARFLPLPGLPPAPPEPPGILAPQPPDVGSSDPLSMVGSQGRSPSYAS

SEQ ID NO: 3431 - protein, 472 aa, Artificial Sequence
  Fusion Protein
HGEGTFTSDKSQQLEKRLVRLFYEWLKKGGHSKGKPPPKGGGGGGGSGGGGSGGGGSADKTHTCPPCPAPEAAGGPSVFLFPPKPKDTLMISRTPEVTCVVVDVSHEDPEVKFNWYVDGVEVHNAKTKPREEQYNSTYRVVSVLTVLHQDWLNGKEYKCKVSNKALPAPIEKTISKAKGQPREPQVYTLPPSRDELTKNQVSLTCLVKGFYPSDIAVEWESNGQPENNYKTTPPVLDSDGSFFLYSKLTVDKSRWQQGNVFSCSVMHEALHNHYTQKSLSLSPGGGGSGSAHPIPDSSPLLQFGGQVRQRYLYTDDACQTEAHLEIREDGTVGGAADQSPESLLQLKALKPGVIQILGVKTSRFLCQRPDGALYGSLHFDPEACSFRELLLEDGYNVYQSEAHGLPLHLPGCKSPHRDPAPRGPARFLPLPGLPPAPPEPPGILAPQPPDVGSSDPLSMVYPSQGRSPSYAS

SEQ ID NO: 3432 - protein, 471 aa, Artificial Sequence
  Fusion Protein
HGEGTFTSDKSQQLEKRLVRLFYEWLKKGGHSKGKPPPKGGGGGGGSGGGGSGGGGSADKTHTCPPCPAPEAAGGPSVFLFPPKPKDTLMISRTPEVTCVVVDVSHEDPEVKFNWYVDGVEVHNAKTKPREEQYNSTYRVVSVLTVLHQDWLNGKEYKCKVSNKALPAPIEKTISKAKGQPREPQVYTLPPSRDELTKNQVSLTCLVKGFYPSDIAVEWESNGQPENNYKTTPPVLDSDGSFFLYSKLTVDKSRWQQGNVFSCSVMHEALHNHYTQKSLSLSPGGGGSGSAHPIPDSSPLLQFGGQVRQRYLYTDDACQTEAHLEIREDGTVGGAADQSPESLLQLKALKPGVIQILGVKTSRFLCQRPDGALYGSLHFDPEACSFRELLLEDGYNVYQSEAHGLPLHLCGNKSPHRDPAPRGPARFLPLPGLPPAPPEPPGILAPQPPDVGSSDPLSMVGSQGRSPSYAS

SEQ ID NO: 3433 - protein, 472 aa, Artificial Sequence
  Fusion Protein
HGEGTFTSDKSQQLEKRLVRLFYEWLKKGGHSKGKPPPKGGGGGGGSGGGGSGGGGSADKTHTCPPCPAPEAAGGPSVFLFPPKPKDTLMISRTPEVTCVVVDVSHEDPEVKFNWYVDGVEVHNAKTKPREEQYNSTYRVVSVLTVLHQDWLNGKEYKCKVSNKALPAPIEKTISKAKGQPREPQVYTLPPSRDELTKNQVSLTCLVKGFYPSDIAVEWESNGQPENNYKTTPPVLDSDGSFFLYSKLTVDKSRWQQGNVFSCSVMHEALHNHYTQKSLSLSPGGGGSGSAHPIPDSSPLLQFGGQVRQRYLYTDDACQTEAHLEIREDGTVGGAADQSPESLLQLKALKPGVIQILGVKTSRFLCQRPDGALYGSLHFDPEACSFRELLLEDGYNVYQSEAHGLPLHLCGNKSPHRDPAPRGPARFLPLPGLPPAPPEPPGILAPQPPDVGSSDPLSMVYPSQGRSPSYAS

SEQ ID NO: 3434 - protein, 471 aa, Artificial Sequence
  Fusion Protein
HGEGTFTSDKSQQLEKRLVRLFYEWLKKGGHSKGKPPPKGGGGGGGSGGGGSGGGGSADKTHTCPPCPAPELLGGPSVFLFPPKPKDTLMISRTPEVTCVVVDVSHEDPEVKFNWYVDGVEVHNAKTKPREEQYNNASRVVSVLTVLHQDWLNGKEYKCKVSNKALPAPIEKTISKAKGQPREPQVYTLPPSRDELTKNQVSLTCLVKGFYPSDIAVEWESNGQPENNYKTTPPVLDSDGSFFLYSKLTVDKSRWQQGNVFSCSVMHEALHNHYTQKSLSLSPGGGGSGSAHPIPDSSPLLQFGGQVRQRYLYTDDACQTEAHLEIREDGTVGGAADQSPESLLQLKALKPGVIQILGVKTSRFLCQRPDGALYGSLHFDPEACSFRELLLEDGYNVYQSEAHGLPLHLPGCKSPHRDPAPRGPARFLPLPGLPPAPPEPPGILAPQPPDVGSSDPLSMVGSQGRSPSYAS

SEQ ID NO: 3435 - protein, 472 aa, Artificial Sequence
  Fusion Protein
HGEGTFTSDKSQQLEKRLVRLFYEWLKKGGHSKGKPPPKGGGGGGGSGGGGSGGGGSADKTHTCPPCPAPELLGGPSVFLFPPKPKDTLMISRTPEVTCVVVDVSHEDPEVKFNWYVDGVEVHNAKTKPREEQYNNASRVVSVLTVLHQDWLNGKEYKCKVSNKALPAPIEKTISKAKGQPREPQVYTLPPSRDELTKNQVSLTCLVKGFYPSDIAVEWESNGQPENNYKTTPPVLDSDGSFFLYSKLTVDKSRWQQGNVFSCSVMHEALHNHYTQKSLSLSPGGGGSGSAHPIPDSSPLLQFGGQVRQRYLYTDDACQTEAHLEIREDGTVGGAADQSPESLLQLKALKPGVIQILGVKTSRFLCQRPDGALYGSLHFDPEACSFRELLLEDGYNVYQSEAHGLPLHLPGCKSPHRDPAPRGPARFLPLPGLPPAPPEPPGILAPQPPDVGSSDPLSMVYPSQGRSPSYAS

SEQ ID NO: 3436 - protein, 471 aa, Artificial Sequence
  Fusion Protein
HGEGTFTSDKSQQLEKRLVRLFYEWLKKGGHSKGKPPPKGGGGGGGSGGGGSGGGGSADKTHTCPPCPAPELLGGPSVFLFPPKPKDTLMISRTPEVTCVVVDVSHEDPEVKFNWYVDGVEVHNAKTKPREEQYNNASRVVSVLTVLHQDWLNGKEYKCKVSNKALPAPIEKTISKAKGQPREPQVYTLPPSRDELTKNQVSLTCLVKGFYPSDIAVEWESNGQPENNYKTTPPVLDSDGSFFLYSKLTVDKSRWQQGNVFSCSVMHEALHNHYTQKSLSLSPGGGGSGSAHPIPDSSPLLQFGGQVRQRYLYTDDACQTEAHLEIREDGTVGGAADQSPESLLQLKALKPGVIQILGVKTSRFLCQRPDGALYGSLHFDPEACSFRELLLEDGYNVYQSEAHGLPLHLCGNKSPHRDPAPRGPARFLPLPGLPPAPPEPPGILAPQPPDVGSSDPLSMVGSQGRSPSYAS

SEQ ID NO: 3437 - protein, 472 aa, Artificial Sequence
  Fusion Protein
HGEGTFTSDKSQQLEKRLVRLFYEWLKKGGHSKGKPPPKGGGGGGGSGGGGSGGGGSADKTHTCPPCPAPELLGGPSVFLFPPKPKDTLMISRTPEVTCVVVDVSHEDPEVKFNWYVDGVEVHNAKTKPREEQYNNASRVVSVLTVLHQDWLNGKEYKCKVSNKALPAPIEKTISKAKGQPREPQVYTLPPSRDELTKNQVSLTCLVKGFYPSDIAVEWESNGQPENNYKTTPPVLDSDGSFFLYSKLTVDKSRWQQGNVFSCSVMHEALHNHYTQKSLSLSPGGGGSGSAHPIPDSSPLLQFGGQVRQRYLYTDDACQTEAHLEIREDGTVGGAADQSPESLLQLKALKPGVIQILGVKTSRFLCQRPDGALYGSLHFDPEACSFRELLLEDGYNVYQSEAHGLPLHLCGNKSPHRDPAPRGPARFLPLPGLPPAPPEPPGILAPQPPDVGSSDPLSMVYPSQGRSPSYAS

SEQ ID NO: 3438 - protein, 473 aa, Artificial Sequence
  Fusion Protein
HGEGTFTSDKSQQLEKRLVRLFYEWLKKGGHSKGKPPPKGGGGGGGSGGGGSGGGGSAESKYGPPCPPCPAPEFEGGPSVFLFPPKPKDTLMISRTPEVTCVVVDVSQEDPEVQFNWYVDGVEVHNAKTKPREEQFNSTYRVVSVLTVLHQDWLNGKEYKCKVSNKGLPSSIEKTISKAKGQPREPQVYTLPPSQEEMTKNQVSLTCLVKGFYPSDIAVEWESNGQPENNYKTTPPVLDSDGSFFLYSRLTVDKSRWQEGNVFSCSVMHEALHNHYTQKSLSLSLGGGGSGSAHPIPDSSPLLQFGGQVRQRYLYTDDACQTEAHLEIREDGTVGGAADQSPESLLQLKALKPGVIQILGVKTSRFLCQRPDGALYGSLHFDPEACSFRELLLEDGYNVYQSEAHGLPLHLPGCKSPHRDPAPRGPARFLPLPGLPPAPPEPPGILAPQPPDVGSSDPLSMVGSQGRSPSYAS

SEQ ID NO: 3439 - protein, 474 aa, Artificial Sequence
  Fusion Protein
HGEGTFTSDKSQQLEKRLVRLFYEWLKKGGHSKGKPPPKGGGGGGGSGGGGSGGGGSAESKYGPPCPPCPAPEFEGGPSVFLFPPKPKDTLMISRTPEVTCVVVDVSQEDPEVQFNWYVDGVEVHNAKTKPREEQFNSTYRVVSVLTVLHQDWLNGKEYKCKVSNKGLPSSIEKTISKAKGQPREPQVYTLPPSQEEMTKNQVSLTCLVKGFYPSDIAVEWESNGQPENNYKTTPPVLDSDGSFFLYSRLTVDKSRWQEGNVFSCSVMHEALHNHYTQKSLSLSLGGGGSGSAHPIPDSSPLLQFGGQVRQRYLYTDDACQTEAHLEIREDGTVGGAADQSPESLLQLKALKPGVIQILGVKTSRFLCQRPDGALYGSLHFDPEACSFRELLLEDGYNVYQSEAHGLPLHLPGCKSPHRDPAPRGPARFLPLPGLPPAPPEPPGILAPQPPDVGSSDPLSMVYPSQGRSPSYAS

SEQ ID NO: 3440 - protein, 473 aa, Artificial Sequence
  Fusion Protein
HGEGTFTSDKSQQLEKRLVRLFYEWLKKGGHSKGKPPPKGGGGGGGSGGGGSGGGGSAESKYGPPCPPCPAPEFEGGPSVFLFPPKPKDTLMISRTPEVTCVVVDVSQEDPEVQFNWYVDGVEVHNAKTKPREEQFNSTYRVVSVLTVLHQDWLNGKEYKCKVSNKGLPSSIEKTISKAKGQPREPQVYTLPPSQEEMTKNQVSLTCLVKGFYPSDIAVEWESNGQPENNYKTTPPVLDSDGSFFLYSRLTVDKSRWQEGNVFSCSVMHEALHNHYTQKSLSLSLGGGGSGSAHPIPDSSPLLQFGGQVRQRYLYTDDACQTEAHLEIREDGTVGGAADQSPESLLQLKALKPGVIQILGVKTSRFLCQRPDGALYGSLHFDPEACSFRELLLEDGYNVYQSEAHGLPLHLCGNKSPHRDPAPRGPARFLPLPGLPPAPPEPPGILAPQPPDVGSSDPLSMVGSQGRSPSYAS

SEQ ID NO: 3441 - protein, 474 aa, Artificial Sequence
  Fusion Protein
HGEGTFTSDKSQQLEKRLVRLFYEWLKKGGHSKGKPPPKGGGGGGGSGGGGSGGGGSAESKYGPPCPPCPAPEFEGGPSVFLFPPKPKDTLMISRTPEVTCVVVDVSQEDPEVQFNWYVDGVEVHNAKTKPREEQFNSTYRVVSVLTVLHQDWLNGKEYKCKVSNKGLPSSIEKTISKAKGQPREPQVYTLPPSQEEMTKNQVSLTCLVKGFYPSDIAVEWESNGQPENNYKTTPPVLDSDGSFFLYSRLTVDKSRWQEGNVFSCSVMHEALHNHYTQKSLSLSLGGGGSGSAHPIPDSSPLLQFGGQVRQRYLYTDDACQTEAHLEIREDGTVGGAADQSPESLLQLKALKPGVIQILGVKTSRFLCQRPDGALYGSLHFDPEACSFRELLLEDGYNVYQSEAHGLPLHLCGNKSPHRDPAPRGPARFLPLPGLPPAPPEPPGILAPQPPDVGSSDPLSMVYPSQGRSPSYAS

SEQ ID NO: 3442 - protein, 471 aa, Artificial Sequence
  Fusion Protein
HGEGTFTSDKSQQLEKRLVRLFYEWLIKGGHSKIKPPPKGGGGGGGSGGGGSGGGGSADKTHTCPPCPAPEAAGGPSVFLFPPKPKDTLMISRTPEVTCVVVDVSHEDPEVKFNWYVDGVEVHNAKTKPREEQYNSTYRVVSVLTVLHQDWLNGKEYKCKVSNKALPAPIEKTISKAKGQPREPQVYTLPPSRDELTKNQVSLTCLVKGFYPSDIAVEWESNGQPENNYKTTPPVLDSDGSFFLYSKLTVDKSRWQQGNVFSCSVMHEALHNHYTQKSLSLSPGGGGSGSAHPIPDSSPLLQFGGQVRQRYLYTDDACQTEAHLEIREDGTVGGAADQSPESLLQLKALKPGVIQILGVKTSRFLCQRPDGALYGSLHFDPEACSFRELLLEDGYNVYQSEAHGLPLHLPGCKSPHRDPAPRGPARFLPLPGLPPAPPEPPGILAPQPPDVGSSDPLSMVGSQGRSPSYAS

SEQ ID NO: 3443 - protein, 472 aa, Artificial Sequence
  Fusion Protein
HGEGTFTSDKSQQLEKRLVRLFYEWLIKGGHSKIKPPPKGGGGGGGSGGGGSGGGGSADKTHTCPPCPAPEAAGGPSVFLFPPKPKDTLMISRTPEVTCVVVDVSHEDPEVKFNWYVDGVEVHNAKTKPREEQYNSTYRVVSVLTVLHQDWLNGKEYKCKVSNKALPAPIEKTISKAKGQPREPQVYTLPPSRDELTKNQVSLTCLVKGFYPSDIAVEWESNGQPENNYKTTPPVLDSDGSFFLYSKLTVDKSRWQQGNVFSCSVMHEALHNHYTQKSLSLSPGGGGSGSAHPIPDSSPLLQFGGQVRQRYLYTDDACQTEAHLEIREDGTVGGAADQSPESLLQLKALKPGVIQILGVKTSRFLCQRPDGALYGSLHFDPEACSFRELLLEDGYNVYQSEAHGLPLHLPGCKSPHRDPAPRGPARFLPLPGLPPAPPEPPGILAPQPPDVGSSDPLSMVYPSQGRSPSYAS

SEQ ID NO: 3444 - protein, 471 aa, Artificial Sequence
  Fusion Protein
HGEGTFTSDKSQQLEKRLVRLFYEWLIKGGHSKIKPPPKGGGGGGGSGGGGSGGGGSADKTHTCPPCPAPEAAGGPSVFLFPPKPKDTLMISRTPEVTCVVVDVSHEDPEVKFNWYVDGVEVHNAKTKPREEQYNSTYRVVSVLTVLHQDWLNGKEYKCKVSNKALPAPIEKTISKAKGQPREPQVYTLPPSRDELTKNQVSLTCLVKGFYPSDIAVEWESNGQPENNYKTTPPVLDSDGSFFLYSKLTVDKSRWQQGNVFSCSVMHEALHNHYTQKSLSLSPGGGGSGSAHPIPDSSPLLQFGGQVRQRYLYTDDACQTEAHLEIREDGTVGGAADQSPESLLQLKALKPGVIQILGVKTSRFLCQRPDGALYGSLHFDPEACSFRELLLEDGYNVYQSEAHGLPLHLCGNKSPHRDPAPRGPARFLPLPGLPPAPPEPPGILAPQPPDVGSSDPLSMVGSQGRSPSYAS

SEQ ID NO: 3445 - protein, 472 aa, Artificial Sequence
  Fusion Protein
HGEGTFTSDKSQQLEKRLVRLFYEWLIKGGHSKIKPPPKGGGGGGGSGGGGSGGGGSADKTHTCPPCPAPEAAGGPSVFLFPPKPKDTLMISRTPEVTCVVVDVSHEDPEVKFNWYVDGVEVHNAKTKPREEQYNSTYRVVSVLTVLHQDWLNGKEYKCKVSNKALPAPIEKTISKAKGQPREPQVYTLPPSRDELTKNQVSLTCLVKGFYPSDIAVEWESNGQPENNYKTTPPVLDSDGSFFLYSKLTVDKSRWQQGNVFSCSVMHEALHNHYTQKSLSLSPGGGGSGSAHPIPDSSPLLQFGGQVRQRYLYTDDACQTEAHLEIREDGTVGGAADQSPESLLQLKALKPGVIQILGVKTSRFLCQRPDGALYGSLHFDPEACSFRELLLEDGYNVYQSEAHGLPLHLCGNKSPHRDPAPRGPARFLPLPGLPPAPPEPPGILAPQPPDVGSSDPLSMVYPSQGRSPSYAS

SEQ ID NO: 3446 - protein, 471 aa, Artificial Sequence
  Fusion Protein
HGEGTFTSDKSQQLEKRLVRLFYEWLIKGGHSKIKPPPKGGGGGGGSGGGGSGGGGSADKTHTCPPCPAPELLGGPSVFLFPPKPKDTLMISRTPEVTCVVVDVSHEDPEVKFNWYVDGVEVHNAKTKPREEQYNNASRVVSVLTVLHQDWLNGKEYKCKVSNKALPAPIEKTISKAKGQPREPQVYTLPPSRDELTKNQVSLTCLVKGFYPSDIAVEWESNGQPENNYKTTPPVLDSDGSFFLYSKLTVDKSRWQQGNVFSCSVMHEALHNHYTQKSLSLSPGGGGSGSAHPIPDSSPLLQFGGQVRQRYLYTDDACQTEAHLEIREDGTVGGAADQSPESLLQLKALKPGVIQILGVKTSRFLCQRPDGALYGSLHFDPEACSFRELLLEDGYNVYQSEAHGLPLHLPGCKSPHRDPAPRGPARFLPLPGLPPAPPEPPGILAPQPPDVGSSDPLSMVGSQGRSPSYAS

SEQ ID NO: 3447 - protein, 472 aa, Artificial Sequence
  Fusion Protein
HGEGTFTSDKSQQLEKRLVRLFYEWLIKGGHSKIKPPPKGGGGGGGSGGGGSGGGGSADKTHTCPPCPAPELLGGPSVFLFPPKPKDTLMISRTPEVTCVVVDVSHEDPEVKFNWYVDGVEVHNAKTKPREEQYNNASRVVSVLTVLHQDWLNGKEYKCKVSNKALPAPIEKTISKAKGQPREPQVYTLPPSRDELTKNQVSLTCLVKGFYPSDIAVEWESNGQPENNYKTTPPVLDSDGSFFLYSKLTVDKSRWQQGNVFSCSVMHEALHNHYTQKSLSLSPGGGGSGSAHPIPDSSPLLQFGGQVRQRYLYTDDACQTEAHLEIREDGTVGGAADQSPESLLQLKALKPGVIQILGVKTSRFLCQRPDGALYGSLHFDPEACSFRELLLEDGYNVYQSEAHGLPLHLPGCKSPHRDPAPRGPARFLPLPGLPPAPPEPPGILAPQPPDVGSSDPLSMVYPSQGRSPSYAS

SEQ ID NO: 3448 - protein, 471 aa, Artificial Sequence
  Fusion Protein
HGEGTFTSDKSQQLEKRLVRLFYEWLIKGGHSKIKPPPKGGGGGGGSGGGGSGGGGSADKTHTCPPCPAPELLGGPSVFLFPPKPKDTLMISRTPEVTCVVVDVSHEDPEVKFNWYVDGVEVHNAKTKPREEQYNNASRVVSVLTVLHQDWLNGKEYKCKVSNKALPAPIEKTISKAKGQPREPQVYTLPPSRDELTKNQVSLTCLVKGFYPSDIAVEWESNGQPENNYKTTPPVLDSDGSFFLYSKLTVDKSRWQQGNVFSCSVMHEALHNHYTQKSLSLSPGGGGSGSAHPIPDSSPLLQFGGQVRQRYLYTDDACQTEAHLEIREDGTVGGAADQSPESLLQLKALKPGVIQILGVKTSRFLCQRPDGALYGSLHFDPEACSFRELLLEDGYNVYQSEAHGLPLHLCGNKSPHRDPAPRGPARFLPLPGLPPAPPEPPGILAPQPPDVGSSDPLSMVGSQGRSPSYAS

SEQ ID NO: 3449 - protein, 472 aa, Artificial Sequence
  Fusion Protein
HGEGTFTSDKSQQLEKRLVRLFYEWLIKGGHSKIKPPPKGGGGGGGSGGGGSGGGGSADKTHTCPPCPAPELLGGPSVFLFPPKPKDTLMISRTPEVTCVVVDVSHEDPEVKFNWYVDGVEVHNAKTKPREEQYNNASRVVSVLTVLHQDWLNGKEYKCKVSNKALPAPIEKTISKAKGQPREPQVYTLPPSRDELTKNQVSLTCLVKGFYPSDIAVEWESNGQPENNYKTTPPVLDSDGSFFLYSKLTVDKSRWQQGNVFSCSVMHEALHNHYTQKSLSLSPGGGGSGSAHPIPDSSPLLQFGGQVRQRYLYTDDACQTEAHLEIREDGTVGGAADQSPESLLQLKALKPGVIQILGVKTSRFLCQRPDGALYGSLHFDPEACSFRELLLEDGYNVYQSEAHGLPLHLCGNKSPHRDPAPRGPARFLPLPGLPPAPPEPPGILAPQPPDVGSSDPLSMVYPSQGRSPSYAS

SEQ ID NO: 3450 - protein, 473 aa, Artificial Sequence
  Fusion Protein
HGEGTFTSDKSQQLEKRLVRLFYEWLIKGGHSKIKPPPKGGGGGGGSGGGGSGGGGSAESKYGPPCPPCPAPEFEGGPSVFLFPPKPKDTLMISRTPEVTCVVVDVSQEDPEVQFNWYVDGVEVHNAKTKPREEQFNSTYRVVSVLTVLHQDWLNGKEYKCKVSNKGLPSSIEKTISKAKGQPREPQVYTLPPSQEEMTKNQVSLTCLVKGFYPSDIAVEWESNGQPENNYKTTPPVLDSDGSFFLYSRLTVDKSRWQEGNVFSCSVMHEALHNHYTQKSLSLSLGGGGSGSAHPIPDSSPLLQFGGQVRQRYLYTDDACQTEAHLEIREDGTVGGAADQSPESLLQLKALKPGVIQILGVKTSRFLCQRPDGALYGSLHFDPEACSFRELLLEDGYNVYQSEAHGLPLHLPGCKSPHRDPAPRGPARFLPLPGLPPAPPEPPGILAPQPPDVGSSDPLSMVGSQGRSPSYAS

SEQ ID NO: 3451 - protein, 474 aa, Artificial Sequence
  Fusion Protein
HGEGTFTSDKSQQLEKRLVRLFYEWLIKGGHSKIKPPPKGGGGGGGSGGGGSGGGGSAESKYGPPCPPCPAPEFEGGPSVFLFPPKPKDTLMISRTPEVTCVVVDVSQEDPEVQFNWYVDGVEVHNAKTKPREEQFNSTYRVVSVLTVLHQDWLNGKEYKCKVSNKGLPSSIEKTISKAKGQPREPQVYTLPPSQEEMTKNQVSLTCLVKGFYPSDIAVEWESNGQPENNYKTTPPVLDSDGSFFLYSRLTVDKSRWQEGNVFSCSVMHEALHNHYTQKSLSLSLGGGGSGSAHPIPDSSPLLQFGGQVRQRYLYTDDACQTEAHLEIREDGTVGGAADQSPESLLQLKALKPGVIQILGVKTSRFLCQRPDGALYGSLHFDPEACSFRELLLEDGYNVYQSEAHGLPLHLPGCKSPHRDPAPRGPARFLPLPGLPPAPPEPPGILAPQPPDVGSSDPLSMVYPSQGRSPSYAS

SEQ ID NO: 3452 - protein, 473 aa, Artificial Sequence
  Fusion Protein
HGEGTFTSDKSQQLEKRLVRLFYEWLIKGGHSKIKPPPKGGGGGGGSGGGGSGGGGSAESKYGPPCPPCPAPEFEGGPSVFLFPPKPKDTLMISRTPEVTCVVVDVSQEDPEVQFNWYVDGVEVHNAKTKPREEQFNSTYRVVSVLTVLHQDWLNGKEYKCKVSNKGLPSSIEKTISKAKGQPREPQVYTLPPSQEEMTKNQVSLTCLVKGFYPSDIAVEWESNGQPENNYKTTPPVLDSDGSFFLYSRLTVDKSRWQEGNVFSCSVMHEALHNHYTQKSLSLSLGGGGSGSAHPIPDSSPLLQFGGQVRQRYLYTDDACQTEAHLEIREDGTVGGAADQSPESLLQLKALKPGVIQILGVKTSRFLCQRPDGALYGSLHFDPEACSFRELLLEDGYNVYQSEAHGLPLHLCGNKSPHRDPAPRGPARFLPLPGLPPAPPEPPGILAPQPPDVGSSDPLSMVGSQGRSPSYAS

SEQ ID NO: 3453 - protein, 474 aa, Artificial Sequence
  Fusion Protein
HGEGTFTSDKSQQLEKRLVRLFYEWLIKGGHSKIKPPPKGGGGGGGSGGGGSGGGGSAESKYGPPCPPCPAPEFEGGPSVFLFPPKPKDTLMISRTPEVTCVVVDVSQEDPEVQFNWYVDGVEVHNAKTKPREEQFNSTYRVVSVLTVLHQDWLNGKEYKCKVSNKGLPSSIEKTISKAKGQPREPQVYTLPPSQEEMTKNQVSLTCLVKGFYPSDIAVEWESNGQPENNYKTTPPVLDSDGSFFLYSRLTVDKSRWQEGNVFSCSVMHEALHNHYTQKSLSLSLGGGGSGSAHPIPDSSPLLQFGGQVRQRYLYTDDACQTEAHLEIREDGTVGGAADQSPESLLQLKALKPGVIQILGVKTSRFLCQRPDGALYGSLHFDPEACSFRELLLEDGYNVYQSEAHGLPLHLCGNKSPHRDPAPRGPARFLPLPGLPPAPPEPPGILAPQPPDVGSSDPLSMVYPSQGRSPSYAS

SEQ ID NO: 3454 - protein, 471 aa, Artificial Sequence
  Fusion Protein
HGEGTFTSDKSKQLEERLARLFYEWLINGGHSSIKPPPKGGGGGGGSGGGGSGGGGSADKTHTCPPCPAPEAAGGPSVFLFPPKPKDTLMISRTPEVTCVVVDVSHEDPEVKFNWYVDGVEVHNAKTKPREEQYNSTYRVVSVLTVLHQDWLNGKEYKCKVSNKALPAPIEKTISKAKGQPREPQVYTLPPSRDELTKNQVSLTCLVKGFYPSDIAVEWESNGQPENNYKTTPPVLDSDGSFFLYSKLTVDKSRWQQGNVFSCSVMHEALHNHYTQKSLSLSPGGGGSGSAHPIPDSSPLLQFGGQVRQRYLYTDDACQTEAHLEIREDGTVGGAADQSPESLLQLKALKPGVIQILGVKTSRFLCQRPDGALYGSLHFDPEACSFRELLLEDGYNVYQSEAHGLPLHLPGCKSPHRDPAPRGPARFLPLPGLPPAPPEPPGILAPQPPDVGSSDPLSMVGSQGRSPSYAS

SEQ ID NO: 3455 - protein, 472 aa, Artificial Sequence
  Fusion Protein
HGEGTFTSDKSKQLEERLARLFYEWLINGGHSSIKPPPKGGGGGGGSGGGGSGGGGSADKTHTCPPCPAPEAAGGPSVFLFPPKPKDTLMISRTPEVTCVVVDVSHEDPEVKFNWYVDGVEVHNAKTKPREEQYNSTYRVVSVLTVLHQDWLNGKEYKCKVSNKALPAPIEKTISKAKGQPREPQVYTLPPSRDELTKNQVSLTCLVKGFYPSDIAVEWESNGQPENNYKTTPPVLDSDGSFFLYSKLTVDKSRWQQGNVFSCSVMHEALHNHYTQKSLSLSPGGGGSGSAHPIPDSSPLLQFGGQVRQRYLYTDDACQTEAHLEIREDGTVGGAADQSPESLLQLKALKPGVIQILGVKTSRFLCQRPDGALYGSLHFDPEACSFRELLLEDGYNVYQSEAHGLPLHLPGCKSPHRDPAPRGPARFLPLPGLPPAPPEPPGILAPQPPDVGSSDPLSMVYPSQGRSPSYAS

SEQ ID NO: 3456 - protein, 471 aa, Artificial Sequence
  Fusion Protein
HGEGTFTSDKSKQLEERLARLFYEWLINGGHSSIKPPPKGGGGGGGSGGGGSGGGGSADKTHTCPPCPAPEAAGGPSVFLFPPKPKDTLMISRTPEVTCVVVDVSHEDPEVKFNWYVDGVEVHNAKTKPREEQYNSTYRVVSVLTVLHQDWLNGKEYKCKVSNKALPAPIEKTISKAKGQPREPQVYTLPPSRDELTKNQVSLTCLVKGFYPSDIAVEWESNGQPENNYKTTPPVLDSDGSFFLYSKLTVDKSRWQQGNVFSCSVMHEALHNHYTQKSLSLSPGGGGSGSAHPIPDSSPLLQFGGQVRQRYLYTDDACQTEAHLEIREDGTVGGAADQSPESLLQLKALKPGVIQILGVKTSRFLCQRPDGALYGSLHFDPEACSFRELLLEDGYNVYQSEAHGLPLHLCGNKSPHRDPAPRGPARFLPLPGLPPAPPEPPGILAPQPPDVGSSDPLSMVGSQGRSPSYAS

SEQ ID NO: 3457 - protein, 472 aa, Artificial Sequence
  Fusion Protein
HGEGTFTSDKSKQLEERLARLFYEWLINGGHSSIKPPPKGGGGGGGSGGGGSGGGGSADKTHTCPPCPAPEAAGGPSVFLFPPKPKDTLMISRTPEVTCVVVDVSHEDPEVKFNWYVDGVEVHNAKTKPREEQYNSTYRVVSVLTVLHQDWLNGKEYKCKVSNKALPAPIEKTISKAKGQPREPQVYTLPPSRDELTKNQVSLTCLVKGFYPSDIAVEWESNGQPENNYKTTPPVLDSDGSFFLYSKLTVDKSRWQQGNVFSCSVMHEALHNHYTQKSLSLSPGGGGSGSAHPIPDSSPLLQFGGQVRQRYLYTDDACQTEAHLEIREDGTVGGAADQSPESLLQLKALKPGVIQILGVKTSRFLCQRPDGALYGSLHFDPEACSFRELLLEDGYNVYQSEAHGLPLHLCGNKSPHRDPAPRGPARFLPLPGLPPAPPEPPGILAPQPPDVGSSDPLSMVYPSQGRSPSYAS

SEQ ID NO: 3458 - protein, 471 aa, Artificial Sequence
  Fusion Protein
HGEGTFTSDKSKQLEERLARLFYEWLINGGHSSIKPPPKGGGGGGGSGGGGSGGGGSADKTHTCPPCPAPELLGGPSVFLFPPKPKDTLMISRTPEVTCVVVDVSHEDPEVKFNWYVDGVEVHNAKTKPREEQYNNASRVVSVLTVLHQDWLNGKEYKCKVSNKALPAPIEKTISKAKGQPREPQVYTLPPSRDELTKNQVSLTCLVKGFYPSDIAVEWESNGQPENNYKTTPPVLDSDGSFFLYSKLTVDKSRWQQGNVFSCSVMHEALHNHYTQKSLSLSPGGGGSGSAHPIPDSSPLLQFGGQVRQRYLYTDDACQTEAHLEIREDGTVGGAADQSPESLLQLKALKPGVIQILGVKTSRFLCQRPDGALYGSLHFDPEACSFRELLLEDGYNVYQSEAHGLPLHLPGCKSPHRDPAPRGPARFLPLPGLPPAPPEPPGILAPQPPDVGSSDPLSMVGSQGRSPSYAS

SEQ ID NO: 3459 - protein, 472 aa, Artificial Sequence
  Fusion Protein
HGEGTFTSDKSKQLEERLARLFYEWLINGGHSSIKPPPKGGGGGGGSGGGGSGGGGSADKTHTCPPCPAPELLGGPSVFLFPPKPKDTLMISRTPEVTCVVVDVSHEDPEVKFNWYVDGVEVHNAKTKPREEQYNNASRVVSVLTVLHQDWLNGKEYKCKVSNKALPAPIEKTISKAKGQPREPQVYTLPPSRDELTKNQVSLTCLVKGFYPSDIAVEWESNGQPENNYKTTPPVLDSDGSFFLYSKLTVDKSRWQQGNVFSCSVMHEALHNHYTQKSLSLSPGGGGSGSAHPIPDSSPLLQFGGQVRQRYLYTDDACQTEAHLEIREDGTVGGAADQSPESLLQLKALKPGVIQILGVKTSRFLCQRPDGALYGSLHFDPEACSFRELLLEDGYNVYQSEAHGLPLHLPGCKSPHRDPAPRGPARFLPLPGLPPAPPEPPGILAPQPPDVGSSDPLSMVYPSQGRSPSYAS

SEQ ID NO: 3460 - protein, 471 aa, Artificial Sequence
  Fusion Protein
HGEGTFTSDKSKQLEERLARLFYEWLINGGHSSIKPPPKGGGGGGGSGGGGSGGGGSADKTHTCPPCPAPELLGGPSVFLFPPKPKDTLMISRTPEVTCVVVDVSHEDPEVKFNWYVDGVEVHNAKTKPREEQYNNASRVVSVLTVLHQDWLNGKEYKCKVSNKALPAPIEKTISKAKGQPREPQVYTLPPSRDELTKNQVSLTCLVKGFYPSDIAVEWESNGQPENNYKTTPPVLDSDGSFFLYSKLTVDKSRWQQGNVFSCSVMHEALHNHYTQKSLSLSPGGGGSGSAHPIPDSSPLLQFGGQVRQRYLYTDDACQTEAHLEIREDGTVGGAADQSPESLLQLKALKPGVIQILGVKTSRFLCQRPDGALYGSLHFDPEACSFRELLLEDGYNVYQSEAHGLPLHLCGNKSPHRDPAPRGPARFLPLPGLPPAPPEPPGILAPQPPDVGSSDPLSMVGSQGRSPSYAS

SEQ ID NO: 3461 - protein, 472 aa, Artificial Sequence
  Fusion Protein
HGEGTFTSDKSKQLEERLARLFYEWLINGGHSSIKPPPKGGGGGGGSGGGGSGGGGSADKTHTCPPCPAPELLGGPSVFLFPPKPKDTLMISRTPEVTCVVVDVSHEDPEVKFNWYVDGVEVHNAKTKPREEQYNNASRVVSVLTVLHQDWLNGKEYKCKVSNKALPAPIEKTISKAKGQPREPQVYTLPPSRDELTKNQVSLTCLVKGFYPSDIAVEWESNGQPENNYKTTPPVLDSDGSFFLYSKLTVDKSRWQQGNVFSCSVMHEALHNHYTQKSLSLSPGGGGSGSAHPIPDSSPLLQFGGQVRQRYLYTDDACQTEAHLEIREDGTVGGAADQSPESLLQLKALKPGVIQILGVKTSRFLCQRPDGALYGSLHFDPEACSFRELLLEDGYNVYQSEAHGLPLHLCGNKSPHRDPAPRGPARFLPLPGLPPAPPEPPGILAPQPPDVGSSDPLSMVYPSQGRSPSYAS

SEQ ID NO: 3462 - protein, 473 aa, Artificial Sequence
  Fusion Protein
HGEGTFTSDKSKQLEERLARLFYEWLINGGHSSIKPPPKGGGGGGGSGGGGSGGGGSAESKYGPPCPPCPAPEFEGGPSVFLFPPKPKDTLMISRTPEVTCVVVDVSQEDPEVQFNWYVDGVEVHNAKTKPREEQFNSTYRVVSVLTVLHQDWLNGKEYKCKVSNKGLPSSIEKTISKAKGQPREPQVYTLPPSQEEMTKNQVSLTCLVKGFYPSDIAVEWESNGQPENNYKTTPPVLDSDGSFFLYSRLTVDKSRWQEGNVFSCSVMHEALHNHYTQKSLSLSLGGGGSGSAHPIPDSSPLLQFGGQVRQRYLYTDDACQTEAHLEIREDGTVGGAADQSPESLLQLKALKPGVIQILGVKTSRFLCQRPDGALYGSLHFDPEACSFRELLLEDGYNVYQSEAHGLPLHLPGCKSPHRDPAPRGPARFLPLPGLPPAPPEPPGILAPQPPDVGSSDPLSMVGSQGRSPSYAS

SEQ ID NO: 3463 - protein, 474 aa, Artificial Sequence
  Fusion Protein
HGEGTFTSDKSKQLEERLARLFYEWLINGGHSSIKPPPKGGGGGGGSGGGGSGGGGSAESKYGPPCPPCPAPEFEGGPSVFLFPPKPKDTLMISRTPEVTCVVVDVSQEDPEVQFNWYVDGVEVHNAKTKPREEQFNSTYRVVSVLTVLHQDWLNGKEYKCKVSNKGLPSSIEKTISKAKGQPREPQVYTLPPSQEEMTKNQVSLTCLVKGFYPSDIAVEWESNGQPENNYKTTPPVLDSDGSFFLYSRLTVDKSRWQEGNVFSCSVMHEALHNHYTQKSLSLSLGGGGSGSAHPIPDSSPLLQFGGQVRQRYLYTDDACQTEAHLEIREDGTVGGAADQSPESLLQLKALKPGVIQILGVKTSRFLCQRPDGALYGSLHFDPEACSFRELLLEDGYNVYQSEAHGLPLHLPGCKSPHRDPAPRGPARFLPLPGLPPAPPEPPGILAPQPPDVGSSDPLSMVYPSQGRSPSYAS

SEQ ID NO: 3464 - protein, 473 aa, Artificial Sequence
  Fusion Protein
HGEGTFTSDKSKQLEERLARLFYEWLINGGHSSIKPPPKGGGGGGGSGGGGSGGGGSAESKYGPPCPPCPAPEFEGGPSVFLFPPKPKDTLMISRTPEVTCVVVDVSQEDPEVQFNWYVDGVEVHNAKTKPREEQFNSTYRVVSVLTVLHQDWLNGKEYKCKVSNKGLPSSIEKTISKAKGQPREPQVYTLPPSQEEMTKNQVSLTCLVKGFYPSDIAVEWESNGQPENNYKTTPPVLDSDGSFFLYSRLTVDKSRWQEGNVFSCSVMHEALHNHYTQKSLSLSLGGGGSGSAHPIPDSSPLLQFGGQVRQRYLYTDDACQTEAHLEIREDGTVGGAADQSPESLLQLKALKPGVIQILGVKTSRFLCQRPDGALYGSLHFDPEACSFRELLLEDGYNVYQSEAHGLPLHLCGNKSPHRDPAPRGPARFLPLPGLPPAPPEPPGILAPQPPDVGSSDPLSMVGSQGRSPSYAS

SEQ ID NO: 3465 - protein, 474 aa, Artificial Sequence
  Fusion Protein
HGEGTFTSDKSKQLEERLARLFYEWLINGGHSSIKPPPKGGGGGGGSGGGGSGGGGSAESKYGPPCPPCPAPEFEGGPSVFLFPPKPKDTLMISRTPEVTCVVVDVSQEDPEVQFNWYVDGVEVHNAKTKPREEQFNSTYRVVSVLTVLHQDWLNGKEYKCKVSNKGLPSSIEKTISKAKGQPREPQVYTLPPSQEEMTKNQVSLTCLVKGFYPSDIAVEWESNGQPENNYKTTPPVLDSDGSFFLYSRLTVDKSRWQEGNVFSCSVMHEALHNHYTQKSLSLSLGGGGSGSAHPIPDSSPLLQFGGQVRQRYLYTDDACQTEAHLEIREDGTVGGAADQSPESLLQLKALKPGVIQILGVKTSRFLCQRPDGALYGSLHFDPEACSFRELLLEDGYNVYQSEAHGLPLHLCGNKSPHRDPAPRGPARFLPLPGLPPAPPEPPGILAPQPPDVGSSDPLSMVYPSQGRSPSYAS

SEQ ID NO: 3466 - protein, 471 aa, Artificial Sequence
  Fusion Protein
HGEGTFTSDKSKQLEERLARLFYEWLKAGGHSSIKPPPKGGGGGGGSGGGGSGGGGSADKTHTCPPCPAPEAAGGPSVFLFPPKPKDTLMISRTPEVTCVVVDVSHEDPEVKFNWYVDGVEVHNAKTKPREEQYNSTYRVVSVLTVLHQDWLNGKEYKCKVSNKALPAPIEKTISKAKGQPREPQVYTLPPSRDELTKNQVSLTCLVKGFYPSDIAVEWESNGQPENNYKTTPPVLDSDGSFFLYSKLTVDKSRWQQGNVFSCSVMHEALHNHYTQKSLSLSPGGGGSGSAHPIPDSSPLLQFGGQVRQRYLYTDDACQTEAHLEIREDGTVGGAADQSPESLLQLKALKPGVIQILGVKTSRFLCQRPDGALYGSLHFDPEACSFRELLLEDGYNVYQSEAHGLPLHLPGCKSPHRDPAPRGPARFLPLPGLPPAPPEPPGILAPQPPDVGSSDPLSMVGSQGRSPSYAS

SEQ ID NO: 3467 - protein, 472 aa, Artificial Sequence
  Fusion Protein
HGEGTFTSDKSKQLEERLARLFYEWLKAGGHSSIKPPPKGGGGGGGSGGGGSGGGGSADKTHTCPPCPAPEAAGGPSVFLFPPKPKDTLMISRTPEVTCVVVDVSHEDPEVKFNWYVDGVEVHNAKTKPREEQYNSTYRVVSVLTVLHQDWLNGKEYKCKVSNKALPAPIEKTISKAKGQPREPQVYTLPPSRDELTKNQVSLTCLVKGFYPSDIAVEWESNGQPENNYKTTPPVLDSDGSFFLYSKLTVDKSRWQQGNVFSCSVMHEALHNHYTQKSLSLSPGGGGSGSAHPIPDSSPLLQFGGQVRQRYLYTDDACQTEAHLEIREDGTVGGAADQSPESLLQLKALKPGVIQILGVKTSRFLCQRPDGALYGSLHFDPEACSFRELLLEDGYNVYQSEAHGLPLHLPGCKSPHRDPAPRGPARFLPLPGLPPAPPEPPGILAPQPPDVGSSDPLSMVYPSQGRSPSYAS

SEQ ID NO: 3468 - protein, 471 aa, Artificial Sequence
  Fusion Protein
HGEGTFTSDKSKQLEERLARLFYEWLKAGGHSSIKPPPKGGGGGGGSGGGGSGGGGSADKTHTCPPCPAPEAAGGPSVFLFPPKPKDTLMISRTPEVTCVVVDVSHEDPEVKFNWYVDGVEVHNAKTKPREEQYNSTYRVVSVLTVLHQDWLNGKEYKCKVSNKALPAPIEKTISKAKGQPREPQVYTLPPSRDELTKNQVSLTCLVKGFYPSDIAVEWESNGQPENNYKTTPPVLDSDGSFFLYSKLTVDKSRWQQGNVFSCSVMHEALHNHYTQKSLSLSPGGGGSGSAHPIPDSSPLLQFGGQVRQRYLYTDDACQTEAHLEIREDGTVGGAADQSPESLLQLKALKPGVIQILGVKTSRFLCQRPDGALYGSLHFDPEACSFRELLLEDGYNVYQSEAHGLPLHLCGNKSPHRDPAPRGPARFLPLPGLPPAPPEPPGILAPQPPDVGSSDPLSMVGSQGRSPSYAS

SEQ ID NO: 3469 - protein, 472 aa, Artificial Sequence
  Fusion Protein
HGEGTFTSDKSKQLEERLARLFYEWLKAGGHSSIKPPPKGGGGGGGSGGGGSGGGGSADKTHTCPPCPAPEAAGGPSVFLFPPKPKDTLMISRTPEVTCVVVDVSHEDPEVKFNWYVDGVEVHNAKTKPREEQYNSTYRVVSVLTVLHQDWLNGKEYKCKVSNKALPAPIEKTISKAKGQPREPQVYTLPPSRDELTKNQVSLTCLVKGFYPSDIAVEWESNGQPENNYKTTPPVLDSDGSFFLYSKLTVDKSRWQQGNVFSCSVMHEALHNHYTQKSLSLSPGGGGSGSAHPIPDSSPLLQFGGQVRQRYLYTDDACQTEAHLEIREDGTVGGAADQSPESLLQLKALKPGVIQILGVKTSRFLCQRPDGALYGSLHFDPEACSFRELLLEDGYNVYQSEAHGLPLHLCGNKSPHRDPAPRGPARFLPLPGLPPAPPEPPGILAPQPPDVGSSDPLSMVYPSQGRSPSYAS

SEQ ID NO: 3470 - protein, 471 aa, Artificial Sequence
  Fusion Protein
HGEGTFTSDKSKQLEERLARLFYEWLKAGGHSSIKPPPKGGGGGGGSGGGGSGGGGSADKTHTCPPCPAPELLGGPSVFLFPPKPKDTLMISRTPEVTCVVVDVSHEDPEVKFNWYVDGVEVHNAKTKPREEQYNNASRVVSVLTVLHQDWLNGKEYKCKVSNKALPAPIEKTISKAKGQPREPQVYTLPPSRDELTKNQVSLTCLVKGFYPSDIAVEWESNGQPENNYKTTPPVLDSDGSFFLYSKLTVDKSRWQQGNVFSCSVMHEALHNHYTQKSLSLSPGGGGSGSAHPIPDSSPLLQFGGQVRQRYLYTDDACQTEAHLEIREDGTVGGAADQSPESLLQLKALKPGVIQILGVKTSRFLCQRPDGALYGSLHFDPEACSFRELLLEDGYNVYQSEAHGLPLHLPGCKSPHRDPAPRGPARFLPLPGLPPAPPEPPGILAPQPPDVGSSDPLSMVGSQGRSPSYAS

SEQ ID NO: 3471 - protein, 472 aa, Artificial Sequence
  Fusion Protein
HGEGTFTSDKSKQLEERLARLFYEWLKAGGHSSIKPPPKGGGGGGGSGGGGSGGGGSADKTHTCPPCPAPELLGGPSVFLFPPKPKDTLMISRTPEVTCVVVDVSHEDPEVKFNWYVDGVEVHNAKTKPREEQYNNASRVVSVLTVLHQDWLNGKEYKCKVSNKALPAPIEKTISKAKGQPREPQVYTLPPSRDELTKNQVSLTCLVKGFYPSDIAVEWESNGQPENNYKTTPPVLDSDGSFFLYSKLTVDKSRWQQGNVFSCSVMHEALHNHYTQKSLSLSPGGGGSGSAHPIPDSSPLLQFGGQVRQRYLYTDDACQTEAHLEIREDGTVGGAADQSPESLLQLKALKPGVIQILGVKTSRFLCQRPDGALYGSLHFDPEACSFRELLLEDGYNVYQSEAHGLPLHLPGCKSPHRDPAPRGPARFLPLPGLPPAPPEPPGILAPQPPDVGSSDPLSMVYPSQGRSPSYAS

SEQ ID NO: 3472 - protein, 471 aa, Artificial Sequence
  Fusion Protein
HGEGTFTSDKSKQLEERLARLFYEWLKAGGHSSIKPPPKGGGGGGGSGGGGSGGGGSADKTHTCPPCPAPELLGGPSVFLFPPKPKDTLMISRTPEVTCVVVDVSHEDPEVKFNWYVDGVEVHNAKTKPREEQYNNASRVVSVLTVLHQDWLNGKEYKCKVSNKALPAPIEKTISKAKGQPREPQVYTLPPSRDELTKNQVSLTCLVKGFYPSDIAVEWESNGQPENNYKTTPPVLDSDGSFFLYSKLTVDKSRWQQGNVFSCSVMHEALHNHYTQKSLSLSPGGGGSGSAHPIPDSSPLLQFGGQVRQRYLYTDDACQTEAHLEIREDGTVGGAADQSPESLLQLKALKPGVIQILGVKTSRFLCQRPDGALYGSLHFDPEACSFRELLLEDGYNVYQSEAHGLPLHLCGNKSPHRDPAPRGPARFLPLPGLPPAPPEPPGILAPQPPDVGSSDPLSMVGSQGRSPSYAS

SEQ ID NO: 3473 - protein, 472 aa, Artificial Sequence
  Fusion Protein
HGEGTFTSDKSKQLEERLARLFYEWLKAGGHSSIKPPPKGGGGGGGSGGGGSGGGGSADKTHTCPPCPAPELLGGPSVFLFPPKPKDTLMISRTPEVTCVVVDVSHEDPEVKFNWYVDGVEVHNAKTKPREEQYNNASRVVSVLTVLHQDWLNGKEYKCKVSNKALPAPIEKTISKAKGQPREPQVYTLPPSRDELTKNQVSLTCLVKGFYPSDIAVEWESNGQPENNYKTTPPVLDSDGSFFLYSKLTVDKSRWQQGNVFSCSVMHEALHNHYTQKSLSLSPGGGGSGSAHPIPDSSPLLQFGGQVRQRYLYTDDACQTEAHLEIREDGTVGGAADQSPESLLQLKALKPGVIQILGVKTSRFLCQRPDGALYGSLHFDPEACSFRELLLEDGYNVYQSEAHGLPLHLCGNKSPHRDPAPRGPARFLPLPGLPPAPPEPPGILAPQPPDVGSSDPLSMVYPSQGRSPSYAS

SEQ ID NO: 3474 - protein, 473 aa, Artificial Sequence
  Fusion Protein
HGEGTFTSDKSKQLEERLARLFYEWLKAGGHSSIKPPPKGGGGGGGSGGGGSGGGGSAESKYGPPCPPCPAPEFEGGPSVFLFPPKPKDTLMISRTPEVTCVVVDVSQEDPEVQFNWYVDGVEVHNAKTKPREEQFNSTYRVVSVLTVLHQDWLNGKEYKCKVSNKGLPSSIEKTISKAKGQPREPQVYTLPPSQEEMTKNQVSLTCLVKGFYPSDIAVEWESNGQPENNYKTTPPVLDSDGSFFLYSRLTVDKSRWQEGNVFSCSVMHEALHNHYTQKSLSLSLGGGGSGSAHPIPDSSPLLQFGGQVRQRYLYTDDACQTEAHLEIREDGTVGGAADQSPESLLQLKALKPGVIQILGVKTSRFLCQRPDGALYGSLHFDPEACSFRELLLEDGYNVYQSEAHGLPLHLPGCKSPHRDPAPRGPARFLPLPGLPPAPPEPPGILAPQPPDVGSSDPLSMVGSQGRSPSYAS

SEQ ID NO: 3475 - protein, 474 aa, Artificial Sequence
  Fusion Protein
HGEGTFTSDKSKQLEERLARLFYEWLKAGGHSSIKPPPKGGGGGGGSGGGGSGGGGSAESKYGPPCPPCPAPEFEGGPSVFLFPPKPKDTLMISRTPEVTCVVVDVSQEDPEVQFNWYVDGVEVHNAKTKPREEQFNSTYRVVSVLTVLHQDWLNGKEYKCKVSNKGLPSSIEKTISKAKGQPREPQVYTLPPSQEEMTKNQVSLTCLVKGFYPSDIAVEWESNGQPENNYKTTPPVLDSDGSFFLYSRLTVDKSRWQEGNVFSCSVMHEALHNHYTQKSLSLSLGGGGSGSAHPIPDSSPLLQFGGQVRQRYLYTDDACQTEAHLEIREDGTVGGAADQSPESLLQLKALKPGVIQILGVKTSRFLCQRPDGALYGSLHFDPEACSFRELLLEDGYNVYQSEAHGLPLHLPGCKSPHRDPAPRGPARFLPLPGLPPAPPEPPGILAPQPPDVGSSDPLSMVYPSQGRSPSYAS

SEQ ID NO: 3476 - protein, 473 aa, Artificial Sequence
  Fusion Protein
HGEGTFTSDKSKQLEERLARLFYEWLKAGGHSSIKPPPKGGGGGGGSGGGGSGGGGSAESKYGPPCPPCPAPEFEGGPSVFLFPPKPKDTLMISRTPEVTCVVVDVSQEDPEVQFNWYVDGVEVHNAKTKPREEQFNSTYRVVSVLTVLHQDWLNGKEYKCKVSNKGLPSSIEKTISKAKGQPREPQVYTLPPSQEEMTKNQVSLTCLVKGFYPSDIAVEWESNGQPENNYKTTPPVLDSDGSFFLYSRLTVDKSRWQEGNVFSCSVMHEALHNHYTQKSLSLSLGGGGSGSAHPIPDSSPLLQFGGQVRQRYLYTDDACQTEAHLEIREDGTVGGAADQSPESLLQLKALKPGVIQILGVKTSRFLCQRPDGALYGSLHFDPEACSFRELLLEDGYNVYQSEAHGLPLHLCGNKSPHRDPAPRGPARFLPLPGLPPAPPEPPGILAPQPPDVGSSDPLSMVGSQGRSPSYAS

SEQ ID NO: 3477 - protein, 474 aa, Artificial Sequence
  Fusion Protein
HGEGTFTSDKSKQLEERLARLFYEWLKAGGHSSIKPPPKGGGGGGGSGGGGSGGGGSAESKYGPPCPPCPAPEFEGGPSVFLFPPKPKDTLMISRTPEVTCVVVDVSQEDPEVQFNWYVDGVEVHNAKTKPREEQFNSTYRVVSVLTVLHQDWLNGKEYKCKVSNKGLPSSIEKTISKAKGQPREPQVYTLPPSQEEMTKNQVSLTCLVKGFYPSDIAVEWESNGQPENNYKTTPPVLDSDGSFFLYSRLTVDKSRWQEGNVFSCSVMHEALHNHYTQKSLSLSLGGGGSGSAHPIPDSSPLLQFGGQVRQRYLYTDDACQTEAHLEIREDGTVGGAADQSPESLLQLKALKPGVIQILGVKTSRFLCQRPDGALYGSLHFDPEACSFRELLLEDGYNVYQSEAHGLPLHLCGNKSPHRDPAPRGPARFLPLPGLPPAPPEPPGILAPQPPDVGSSDPLSMVYPSQGRSPSYAS

SEQ ID NO: 3478 - protein, 471 aa, Artificial Sequence
  Fusion Protein
HGEGTFTSDKSKQLEERLARLFYEWLKAGGHSKGKPPPKGGGGGGGSGGGGSGGGGSADKTHTCPPCPAPEAAGGPSVFLFPPKPKDTLMISRTPEVTCVVVDVSHEDPEVKFNWYVDGVEVHNAKTKPREEQYNSTYRVVSVLTVLHQDWLNGKEYKCKVSNKALPAPIEKTISKAKGQPREPQVYTLPPSRDELTKNQVSLTCLVKGFYPSDIAVEWESNGQPENNYKTTPPVLDSDGSFFLYSKLTVDKSRWQQGNVFSCSVMHEALHNHYTQKSLSLSPGGGGSGSAHPIPDSSPLLQFGGQVRQRYLYTDDACQTEAHLEIREDGTVGGAADQSPESLLQLKALKPGVIQILGVKTSRFLCQRPDGALYGSLHFDPEACSFRELLLEDGYNVYQSEAHGLPLHLPGCKSPHRDPAPRGPARFLPLPGLPPAPPEPPGILAPQPPDVGSSDPLSMVGSQGRSPSYAS

SEQ ID NO: 3479 - protein, 472 aa, Artificial Sequence
  Fusion Protein
HGEGTFTSDKSKQLEERLARLFYEWLKAGGHSKGKPPPKGGGGGGGSGGGGSGGGGSADKTHTCPPCPAPEAAGGPSVFLFPPKPKDTLMISRTPEVTCVVVDVSHEDPEVKFNWYVDGVEVHNAKTKPREEQYNSTYRVVSVLTVLHQDWLNGKEYKCKVSNKALPAPIEKTISKAKGQPREPQVYTLPPSRDELTKNQVSLTCLVKGFYPSDIAVEWESNGQPENNYKTTPPVLDSDGSFFLYSKLTVDKSRWQQGNVFSCSVMHEALHNHYTQKSLSLSPGGGGSGSAHPIPDSSPLLQFGGQVRQRYLYTDDACQTEAHLEIREDGTVGGAADQSPESLLQLKALKPGVIQILGVKTSRFLCQRPDGALYGSLHFDPEACSFRELLLEDGYNVYQSEAHGLPLHLPGCKSPHRDPAPRGPARFLPLPGLPPAPPEPPGILAPQPPDVGSSDPLSMVYPSQGRSPSYAS

SEQ ID NO: 3480 - protein, 471 aa, Artificial Sequence
  Fusion Protein
HGEGTFTSDKSKQLEERLARLFYEWLKAGGHSKGKPPPKGGGGGGGSGGGGSGGGGSADKTHTCPPCPAPEAAGGPSVFLFPPKPKDTLMISRTPEVTCVVVDVSHEDPEVKFNWYVDGVEVHNAKTKPREEQYNSTYRVVSVLTVLHQDWLNGKEYKCKVSNKALPAPIEKTISKAKGQPREPQVYTLPPSRDELTKNQVSLTCLVKGFYPSDIAVEWESNGQPENNYKTTPPVLDSDGSFFLYSKLTVDKSRWQQGNVFSCSVMHEALHNHYTQKSLSLSPGGGGSGSAHPIPDSSPLLQFGGQVRQRYLYTDDACQTEAHLEIREDGTVGGAADQSPESLLQLKALKPGVIQILGVKTSRFLCQRPDGALYGSLHFDPEACSFRELLLEDGYNVYQSEAHGLPLHLCGNKSPHRDPAPRGPARFLPLPGLPPAPPEPPGILAPQPPDVGSSDPLSMVGSQGRSPSYAS

SEQ ID NO: 3481 - protein, 472 aa, Artificial Sequence
  Fusion Protein
HGEGTFTSDKSKQLEERLARLFYEWLKAGGHSKGKPPPKGGGGGGGSGGGGSGGGGSADKTHTCPPCPAPEAAGGPSVFLFPPKPKDTLMISRTPEVTCVVVDVSHEDPEVKFNWYVDGVEVHNAKTKPREEQYNSTYRVVSVLTVLHQDWLNGKEYKCKVSNKALPAPIEKTISKAKGQPREPQVYTLPPSRDELTKNQVSLTCLVKGFYPSDIAVEWESNGQPENNYKTTPPVLDSDGSFFLYSKLTVDKSRWQQGNVFSCSVMHEALHNHYTQKSLSLSPGGGGSGSAHPIPDSSPLLQFGGQVRQRYLYTDDACQTEAHLEIREDGTVGGAADQSPESLLQLKALKPGVIQILGVKTSRFLCQRPDGALYGSLHFDPEACSFRELLLEDGYNVYQSEAHGLPLHLCGNKSPHRDPAPRGPARFLPLPGLPPAPPEPPGILAPQPPDVGSSDPLSMVYPSQGRSPSYAS

SEQ ID NO: 3482 - protein, 471 aa, Artificial Sequence
  Fusion Protein
HGEGTFTSDKSKQLEERLARLFYEWLKAGGHSKGKPPPKGGGGGGGSGGGGSGGGGSADKTHTCPPCPAPELLGGPSVFLFPPKPKDTLMISRTPEVTCVVVDVSHEDPEVKFNWYVDGVEVHNAKTKPREEQYNNASRVVSVLTVLHQDWLNGKEYKCKVSNKALPAPIEKTISKAKGQPREPQVYTLPPSRDELTKNQVSLTCLVKGFYPSDIAVEWESNGQPENNYKTTPPVLDSDGSFFLYSKLTVDKSRWQQGNVFSCSVMHEALHNHYTQKSLSLSPGGGGSGSAHPIPDSSPLLQFGGQVRQRYLYTDDACQTEAHLEIREDGTVGGAADQSPESLLQLKALKPGVIQILGVKTSRFLCQRPDGALYGSLHFDPEACSFRELLLEDGYNVYQSEAHGLPLHLPGCKSPHRDPAPRGPARFLPLPGLPPAPPEPPGILAPQPPDVGSSDPLSMVGSQGRSPSYAS

SEQ ID NO: 3483 - protein, 472 aa, Artificial Sequence
  Fusion Protein
HGEGTFTSDKSKQLEERLARLFYEWLKAGGHSKGKPPPKGGGGGGGSGGGGSGGGGSADKTHTCPPCPAPELLGGPSVFLFPPKPKDTLMISRTPEVTCVVVDVSHEDPEVKFNWYVDGVEVHNAKTKPREEQYNNASRVVSVLTVLHQDWLNGKEYKCKVSNKALPAPIEKTISKAKGQPREPQVYTLPPSRDELTKNQVSLTCLVKGFYPSDIAVEWESNGQPENNYKTTPPVLDSDGSFFLYSKLTVDKSRWQQGNVFSCSVMHEALHNHYTQKSLSLSPGGGGSGSAHPIPDSSPLLQFGGQVRQRYLYTDDACQTEAHLEIREDGTVGGAADQSPESLLQLKALKPGVIQILGVKTSRFLCQRPDGALYGSLHFDPEACSFRELLLEDGYNVYQSEAHGLPLHLPGCKSPHRDPAPRGPARFLPLPGLPPAPPEPPGILAPQPPDVGSSDPLSMVYPSQGRSPSYAS

SEQ ID NO: 3484 - protein, 471 aa, Artificial Sequence
  Fusion Protein
HGEGTFTSDKSKQLEERLARLFYEWLKAGGHSKGKPPPKGGGGGGGSGGGGSGGGGSADKTHTCPPCPAPELLGGPSVFLFPPKPKDTLMISRTPEVTCVVVDVSHEDPEVKFNWYVDGVEVHNAKTKPREEQYNNASRVVSVLTVLHQDWLNGKEYKCKVSNKALPAPIEKTISKAKGQPREPQVYTLPPSRDELTKNQVSLTCLVKGFYPSDIAVEWESNGQPENNYKTTPPVLDSDGSFFLYSKLTVDKSRWQQGNVFSCSVMHEALHNHYTQKSLSLSPGGGGSGSAHPIPDSSPLLQFGGQVRQRYLYTDDACQTEAHLEIREDGTVGGAADQSPESLLQLKALKPGVIQILGVKTSRFLCQRPDGALYGSLHFDPEACSFRELLLEDGYNVYQSEAHGLPLHLCGNKSPHRDPAPRGPARFLPLPGLPPAPPEPPGILAPQPPDVGSSDPLSMVGSQGRSPSYAS

SEQ ID NO: 3485 - protein, 472 aa, Artificial Sequence
  Fusion Protein
HGEGTFTSDKSKQLEERLARLFYEWLKAGGHSKGKPPPKGGGGGGGSGGGGSGGGGSADKTHTCPPCPAPELLGGPSVFLFPPKPKDTLMISRTPEVTCVVVDVSHEDPEVKFNWYVDGVEVHNAKTKPREEQYNNASRVVSVLTVLHQDWLNGKEYKCKVSNKALPAPIEKTISKAKGQPREPQVYTLPPSRDELTKNQVSLTCLVKGFYPSDIAVEWESNGQPENNYKTTPPVLDSDGSFFLYSKLTVDKSRWQQGNVFSCSVMHEALHNHYTQKSLSLSPGGGGSGSAHPIPDSSPLLQFGGQVRQRYLYTDDACQTEAHLEIREDGTVGGAADQSPESLLQLKALKPGVIQILGVKTSRFLCQRPDGALYGSLHFDPEACSFRELLLEDGYNVYQSEAHGLPLHLCGNKSPHRDPAPRGPARFLPLPGLPPAPPEPPGILAPQPPDVGSSDPLSMVYPSQGRSPSYAS

SEQ ID NO: 3486 - protein, 473 aa, Artificial Sequence
  Fusion Protein
HGEGTFTSDKSKQLEERLARLFYEWLKAGGHSKGKPPPKGGGGGGGSGGGGSGGGGSAESKYGPPCPPCPAPEFEGGPSVFLFPPKPKDTLMISRTPEVTCVVVDVSQEDPEVQFNWYVDGVEVHNAKTKPREEQFNSTYRVVSVLTVLHQDWLNGKEYKCKVSNKGLPSSIEKTISKAKGQPREPQVYTLPPSQEEMTKNQVSLTCLVKGFYPSDIAVEWESNGQPENNYKTTPPVLDSDGSFFLYSRLTVDKSRWQEGNVFSCSVMHEALHNHYTQKSLSLSLGGGGSGSAHPIPDSSPLLQFGGQVRQRYLYTDDACQTEAHLEIREDGTVGGAADQSPESLLQLKALKPGVIQILGVKTSRFLCQRPDGALYGSLHFDPEACSFRELLLEDGYNVYQSEAHGLPLHLPGCKSPHRDPAPRGPARFLPLPGLPPAPPEPPGILAPQPPDVGSSDPLSMVGSQGRSPSYAS

SEQ ID NO: 3487 - protein, 474 aa, Artificial Sequence
  Fusion Protein
HGEGTFTSDKSKQLEERLARLFYEWLKAGGHSKGKPPPKGGGGGGGSGGGGSGGGGSAESKYGPPCPPCPAPEFEGGPSVFLFPPKPKDTLMISRTPEVTCVVVDVSQEDPEVQFNWYVDGVEVHNAKTKPREEQFNSTYRVVSVLTVLHQDWLNGKEYKCKVSNKGLPSSIEKTISKAKGQPREPQVYTLPPSQEEMTKNQVSLTCLVKGFYPSDIAVEWESNGQPENNYKTTPPVLDSDGSFFLYSRLTVDKSRWQEGNVFSCSVMHEALHNHYTQKSLSLSLGGGGSGSAHPIPDSSPLLQFGGQVRQRYLYTDDACQTEAHLEIREDGTVGGAADQSPESLLQLKALKPGVIQILGVKTSRFLCQRPDGALYGSLHFDPEACSFRELLLEDGYNVYQSEAHGLPLHLPGCKSPHRDPAPRGPARFLPLPGLPPAPPEPPGILAPQPPDVGSSDPLSMVYPSQGRSPSYAS

SEQ ID NO: 3488 - protein, 473 aa, Artificial Sequence
  Fusion Protein
HGEGTFTSDKSKQLEERLARLFYEWLKAGGHSKGKPPPKGGGGGGGSGGGGSGGGGSAESKYGPPCPPCPAPEFEGGPSVFLFPPKPKDTLMISRTPEVTCVVVDVSQEDPEVQFNWYVDGVEVHNAKTKPREEQFNSTYRVVSVLTVLHQDWLNGKEYKCKVSNKGLPSSIEKTISKAKGQPREPQVYTLPPSQEEMTKNQVSLTCLVKGFYPSDIAVEWESNGQPENNYKTTPPVLDSDGSFFLYSRLTVDKSRWQEGNVFSCSVMHEALHNHYTQKSLSLSLGGGGSGSAHPIPDSSPLLQFGGQVRQRYLYTDDACQTEAHLEIREDGTVGGAADQSPESLLQLKALKPGVIQILGVKTSRFLCQRPDGALYGSLHFDPEACSFRELLLEDGYNVYQSEAHGLPLHLCGNKSPHRDPAPRGPARFLPLPGLPPAPPEPPGILAPQPPDVGSSDPLSMVGSQGRSPSYAS

SEQ ID NO: 3489 - protein, 474 aa, Artificial Sequence
  Fusion Protein
HGEGTFTSDKSKQLEERLARLFYEWLKAGGHSKGKPPPKGGGGGGGSGGGGSGGGGSAESKYGPPCPPCPAPEFEGGPSVFLFPPKPKDTLMISRTPEVTCVVVDVSQEDPEVQFNWYVDGVEVHNAKTKPREEQFNSTYRVVSVLTVLHQDWLNGKEYKCKVSNKGLPSSIEKTISKAKGQPREPQVYTLPPSQEEMTKNQVSLTCLVKGFYPSDIAVEWESNGQPENNYKTTPPVLDSDGSFFLYSRLTVDKSRWQEGNVFSCSVMHEALHNHYTQKSLSLSLGGGGSGSAHPIPDSSPLLQFGGQVRQRYLYTDDACQTEAHLEIREDGTVGGAADQSPESLLQLKALKPGVIQILGVKTSRFLCQRPDGALYGSLHFDPEACSFRELLLEDGYNVYQSEAHGLPLHLCGNKSPHRDPAPRGPARFLPLPGLPPAPPEPPGILAPQPPDVGSSDPLSMVYPSQGRSPSYAS

SEQ ID NO: 3490 - protein, 471 aa, Artificial Sequence
  Fusion Protein
HGEGTFTSDKSKQLEERLARLFYEWLIAGGHSKIKPPPKGGGGGGGSGGGGSGGGGSADKTHTCPPCPAPEAAGGPSVFLFPPKPKDTLMISRTPEVTCVVVDVSHEDPEVKFNWYVDGVEVHNAKTKPREEQYNSTYRVVSVLTVLHQDWLNGKEYKCKVSNKALPAPIEKTISKAKGQPREPQVYTLPPSRDELTKNQVSLTCLVKGFYPSDIAVEWESNGQPENNYKTTPPVLDSDGSFFLYSKLTVDKSRWQQGNVFSCSVMHEALHNHYTQKSLSLSPGGGGSGSAHPIPDSSPLLQFGGQVRQRYLYTDDACQTEAHLEIREDGTVGGAADQSPESLLQLKALKPGVIQILGVKTSRFLCQRPDGALYGSLHFDPEACSFRELLLEDGYNVYQSEAHGLPLHLPGCKSPHRDPAPRGPARFLPLPGLPPAPPEPPGILAPQPPDVGSSDPLSMVGSQGRSPSYAS

SEQ ID NO: 3491 - protein, 472 aa, Artificial Sequence
  Fusion Protein
HGEGTFTSDKSKQLEERLARLFYEWLIAGGHSKIKPPPKGGGGGGGSGGGGSGGGGSADKTHTCPPCPAPEAAGGPSVFLFPPKPKDTLMISRTPEVTCVVVDVSHEDPEVKFNWYVDGVEVHNAKTKPREEQYNSTYRVVSVLTVLHQDWLNGKEYKCKVSNKALPAPIEKTISKAKGQPREPQVYTLPPSRDELTKNQVSLTCLVKGFYPSDIAVEWESNGQPENNYKTTPPVLDSDGSFFLYSKLTVDKSRWQQGNVFSCSVMHEALHNHYTQKSLSLSPGGGGSGSAHPIPDSSPLLQFGGQVRQRYLYTDDACQTEAHLEIREDGTVGGAADQSPESLLQLKALKPGVIQILGVKTSRFLCQRPDGALYGSLHFDPEACSFRELLLEDGYNVYQSEAHGLPLHLPGCKSPHRDPAPRGPARFLPLPGLPPAPPEPPGILAPQPPDVGSSDPLSMVYPSQGRSPSYAS

SEQ ID NO: 3492 - protein, 471 aa, Artificial Sequence
  Fusion Protein
HGEGTFTSDKSKQLEERLARLFYEWLIAGGHSKIKPPPKGGGGGGGSGGGGSGGGGSADKTHTCPPCPAPEAAGGPSVFLFPPKPKDTLMISRTPEVTCVVVDVSHEDPEVKFNWYVDGVEVHNAKTKPREEQYNSTYRVVSVLTVLHQDWLNGKEYKCKVSNKALPAPIEKTISKAKGQPREPQVYTLPPSRDELTKNQVSLTCLVKGFYPSDIAVEWESNGQPENNYKTTPPVLDSDGSFFLYSKLTVDKSRWQQGNVFSCSVMHEALHNHYTQKSLSLSPGGGGSGSAHPIPDSSPLLQFGGQVRQRYLYTDDACQTEAHLEIREDGTVGGAADQSPESLLQLKALKPGVIQILGVKTSRFLCQRPDGALYGSLHFDPEACSFRELLLEDGYNVYQSEAHGLPLHLCGNKSPHRDPAPRGPARFLPLPGLPPAPPEPPGILAPQPPDVGSSDPLSMVGSQGRSPSYAS

SEQ ID NO: 3493 - protein, 472 aa, Artificial Sequence
  Fusion Protein
HGEGTFTSDKSKQLEERLARLFYEWLIAGGHSKIKPPPKGGGGGGGSGGGGSGGGGSADKTHTCPPCPAPEAAGGPSVFLFPPKPKDTLMISRTPEVTCVVVDVSHEDPEVKFNWYVDGVEVHNAKTKPREEQYNSTYRVVSVLTVLHQDWLNGKEYKCKVSNKALPAPIEKTISKAKGQPREPQVYTLPPSRDELTKNQVSLTCLVKGFYPSDIAVEWESNGQPENNYKTTPPVLDSDGSFFLYSKLTVDKSRWQQGNVFSCSVMHEALHNHYTQKSLSLSPGGGGSGSAHPIPDSSPLLQFGGQVRQRYLYTDDACQTEAHLEIREDGTVGGAADQSPESLLQLKALKPGVIQILGVKTSRFLCQRPDGALYGSLHFDPEACSFRELLLEDGYNVYQSEAHGLPLHLCGNKSPHRDPAPRGPARFLPLPGLPPAPPEPPGILAPQPPDVGSSDPLSMVYPSQGRSPSYAS

SEQ ID NO: 3494 - protein, 471 aa, Artificial Sequence
  Fusion Protein
HGEGTFTSDKSKQLEERLARLFYEWLIAGGHSKIKPPPKGGGGGGGSGGGGSGGGGSADKTHTCPPCPAPELLGGPSVFLFPPKPKDTLMISRTPEVTCVVVDVSHEDPEVKFNWYVDGVEVHNAKTKPREEQYNNASRVVSVLTVLHQDWLNGKEYKCKVSNKALPAPIEKTISKAKGQPREPQVYTLPPSRDELTKNQVSLTCLVKGFYPSDIAVEWESNGQPENNYKTTPPVLDSDGSFFLYSKLTVDKSRWQQGNVFSCSVMHEALHNHYTQKSLSLSPGGGGSGSAHPIPDSSPLLQFGGQVRQRYLYTDDACQTEAHLEIREDGTVGGAADQSPESLLQLKALKPGVIQILGVKTSRFLCQRPDGALYGSLHFDPEACSFRELLLEDGYNVYQSEAHGLPLHLPGCKSPHRDPAPRGPARFLPLPGLPPAPPEPPGILAPQPPDVGSSDPLSMVGSQGRSPSYAS

SEQ ID NO: 3495 - protein, 472 aa, Artificial Sequence
  Fusion Protein
HGEGTFTSDKSKQLEERLARLFYEWLIAGGHSKIKPPPKGGGGGGGSGGGGSGGGGSADKTHTCPPCPAPELLGGPSVFLFPPKPKDTLMISRTPEVTCVVVDVSHEDPEVKFNWYVDGVEVHNAKTKPREEQYNNASRVVSVLTVLHQDWLNGKEYKCKVSNKALPAPIEKTISKAKGQPREPQVYTLPPSRDELTKNQVSLTCLVKGFYPSDIAVEWESNGQPENNYKTTPPVLDSDGSFFLYSKLTVDKSRWQQGNVFSCSVMHEALHNHYTQKSLSLSPGGGGSGSAHPIPDSSPLLQFGGQVRQRYLYTDDACQTEAHLEIREDGTVGGAADQSPESLLQLKALKPGVIQILGVKTSRFLCQRPDGALYGSLHFDPEACSFRELLLEDGYNVYQSEAHGLPLHLPGCKSPHRDPAPRGPARFLPLPGLPPAPPEPPGILAPQPPDVGSSDPLSMVYPSQGRSPSYAS

SEQ ID NO: 3496 - protein, 471 aa, Artificial Sequence
  Fusion Protein
HGEGTFTSDKSKQLEERLARLFYEWLIAGGHSKIKPPPKGGGGGGGSGGGGSGGGGSADKTHTCPPCPAPELLGGPSVFLFPPKPKDTLMISRTPEVTCVVVDVSHEDPEVKFNWYVDGVEVHNAKTKPREEQYNNASRVVSVLTVLHQDWLNGKEYKCKVSNKALPAPIEKTISKAKGQPREPQVYTLPPSRDELTKNQVSLTCLVKGFYPSDIAVEWESNGQPENNYKTTPPVLDSDGSFFLYSKLTVDKSRWQQGNVFSCSVMHEALHNHYTQKSLSLSPGGGGSGSAHPIPDSSPLLQFGGQVRQRYLYTDDACQTEAHLEIREDGTVGGAADQSPESLLQLKALKPGVIQILGVKTSRFLCQRPDGALYGSLHFDPEACSFRELLLEDGYNVYQSEAHGLPLHLCGNKSPHRDPAPRGPARFLPLPGLPPAPPEPPGILAPQPPDVGSSDPLSMVGSQGRSPSYAS

SEQ ID NO: 3497 - protein, 472 aa, Artificial Sequence
  Fusion Protein
HGEGTFTSDKSKQLEERLARLFYEWLIAGGHSKIKPPPKGGGGGGGSGGGGSGGGGSADKTHTCPPCPAPELLGGPSVFLFPPKPKDTLMISRTPEVTCVVVDVSHEDPEVKFNWYVDGVEVHNAKTKPREEQYNNASRVVSVLTVLHQDWLNGKEYKCKVSNKALPAPIEKTISKAKGQPREPQVYTLPPSRDELTKNQVSLTCLVKGFYPSDIAVEWESNGQPENNYKTTPPVLDSDGSFFLYSKLTVDKSRWQQGNVFSCSVMHEALHNHYTQKSLSLSPGGGGSGSAHPIPDSSPLLQFGGQVRQRYLYTDDACQTEAHLEIREDGTVGGAADQSPESLLQLKALKPGVIQILGVKTSRFLCQRPDGALYGSLHFDPEACSFRELLLEDGYNVYQSEAHGLPLHLCGNKSPHRDPAPRGPARFLPLPGLPPAPPEPPGILAPQPPDVGSSDPLSMVYPSQGRSPSYAS

SEQ ID NO: 3498 - protein, 473 aa, Artificial Sequence
  Fusion Protein
HGEGTFTSDKSKQLEERLARLFYEWLIAGGHSKIKPPPKGGGGGGGSGGGGSGGGGSAESKYGPPCPPCPAPEFEGGPSVFLFPPKPKDTLMISRTPEVTCVVVDVSQEDPEVQFNWYVDGVEVHNAKTKPREEQFNSTYRVVSVLTVLHQDWLNGKEYKCKVSNKGLPSSIEKTISKAKGQPREPQVYTLPPSQEEMTKNQVSLTCLVKGFYPSDIAVEWESNGQPENNYKTTPPVLDSDGSFFLYSRLTVDKSRWQEGNVFSCSVMHEALHNHYTQKSLSLSLGGGGSGSAHPIPDSSPLLQFGGQVRQRYLYTDDACQTEAHLEIREDGTVGGAADQSPESLLQLKALKPGVIQILGVKTSRFLCQRPDGALYGSLHFDPEACSFRELLLEDGYNVYQSEAHGLPLHLPGCKSPHRDPAPRGPARFLPLPGLPPAPPEPPGILAPQPPDVGSSDPLSMVGSQGRSPSYAS

SEQ ID NO: 3499 - protein, 474 aa, Artificial Sequence
  Fusion Protein
HGEGTFTSDKSKQLEERLARLFYEWLIAGGHSKIKPPPKGGGGGGGSGGGGSGGGGSAESKYGPPCPPCPAPEFEGGPSVFLFPPKPKDTLMISRTPEVTCVVVDVSQEDPEVQFNWYVDGVEVHNAKTKPREEQFNSTYRVVSVLTVLHQDWLNGKEYKCKVSNKGLPSSIEKTISKAKGQPREPQVYTLPPSQEEMTKNQVSLTCLVKGFYPSDIAVEWESNGQPENNYKTTPPVLDSDGSFFLYSRLTVDKSRWQEGNVFSCSVMHEALHNHYTQKSLSLSLGGGGSGSAHPIPDSSPLLQFGGQVRQRYLYTDDACQTEAHLEIREDGTVGGAADQSPESLLQLKALKPGVIQILGVKTSRFLCQRPDGALYGSLHFDPEACSFRELLLEDGYNVYQSEAHGLPLHLPGCKSPHRDPAPRGPARFLPLPGLPPAPPEPPGILAPQPPDVGSSDPLSMVYPSQGRSPSYAS

SEQ ID NO: 3500 - protein, 473 aa, Artificial Sequence
  Fusion Protein
HGEGTFTSDKSKQLEERLARLFYEWLIAGGHSKIKPPPKGGGGGGGSGGGGSGGGGSAESKYGPPCPPCPAPEFEGGPSVFLFPPKPKDTLMISRTPEVTCVVVDVSQEDPEVQFNWYVDGVEVHNAKTKPREEQFNSTYRVVSVLTVLHQDWLNGKEYKCKVSNKGLPSSIEKTISKAKGQPREPQVYTLPPSQEEMTKNQVSLTCLVKGFYPSDIAVEWESNGQPENNYKTTPPVLDSDGSFFLYSRLTVDKSRWQEGNVFSCSVMHEALHNHYTQKSLSLSLGGGGSGSAHPIPDSSPLLQFGGQVRQRYLYTDDACQTEAHLEIREDGTVGGAADQSPESLLQLKALKPGVIQILGVKTSRFLCQRPDGALYGSLHFDPEACSFRELLLEDGYNVYQSEAHGLPLHLCGNKSPHRDPAPRGPARFLPLPGLPPAPPEPPGILAPQPPDVGSSDPLSMVGSQGRSPSYAS

SEQ ID NO: 3501 - protein, 474 aa, Artificial Sequence
  Fusion Protein
HGEGTFTSDKSKQLEERLARLFYEWLIAGGHSKIKPPPKGGGGGGGSGGGGSGGGGSAESKYGPPCPPCPAPEFEGGPSVFLFPPKPKDTLMISRTPEVTCVVVDVSQEDPEVQFNWYVDGVEVHNAKTKPREEQFNSTYRVVSVLTVLHQDWLNGKEYKCKVSNKGLPSSIEKTISKAKGQPREPQVYTLPPSQEEMTKNQVSLTCLVKGFYPSDIAVEWESNGQPENNYKTTPPVLDSDGSFFLYSRLTVDKSRWQEGNVFSCSVMHEALHNHYTQKSLSLSLGGGGSGSAHPIPDSSPLLQFGGQVRQRYLYTDDACQTEAHLEIREDGTVGGAADQSPESLLQLKALKPGVIQILGVKTSRFLCQRPDGALYGSLHFDPEACSFRELLLEDGYNVYQSEAHGLPLHLCGNKSPHRDPAPRGPARFLPLPGLPPAPPEPPGILAPQPPDVGSSDPLSMVYPSQGRSPSYAS

SEQ ID NO: 3502 - protein, 471 aa, Artificial Sequence
  Fusion Protein
HGEGTFTSDKSKQLEEELARLFYEWLIAGGHSKGKPPPKGGGGGGGSGGGGSGGGGSADKTHTCPPCPAPEAAGGPSVFLFPPKPKDTLMISRTPEVTCVVVDVSHEDPEVKFNWYVDGVEVHNAKTKPREEQYNSTYRVVSVLTVLHQDWLNGKEYKCKVSNKALPAPIEKTISKAKGQPREPQVYTLPPSRDELTKNQVSLTCLVKGFYPSDIAVEWESNGQPENNYKTTPPVLDSDGSFFLYSKLTVDKSRWQQGNVFSCSVMHEALHNHYTQKSLSLSPGGGGSGSAHPIPDSSPLLQFGGQVRQRYLYTDDACQTEAHLEIREDGTVGGAADQSPESLLQLKALKPGVIQILGVKTSRFLCQRPDGALYGSLHFDPEACSFRELLLEDGYNVYQSEAHGLPLHLPGCKSPHRDPAPRGPARFLPLPGLPPAPPEPPGILAPQPPDVGSSDPLSMVGSQGRSPSYAS

SEQ ID NO: 3503 - protein, 472 aa, Artificial Sequence
  Fusion Protein
HGEGTFTSDKSKQLEEELARLFYEWLIAGGHSKGKPPPKGGGGGGGSGGGGSGGGGSADKTHTCPPCPAPEAAGGPSVFLFPPKPKDTLMISRTPEVTCVVVDVSHEDPEVKFNWYVDGVEVHNAKTKPREEQYNSTYRVVSVLTVLHQDWLNGKEYKCKVSNKALPAPIEKTISKAKGQPREPQVYTLPPSRDELTKNQVSLTCLVKGFYPSDIAVEWESNGQPENNYKTTPPVLDSDGSFFLYSKLTVDKSRWQQGNVFSCSVMHEALHNHYTQKSLSLSPGGGGSGSAHPIPDSSPLLQFGGQVRQRYLYTDDACQTEAHLEIREDGTVGGAADQSPESLLQLKALKPGVIQILGVKTSRFLCQRPDGALYGSLHFDPEACSFRELLLEDGYNVYQSEAHGLPLHLPGCKSPHRDPAPRGPARFLPLPGLPPAPPEPPGILAPQPPDVGSSDPLSMVYPSQGRSPSYAS

SEQ ID NO: 3504 - protein, 471 aa, Artificial Sequence
  Fusion Protein
HGEGTFTSDKSKQLEEELARLFYEWLIAGGHSKGKPPPKGGGGGGGSGGGGSGGGGSADKTHTCPPCPAPEAAGGPSVFLFPPKPKDTLMISRTPEVTCVVVDVSHEDPEVKFNWYVDGVEVHNAKTKPREEQYNSTYRVVSVLTVLHQDWLNGKEYKCKVSNKALPAPIEKTISKAKGQPREPQVYTLPPSRDELTKNQVSLTCLVKGFYPSDIAVEWESNGQPENNYKTTPPVLDSDGSFFLYSKLTVDKSRWQQGNVFSCSVMHEALHNHYTQKSLSLSPGGGGSGSAHPIPDSSPLLQFGGQVRQRYLYTDDACQTEAHLEIREDGTVGGAADQSPESLLQLKALKPGVIQILGVKTSRFLCQRPDGALYGSLHFDPEACSFRELLLEDGYNVYQSEAHGLPLHLCGNKSPHRDPAPRGPARFLPLPGLPPAPPEPPGILAPQPPDVGSSDPLSMVGSQGRSPSYAS

SEQ ID NO: 3505 - protein, 472 aa, Artificial Sequence
  Fusion Protein
HGEGTFTSDKSKQLEEELARLFYEWLIAGGHSKGKPPPKGGGGGGGSGGGGSGGGGSADKTHTCPPCPAPEAAGGPSVFLFPPKPKDTLMISRTPEVTCVVVDVSHEDPEVKFNWYVDGVEVHNAKTKPREEQYNSTYRVVSVLTVLHQDWLNGKEYKCKVSNKALPAPIEKTISKAKGQPREPQVYTLPPSRDELTKNQVSLTCLVKGFYPSDIAVEWESNGQPENNYKTTPPVLDSDGSFFLYSKLTVDKSRWQQGNVFSCSVMHEALHNHYTQKSLSLSPGGGGSGSAHPIPDSSPLLQFGGQVRQRYLYTDDACQTEAHLEIREDGTVGGAADQSPESLLQLKALKPGVIQILGVKTSRFLCQRPDGALYGSLHFDPEACSFRELLLEDGYNVYQSEAHGLPLHLCGNKSPHRDPAPRGPARFLPLPGLPPAPPEPPGILAPQPPDVGSSDPLSMVYPSQGRSPSYAS

SEQ ID NO: 3506 - protein, 471 aa, Artificial Sequence
  Fusion Protein
HGEGTFTSDKSKQLEEELARLFYEWLIAGGHSKGKPPPKGGGGGGGSGGGGSGGGGSADKTHTCPPCPAPELLGGPSVFLFPPKPKDTLMISRTPEVTCVVVDVSHEDPEVKFNWYVDGVEVHNAKTKPREEQYNNASRVVSVLTVLHQDWLNGKEYKCKVSNKALPAPIEKTISKAKGQPREPQVYTLPPSRDELTKNQVSLTCLVKGFYPSDIAVEWESNGQPENNYKTTPPVLDSDGSFFLYSKLTVDKSRWQQGNVFSCSVMHEALHNHYTQKSLSLSPGGGGSGSAHPIPDSSPLLQFGGQVRQRYLYTDDACQTEAHLEIREDGTVGGAADQSPESLLQLKALKPGVIQILGVKTSRFLCQRPDGALYGSLHFDPEACSFRELLLEDGYNVYQSEAHGLPLHLPGCKSPHRDPAPRGPARFLPLPGLPPAPPEPPGILAPQPPDVGSSDPLSMVGSQGRSPSYAS

SEQ ID NO: 3507 - protein, 472 aa, Artificial Sequence
  Fusion Protein
HGEGTFTSDKSKQLEEELARLFYEWLIAGGHSKGKPPPKGGGGGGGSGGGGSGGGGSADKTHTCPPCPAPELLGGPSVFLFPPKPKDTLMISRTPEVTCVVVDVSHEDPEVKFNWYVDGVEVHNAKTKPREEQYNNASRVVSVLTVLHQDWLNGKEYKCKVSNKALPAPIEKTISKAKGQPREPQVYTLPPSRDELTKNQVSLTCLVKGFYPSDIAVEWESNGQPENNYKTTPPVLDSDGSFFLYSKLTVDKSRWQQGNVFSCSVMHEALHNHYTQKSLSLSPGGGGSGSAHPIPDSSPLLQFGGQVRQRYLYTDDACQTEAHLEIREDGTVGGAADQSPESLLQLKALKPGVIQILGVKTSRFLCQRPDGALYGSLHFDPEACSFRELLLEDGYNVYQSEAHGLPLHLPGCKSPHRDPAPRGPARFLPLPGLPPAPPEPPGILAPQPPDVGSSDPLSMVYPSQGRSPSYAS

SEQ ID NO: 3508 - protein, 471 aa, Artificial Sequence
  Fusion Protein
HGEGTFTSDKSKQLEEELARLFYEWLIAGGHSKGKPPPKGGGGGGGSGGGGSGGGGSADKTHTCPPCPAPELLGGPSVFLFPPKPKDTLMISRTPEVTCVVVDVSHEDPEVKFNWYVDGVEVHNAKTKPREEQYNNASRVVSVLTVLHQDWLNGKEYKCKVSNKALPAPIEKTISKAKGQPREPQVYTLPPSRDELTKNQVSLTCLVKGFYPSDIAVEWESNGQPENNYKTTPPVLDSDGSFFLYSKLTVDKSRWQQGNVFSCSVMHEALHNHYTQKSLSLSPGGGGSGSAHPIPDSSPLLQFGGQVRQRYLYTDDACQTEAHLEIREDGTVGGAADQSPESLLQLKALKPGVIQILGVKTSRFLCQRPDGALYGSLHFDPEACSFRELLLEDGYNVYQSEAHGLPLHLCGNKSPHRDPAPRGPARFLPLPGLPPAPPEPPGILAPQPPDVGSSDPLSMVGSQGRSPSYAS

SEQ ID NO: 3509 - protein, 472 aa, Artificial Sequence
  Fusion Protein
HGEGTFTSDKSKQLEEELARLFYEWLIAGGHSKGKPPPKGGGGGGGSGGGGSGGGGSADKTHTCPPCPAPELLGGPSVFLFPPKPKDTLMISRTPEVTCVVVDVSHEDPEVKFNWYVDGVEVHNAKTKPREEQYNNASRVVSVLTVLHQDWLNGKEYKCKVSNKALPAPIEKTISKAKGQPREPQVYTLPPSRDELTKNQVSLTCLVKGFYPSDIAVEWESNGQPENNYKTTPPVLDSDGSFFLYSKLTVDKSRWQQGNVFSCSVMHEALHNHYTQKSLSLSPGGGGSGSAHPIPDSSPLLQFGGQVRQRYLYTDDACQTEAHLEIREDGTVGGAADQSPESLLQLKALKPGVIQILGVKTSRFLCQRPDGALYGSLHFDPEACSFRELLLEDGYNVYQSEAHGLPLHLCGNKSPHRDPAPRGPARFLPLPGLPPAPPEPPGILAPQPPDVGSSDPLSMVYPSQGRSPSYAS

SEQ ID NO: 3510 - protein, 473 aa, Artificial Sequence
  Fusion Protein
HGEGTFTSDKSKQLEEELARLFYEWLIAGGHSKGKPPPKGGGGGGGSGGGGSGGGGSAESKYGPPCPPCPAPEFEGGPSVFLFPPKPKDTLMISRTPEVTCVVVDVSQEDPEVQFNWYVDGVEVHNAKTKPREEQFNSTYRVVSVLTVLHQDWLNGKEYKCKVSNKGLPSSIEKTISKAKGQPREPQVYTLPPSQEEMTKNQVSLTCLVKGFYPSDIAVEWESNGQPENNYKTTPPVLDSDGSFFLYSRLTVDKSRWQEGNVFSCSVMHEALHNHYTQKSLSLSLGGGGSGSAHPIPDSSPLLQFGGQVRQRYLYTDDACQTEAHLEIREDGTVGGAADQSPESLLQLKALKPGVIQILGVKTSRFLCQRPDGALYGSLHFDPEACSFRELLLEDGYNVYQSEAHGLPLHLPGCKSPHRDPAPRGPARFLPLPGLPPAPPEPPGILAPQPPDVGSSDPLSMVGSQGRSPSYAS

SEQ ID NO: 3511 - protein, 474 aa, Artificial Sequence
  Fusion Protein
HGEGTFTSDKSKQLEEELARLFYEWLIAGGHSKGKPPPKGGGGGGGSGGGGSGGGGSAESKYGPPCPPCPAPEFEGGPSVFLFPPKPKDTLMISRTPEVTCVVVDVSQEDPEVQFNWYVDGVEVHNAKTKPREEQFNSTYRVVSVLTVLHQDWLNGKEYKCKVSNKGLPSSIEKTISKAKGQPREPQVYTLPPSQEEMTKNQVSLTCLVKGFYPSDIAVEWESNGQPENNYKTTPPVLDSDGSFFLYSRLTVDKSRWQEGNVFSCSVMHEALHNHYTQKSLSLSLGGGGSGSAHPIPDSSPLLQFGGQVRQRYLYTDDACQTEAHLEIREDGTVGGAADQSPESLLQLKALKPGVIQILGVKTSRFLCQRPDGALYGSLHFDPEACSFRELLLEDGYNVYQSEAHGLPLHLPGCKSPHRDPAPRGPARFLPLPGLPPAPPEPPGILAPQPPDVGSSDPLSMVYPSQGRSPSYAS

SEQ ID NO: 3512 - protein, 473 aa, Artificial Sequence
  Fusion Protein
HGEGTFTSDKSKQLEEELARLFYEWLIAGGHSKGKPPPKGGGGGGGSGGGGSGGGGSAESKYGPPCPPCPAPEFEGGPSVFLFPPKPKDTLMISRTPEVTCVVVDVSQEDPEVQFNWYVDGVEVHNAKTKPREEQFNSTYRVVSVLTVLHQDWLNGKEYKCKVSNKGLPSSIEKTISKAKGQPREPQVYTLPPSQEEMTKNQVSLTCLVKGFYPSDIAVEWESNGQPENNYKTTPPVLDSDGSFFLYSRLTVDKSRWQEGNVFSCSVMHEALHNHYTQKSLSLSLGGGGSGSAHPIPDSSPLLQFGGQVRQRYLYTDDACQTEAHLEIREDGTVGGAADQSPESLLQLKALKPGVIQILGVKTSRFLCQRPDGALYGSLHFDPEACSFRELLLEDGYNVYQSEAHGLPLHLCGNKSPHRDPAPRGPARFLPLPGLPPAPPEPPGILAPQPPDVGSSDPLSMVGSQGRSPSYAS

SEQ ID NO: 3513 - protein, 474 aa, Artificial Sequence
  Fusion Protein
HGEGTFTSDKSKQLEEELARLFYEWLIAGGHSKGKPPPKGGGGGGGSGGGGSGGGGSAESKYGPPCPPCPAPEFEGGPSVFLFPPKPKDTLMISRTPEVTCVVVDVSQEDPEVQFNWYVDGVEVHNAKTKPREEQFNSTYRVVSVLTVLHQDWLNGKEYKCKVSNKGLPSSIEKTISKAKGQPREPQVYTLPPSQEEMTKNQVSLTCLVKGFYPSDIAVEWESNGQPENNYKTTPPVLDSDGSFFLYSRLTVDKSRWQEGNVFSCSVMHEALHNHYTQKSLSLSLGGGGSGSAHPIPDSSPLLQFGGQVRQRYLYTDDACQTEAHLEIREDGTVGGAADQSPESLLQLKALKPGVIQILGVKTSRFLCQRPDGALYGSLHFDPEACSFRELLLEDGYNVYQSEAHGLPLHLCGNKSPHRDPAPRGPARFLPLPGLPPAPPEPPGILAPQPPDVGSSDPLSMVYPSQGRSPSYAS

SEQ ID NO: 3514 - protein, 471 aa, Artificial Sequence
  Fusion Protein
HGEGTFTSDKSKQLEEELVRLFYEWLINGGHSSIKPPPKGGGGGGGSGGGGSGGGGSADKTHTCPPCPAPEAAGGPSVFLFPPKPKDTLMISRTPEVTCVVVDVSHEDPEVKFNWYVDGVEVHNAKTKPREEQYNSTYRVVSVLTVLHQDWLNGKEYKCKVSNKALPAPIEKTISKAKGQPREPQVYTLPPSRDELTKNQVSLTCLVKGFYPSDIAVEWESNGQPENNYKTTPPVLDSDGSFFLYSKLTVDKSRWQQGNVFSCSVMHEALHNHYTQKSLSLSPGGGGSGSAHPIPDSSPLLQFGGQVRQRYLYTDDACQTEAHLEIREDGTVGGAADQSPESLLQLKALKPGVIQILGVKTSRFLCQRPDGALYGSLHFDPEACSFRELLLEDGYNVYQSEAHGLPLHLPGCKSPHRDPAPRGPARFLPLPGLPPAPPEPPGILAPQPPDVGSSDPLSMVGSQGRSPSYAS

SEQ ID NO: 3515 - protein, 472 aa, Artificial Sequence
  Fusion Protein
HGEGTFTSDKSKQLEEELVRLFYEWLINGGHSSIKPPPKGGGGGGGSGGGGSGGGGSADKTHTCPPCPAPEAAGGPSVFLFPPKPKDTLMISRTPEVTCVVVDVSHEDPEVKFNWYVDGVEVHNAKTKPREEQYNSTYRVVSVLTVLHQDWLNGKEYKCKVSNKALPAPIEKTISKAKGQPREPQVYTLPPSRDELTKNQVSLTCLVKGFYPSDIAVEWESNGQPENNYKTTPPVLDSDGSFFLYSKLTVDKSRWQQGNVFSCSVMHEALHNHYTQKSLSLSPGGGGSGSAHPIPDSSPLLQFGGQVRQRYLYTDDACQTEAHLEIREDGTVGGAADQSPESLLQLKALKPGVIQILGVKTSRFLCQRPDGALYGSLHFDPEACSFRELLLEDGYNVYQSEAHGLPLHLPGCKSPHRDPAPRGPARFLPLPGLPPAPPEPPGILAPQPPDVGSSDPLSMVYPSQGRSPSYAS

SEQ ID NO: 3516 - protein, 471 aa, Artificial Sequence
  Fusion Protein
HGEGTFTSDKSKQLEEELVRLFYEWLINGGHSSIKPPPKGGGGGGGSGGGGSGGGGSADKTHTCPPCPAPEAAGGPSVFLFPPKPKDTLMISRTPEVTCVVVDVSHEDPEVKFNWYVDGVEVHNAKTKPREEQYNSTYRVVSVLTVLHQDWLNGKEYKCKVSNKALPAPIEKTISKAKGQPREPQVYTLPPSRDELTKNQVSLTCLVKGFYPSDIAVEWESNGQPENNYKTTPPVLDSDGSFFLYSKLTVDKSRWQQGNVFSCSVMHEALHNHYTQKSLSLSPGGGGSGSAHPIPDSSPLLQFGGQVRQRYLYTDDACQTEAHLEIREDGTVGGAADQSPESLLQLKALKPGVIQILGVKTSRFLCQRPDGALYGSLHFDPEACSFRELLLEDGYNVYQSEAHGLPLHLCGNKSPHRDPAPRGPARFLPLPGLPPAPPEPPGILAPQPPDVGSSDPLSMVGSQGRSPSYAS

SEQ ID NO: 3517 - protein, 472 aa, Artificial Sequence
  Fusion Protein
HGEGTFTSDKSKQLEEELVRLFYEWLINGGHSSIKPPPKGGGGGGGSGGGGSGGGGSADKTHTCPPCPAPEAAGGPSVFLFPPKPKDTLMISRTPEVTCVVVDVSHEDPEVKFNWYVDGVEVHNAKTKPREEQYNSTYRVVSVLTVLHQDWLNGKEYKCKVSNKALPAPIEKTISKAKGQPREPQVYTLPPSRDELTKNQVSLTCLVKGFYPSDIAVEWESNGQPENNYKTTPPVLDSDGSFFLYSKLTVDKSRWQQGNVFSCSVMHEALHNHYTQKSLSLSPGGGGSGSAHPIPDSSPLLQFGGQVRQRYLYTDDACQTEAHLEIREDGTVGGAADQSPESLLQLKALKPGVIQILGVKTSRFLCQRPDGALYGSLHFDPEACSFRELLLEDGYNVYQSEAHGLPLHLCGNKSPHRDPAPRGPARFLPLPGLPPAPPEPPGILAPQPPDVGSSDPLSMVYPSQGRSPSYAS

SEQ ID NO: 3518 - protein, 471 aa, Artificial Sequence
  Fusion Protein
HGEGTFTSDKSKQLEEELVRLFYEWLINGGHSSIKPPPKGGGGGGGSGGGGSGGGGSADKTHTCPPCPAPELLGGPSVFLFPPKPKDTLMISRTPEVTCVVVDVSHEDPEVKFNWYVDGVEVHNAKTKPREEQYNNASRVVSVLTVLHQDWLNGKEYKCKVSNKALPAPIEKTISKAKGQPREPQVYTLPPSRDELTKNQVSLTCLVKGFYPSDIAVEWESNGQPENNYKTTPPVLDSDGSFFLYSKLTVDKSRWQQGNVFSCSVMHEALHNHYTQKSLSLSPGGGGSGSAHPIPDSSPLLQFGGQVRQRYLYTDDACQTEAHLEIREDGTVGGAADQSPESLLQLKALKPGVIQILGVKTSRFLCQRPDGALYGSLHFDPEACSFRELLLEDGYNVYQSEAHGLPLHLPGCKSPHRDPAPRGPARFLPLPGLPPAPPEPPGILAPQPPDVGSSDPLSMVGSQGRSPSYAS

SEQ ID NO: 3519 - protein, 472 aa, Artificial Sequence
  Fusion Protein
HGEGTFTSDKSKQLEEELVRLFYEWLINGGHSSIKPPPKGGGGGGGSGGGGSGGGGSADKTHTCPPCPAPELLGGPSVFLFPPKPKDTLMISRTPEVTCVVVDVSHEDPEVKFNWYVDGVEVHNAKTKPREEQYNNASRVVSVLTVLHQDWLNGKEYKCKVSNKALPAPIEKTISKAKGQPREPQVYTLPPSRDELTKNQVSLTCLVKGFYPSDIAVEWESNGQPENNYKTTPPVLDSDGSFFLYSKLTVDKSRWQQGNVFSCSVMHEALHNHYTQKSLSLSPGGGGSGSAHPIPDSSPLLQFGGQVRQRYLYTDDACQTEAHLEIREDGTVGGAADQSPESLLQLKALKPGVIQILGVKTSRFLCQRPDGALYGSLHFDPEACSFRELLLEDGYNVYQSEAHGLPLHLPGCKSPHRDPAPRGPARFLPLPGLPPAPPEPPGILAPQPPDVGSSDPLSMVYPSQGRSPSYAS

SEQ ID NO: 3520 - protein, 471 aa, Artificial Sequence
  Fusion Protein
HGEGTFTSDKSKQLEEELVRLFYEWLINGGHSSIKPPPKGGGGGGGSGGGGSGGGGSADKTHTCPPCPAPELLGGPSVFLFPPKPKDTLMISRTPEVTCVVVDVSHEDPEVKFNWYVDGVEVHNAKTKPREEQYNNASRVVSVLTVLHQDWLNGKEYKCKVSNKALPAPIEKTISKAKGQPREPQVYTLPPSRDELTKNQVSLTCLVKGFYPSDIAVEWESNGQPENNYKTTPPVLDSDGSFFLYSKLTVDKSRWQQGNVFSCSVMHEALHNHYTQKSLSLSPGGGGSGSAHPIPDSSPLLQFGGQVRQRYLYTDDACQTEAHLEIREDGTVGGAADQSPESLLQLKALKPGVIQILGVKTSRFLCQRPDGALYGSLHFDPEACSFRELLLEDGYNVYQSEAHGLPLHLCGNKSPHRDPAPRGPARFLPLPGLPPAPPEPPGILAPQPPDVGSSDPLSMVGSQGRSPSYAS

SEQ ID NO: 3521 - protein, 472 aa, Artificial Sequence
  Fusion Protein
HGEGTFTSDKSKQLEEELVRLFYEWLINGGHSSIKPPPKGGGGGGGSGGGGSGGGGSADKTHTCPPCPAPELLGGPSVFLFPPKPKDTLMISRTPEVTCVVVDVSHEDPEVKFNWYVDGVEVHNAKTKPREEQYNNASRVVSVLTVLHQDWLNGKEYKCKVSNKALPAPIEKTISKAKGQPREPQVYTLPPSRDELTKNQVSLTCLVKGFYPSDIAVEWESNGQPENNYKTTPPVLDSDGSFFLYSKLTVDKSRWQQGNVFSCSVMHEALHNHYTQKSLSLSPGGGGSGSAHPIPDSSPLLQFGGQVRQRYLYTDDACQTEAHLEIREDGTVGGAADQSPESLLQLKALKPGVIQILGVKTSRFLCQRPDGALYGSLHFDPEACSFRELLLEDGYNVYQSEAHGLPLHLCGNKSPHRDPAPRGPARFLPLPGLPPAPPEPPGILAPQPPDVGSSDPLSMVYPSQGRSPSYAS

SEQ ID NO: 3522 - protein, 473 aa, Artificial Sequence
  Fusion Protein
HGEGTFTSDKSKQLEEELVRLFYEWLINGGHSSIKPPPKGGGGGGGSGGGGSGGGGSAESKYGPPCPPCPAPEFEGGPSVFLFPPKPKDTLMISRTPEVTCVVVDVSQEDPEVQFNWYVDGVEVHNAKTKPREEQFNSTYRVVSVLTVLHQDWLNGKEYKCKVSNKGLPSSIEKTISKAKGQPREPQVYTLPPSQEEMTKNQVSLTCLVKGFYPSDIAVEWESNGQPENNYKTTPPVLDSDGSFFLYSRLTVDKSRWQEGNVFSCSVMHEALHNHYTQKSLSLSLGGGGSGSAHPIPDSSPLLQFGGQVRQRYLYTDDACQTEAHLEIREDGTVGGAADQSPESLLQLKALKPGVIQILGVKTSRFLCQRPDGALYGSLHFDPEACSFRELLLEDGYNVYQSEAHGLPLHLPGCKSPHRDPAPRGPARFLPLPGLPPAPPEPPGILAPQPPDVGSSDPLSMVGSQGRSPSYAS

SEQ ID NO: 3523 - protein, 474 aa, Artificial Sequence
  Fusion Protein
HGEGTFTSDKSKQLEEELVRLFYEWLINGGHSSIKPPPKGGGGGGGSGGGGSGGGGSAESKYGPPCPPCPAPEFEGGPSVFLFPPKPKDTLMISRTPEVTCVVVDVSQEDPEVQFNWYVDGVEVHNAKTKPREEQFNSTYRVVSVLTVLHQDWLNGKEYKCKVSNKGLPSSIEKTISKAKGQPREPQVYTLPPSQEEMTKNQVSLTCLVKGFYPSDIAVEWESNGQPENNYKTTPPVLDSDGSFFLYSRLTVDKSRWQEGNVFSCSVMHEALHNHYTQKSLSLSLGGGGSGSAHPIPDSSPLLQFGGQVRQRYLYTDDACQTEAHLEIREDGTVGGAADQSPESLLQLKALKPGVIQILGVKTSRFLCQRPDGALYGSLHFDPEACSFRELLLEDGYNVYQSEAHGLPLHLPGCKSPHRDPAPRGPARFLPLPGLPPAPPEPPGILAPQPPDVGSSDPLSMVYPSQGRSPSYAS

SEQ ID NO: 3524 - protein, 473 aa, Artificial Sequence
  Fusion Protein
HGEGTFTSDKSKQLEEELVRLFYEWLINGGHSSIKPPPKGGGGGGGSGGGGSGGGGSAESKYGPPCPPCPAPEFEGGPSVFLFPPKPKDTLMISRTPEVTCVVVDVSQEDPEVQFNWYVDGVEVHNAKTKPREEQFNSTYRVVSVLTVLHQDWLNGKEYKCKVSNKGLPSSIEKTISKAKGQPREPQVYTLPPSQEEMTKNQVSLTCLVKGFYPSDIAVEWESNGQPENNYKTTPPVLDSDGSFFLYSRLTVDKSRWQEGNVFSCSVMHEALHNHYTQKSLSLSLGGGGSGSAHPIPDSSPLLQFGGQVRQRYLYTDDACQTEAHLEIREDGTVGGAADQSPESLLQLKALKPGVIQILGVKTSRFLCQRPDGALYGSLHFDPEACSFRELLLEDGYNVYQSEAHGLPLHLCGNKSPHRDPAPRGPARFLPLPGLPPAPPEPPGILAPQPPDVGSSDPLSMVGSQGRSPSYAS

SEQ ID NO: 3525 - protein, 474 aa, Artificial Sequence
  Fusion Protein
HGEGTFTSDKSKQLEEELVRLFYEWLINGGHSSIKPPPKGGGGGGGSGGGGSGGGGSAESKYGPPCPPCPAPEFEGGPSVFLFPPKPKDTLMISRTPEVTCVVVDVSQEDPEVQFNWYVDGVEVHNAKTKPREEQFNSTYRVVSVLTVLHQDWLNGKEYKCKVSNKGLPSSIEKTISKAKGQPREPQVYTLPPSQEEMTKNQVSLTCLVKGFYPSDIAVEWESNGQPENNYKTTPPVLDSDGSFFLYSRLTVDKSRWQEGNVFSCSVMHEALHNHYTQKSLSLSLGGGGSGSAHPIPDSSPLLQFGGQVRQRYLYTDDACQTEAHLEIREDGTVGGAADQSPESLLQLKALKPGVIQILGVKTSRFLCQRPDGALYGSLHFDPEACSFRELLLEDGYNVYQSEAHGLPLHLCGNKSPHRDPAPRGPARFLPLPGLPPAPPEPPGILAPQPPDVGSSDPLSMVYPSQGRSPSYAS

SEQ ID NO: 3526 - protein, 471 aa, Artificial Sequence
  Fusion Protein
HGEGTFTSDKSKQLEEELVRLFYEWLINGGHSKGKPPPKGGGGGGGSGGGGSGGGGSADKTHTCPPCPAPEAAGGPSVFLFPPKPKDTLMISRTPEVTCVVVDVSHEDPEVKFNWYVDGVEVHNAKTKPREEQYNSTYRVVSVLTVLHQDWLNGKEYKCKVSNKALPAPIEKTISKAKGQPREPQVYTLPPSRDELTKNQVSLTCLVKGFYPSDIAVEWESNGQPENNYKTTPPVLDSDGSFFLYSKLTVDKSRWQQGNVFSCSVMHEALHNHYTQKSLSLSPGGGGSGSAHPIPDSSPLLQFGGQVRQRYLYTDDACQTEAHLEIREDGTVGGAADQSPESLLQLKALKPGVIQILGVKTSRFLCQRPDGALYGSLHFDPEACSFRELLLEDGYNVYQSEAHGLPLHLPGCKSPHRDPAPRGPARFLPLPGLPPAPPEPPGILAPQPPDVGSSDPLSMVGSQGRSPSYAS

SEQ ID NO: 3527 - protein, 472 aa, Artificial Sequence
  Fusion Protein
HGEGTFTSDKSKQLEEELVRLFYEWLINGGHSKGKPPPKGGGGGGGSGGGGSGGGGSADKTHTCPPCPAPEAAGGPSVFLFPPKPKDTLMISRTPEVTCVVVDVSHEDPEVKFNWYVDGVEVHNAKTKPREEQYNSTYRVVSVLTVLHQDWLNGKEYKCKVSNKALPAPIEKTISKAKGQPREPQVYTLPPSRDELTKNQVSLTCLVKGFYPSDIAVEWESNGQPENNYKTTPPVLDSDGSFFLYSKLTVDKSRWQQGNVFSCSVMHEALHNHYTQKSLSLSPGGGGSGSAHPIPDSSPLLQFGGQVRQRYLYTDDACQTEAHLEIREDGTVGGAADQSPESLLQLKALKPGVIQILGVKTSRFLCQRPDGALYGSLHFDPEACSFRELLLEDGYNVYQSEAHGLPLHLPGCKSPHRDPAPRGPARFLPLPGLPPAPPEPPGILAPQPPDVGSSDPLSMVYPSQGRSPSYAS

SEQ ID NO: 3528 - protein, 471 aa, Artificial Sequence
  Fusion Protein
HGEGTFTSDKSKQLEEELVRLFYEWLINGGHSKGKPPPKGGGGGGGSGGGGSGGGGSADKTHTCPPCPAPEAAGGPSVFLFPPKPKDTLMISRTPEVTCVVVDVSHEDPEVKFNWYVDGVEVHNAKTKPREEQYNSTYRVVSVLTVLHQDWLNGKEYKCKVSNKALPAPIEKTISKAKGQPREPQVYTLPPSRDELTKNQVSLTCLVKGFYPSDIAVEWESNGQPENNYKTTPPVLDSDGSFFLYSKLTVDKSRWQQGNVFSCSVMHEALHNHYTQKSLSLSPGGGGSGSAHPIPDSSPLLQFGGQVRQRYLYTDDACQTEAHLEIREDGTVGGAADQSPESLLQLKALKPGVIQILGVKTSRFLCQRPDGALYGSLHFDPEACSFRELLLEDGYNVYQSEAHGLPLHLCGNKSPHRDPAPRGPARFLPLPGLPPAPPEPPGILAPQPPDVGSSDPLSMVGSQGRSPSYAS

SEQ ID NO: 3529 - protein, 472 aa, Artificial Sequence
  Fusion Protein
HGEGTFTSDKSKQLEEELVRLFYEWLINGGHSKGKPPPKGGGGGGGSGGGGSGGGGSADKTHTCPPCPAPEAAGGPSVFLFPPKPKDTLMISRTPEVTCVVVDVSHEDPEVKFNWYVDGVEVHNAKTKPREEQYNSTYRVVSVLTVLHQDWLNGKEYKCKVSNKALPAPIEKTISKAKGQPREPQVYTLPPSRDELTKNQVSLTCLVKGFYPSDIAVEWESNGQPENNYKTTPPVLDSDGSFFLYSKLTVDKSRWQQGNVFSCSVMHEALHNHYTQKSLSLSPGGGGSGSAHPIPDSSPLLQFGGQVRQRYLYTDDACQTEAHLEIREDGTVGGAADQSPESLLQLKALKPGVIQILGVKTSRFLCQRPDGALYGSLHFDPEACSFRELLLEDGYNVYQSEAHGLPLHLCGNKSPHRDPAPRGPARFLPLPGLPPAPPEPPGILAPQPPDVGSSDPLSMVYPSQGRSPSYAS

SEQ ID NO: 3530 - protein, 471 aa, Artificial Sequence
  Fusion Protein
HGEGTFTSDKSKQLEEELVRLFYEWLINGGHSKGKPPPKGGGGGGGSGGGGSGGGGSADKTHTCPPCPAPELLGGPSVFLFPPKPKDTLMISRTPEVTCVVVDVSHEDPEVKFNWYVDGVEVHNAKTKPREEQYNNASRVVSVLTVLHQDWLNGKEYKCKVSNKALPAPIEKTISKAKGQPREPQVYTLPPSRDELTKNQVSLTCLVKGFYPSDIAVEWESNGQPENNYKTTPPVLDSDGSFFLYSKLTVDKSRWQQGNVFSCSVMHEALHNHYTQKSLSLSPGGGGSGSAHPIPDSSPLLQFGGQVRQRYLYTDDACQTEAHLEIREDGTVGGAADQSPESLLQLKALKPGVIQILGVKTSRFLCQRPDGALYGSLHFDPEACSFRELLLEDGYNVYQSEAHGLPLHLPGCKSPHRDPAPRGPARFLPLPGLPPAPPEPPGILAPQPPDVGSSDPLSMVGSQGRSPSYAS

SEQ ID NO: 3531 - protein, 472 aa, Artificial Sequence
  Fusion Protein
HGEGTFTSDKSKQLEEELVRLFYEWLINGGHSKGKPPPKGGGGGGGSGGGGSGGGGSADKTHTCPPCPAPELLGGPSVFLFPPKPKDTLMISRTPEVTCVVVDVSHEDPEVKFNWYVDGVEVHNAKTKPREEQYNNASRVVSVLTVLHQDWLNGKEYKCKVSNKALPAPIEKTISKAKGQPREPQVYTLPPSRDELTKNQVSLTCLVKGFYPSDIAVEWESNGQPENNYKTTPPVLDSDGSFFLYSKLTVDKSRWQQGNVFSCSVMHEALHNHYTQKSLSLSPGGGGSGSAHPIPDSSPLLQFGGQVRQRYLYTDDACQTEAHLEIREDGTVGGAADQSPESLLQLKALKPGVIQILGVKTSRFLCQRPDGALYGSLHFDPEACSFRELLLEDGYNVYQSEAHGLPLHLPGCKSPHRDPAPRGPARFLPLPGLPPAPPEPPGILAPQPPDVGSSDPLSMVYPSQGRSPSYAS

SEQ ID NO: 3532 - protein, 471 aa, Artificial Sequence
  Fusion Protein
HGEGTFTSDKSKQLEEELVRLFYEWLINGGHSKGKPPPKGGGGGGGSGGGGSGGGGSADKTHTCPPCPAPELLGGPSVFLFPPKPKDTLMISRTPEVTCVVVDVSHEDPEVKFNWYVDGVEVHNAKTKPREEQYNNASRVVSVLTVLHQDWLNGKEYKCKVSNKALPAPIEKTISKAKGQPREPQVYTLPPSRDELTKNQVSLTCLVKGFYPSDIAVEWESNGQPENNYKTTPPVLDSDGSFFLYSKLTVDKSRWQQGNVFSCSVMHEALHNHYTQKSLSLSPGGGGSGSAHPIPDSSPLLQFGGQVRQRYLYTDDACQTEAHLEIREDGTVGGAADQSPESLLQLKALKPGVIQILGVKTSRFLCQRPDGALYGSLHFDPEACSFRELLLEDGYNVYQSEAHGLPLHLCGNKSPHRDPAPRGPARFLPLPGLPPAPPEPPGILAPQPPDVGSSDPLSMVGSQGRSPSYAS

SEQ ID NO: 3533 - protein, 472 aa, Artificial Sequence
  Fusion Protein
HGEGTFTSDKSKQLEEELVRLFYEWLINGGHSKGKPPPKGGGGGGGSGGGGSGGGGSADKTHTCPPCPAPELLGGPSVFLFPPKPKDTLMISRTPEVTCVVVDVSHEDPEVKFNWYVDGVEVHNAKTKPREEQYNNASRVVSVLTVLHQDWLNGKEYKCKVSNKALPAPIEKTISKAKGQPREPQVYTLPPSRDELTKNQVSLTCLVKGFYPSDIAVEWESNGQPENNYKTTPPVLDSDGSFFLYSKLTVDKSRWQQGNVFSCSVMHEALHNHYTQKSLSLSPGGGGSGSAHPIPDSSPLLQFGGQVRQRYLYTDDACQTEAHLEIREDGTVGGAADQSPESLLQLKALKPGVIQILGVKTSRFLCQRPDGALYGSLHFDPEACSFRELLLEDGYNVYQSEAHGLPLHLCGNKSPHRDPAPRGPARFLPLPGLPPAPPEPPGILAPQPPDVGSSDPLSMVYPSQGRSPSYAS

SEQ ID NO: 3534 - protein, 473 aa, Artificial Sequence
  Fusion Protein
HGEGTFTSDKSKQLEEELVRLFYEWLINGGHSKGKPPPKGGGGGGGSGGGGSGGGGSAESKYGPPCPPCPAPEFEGGPSVFLFPPKPKDTLMISRTPEVTCVVVDVSQEDPEVQFNWYVDGVEVHNAKTKPREEQFNSTYRVVSVLTVLHQDWLNGKEYKCKVSNKGLPSSIEKTISKAKGQPREPQVYTLPPSQEEMTKNQVSLTCLVKGFYPSDIAVEWESNGQPENNYKTTPPVLDSDGSFFLYSRLTVDKSRWQEGNVFSCSVMHEALHNHYTQKSLSLSLGGGGSGSAHPIPDSSPLLQFGGQVRQRYLYTDDACQTEAHLEIREDGTVGGAADQSPESLLQLKALKPGVIQILGVKTSRFLCQRPDGALYGSLHFDPEACSFRELLLEDGYNVYQSEAHGLPLHLPGCKSPHRDPAPRGPARFLPLPGLPPAPPEPPGILAPQPPDVGSSDPLSMVGSQGRSPSYAS

SEQ ID NO: 3535 - protein, 474 aa, Artificial Sequence
  Fusion Protein
HGEGTFTSDKSKQLEEELVRLFYEWLINGGHSKGKPPPKGGGGGGGSGGGGSGGGGSAESKYGPPCPPCPAPEFEGGPSVFLFPPKPKDTLMISRTPEVTCVVVDVSQEDPEVQFNWYVDGVEVHNAKTKPREEQFNSTYRVVSVLTVLHQDWLNGKEYKCKVSNKGLPSSIEKTISKAKGQPREPQVYTLPPSQEEMTKNQVSLTCLVKGFYPSDIAVEWESNGQPENNYKTTPPVLDSDGSFFLYSRLTVDKSRWQEGNVFSCSVMHEALHNHYTQKSLSLSLGGGGSGSAHPIPDSSPLLQFGGQVRQRYLYTDDACQTEAHLEIREDGTVGGAADQSPESLLQLKALKPGVIQILGVKTSRFLCQRPDGALYGSLHFDPEACSFRELLLEDGYNVYQSEAHGLPLHLPGCKSPHRDPAPRGPARFLPLPGLPPAPPEPPGILAPQPPDVGSSDPLSMVYPSQGRSPSYAS

SEQ ID NO: 3536 - protein, 473 aa, Artificial Sequence
  Fusion Protein
HGEGTFTSDKSKQLEEELVRLFYEWLINGGHSKGKPPPKGGGGGGGSGGGGSGGGGSAESKYGPPCPPCPAPEFEGGPSVFLFPPKPKDTLMISRTPEVTCVVVDVSQEDPEVQFNWYVDGVEVHNAKTKPREEQFNSTYRVVSVLTVLHQDWLNGKEYKCKVSNKGLPSSIEKTISKAKGQPREPQVYTLPPSQEEMTKNQVSLTCLVKGFYPSDIAVEWESNGQPENNYKTTPPVLDSDGSFFLYSRLTVDKSRWQEGNVFSCSVMHEALHNHYTQKSLSLSLGGGGSGSAHPIPDSSPLLQFGGQVRQRYLYTDDACQTEAHLEIREDGTVGGAADQSPESLLQLKALKPGVIQILGVKTSRFLCQRPDGALYGSLHFDPEACSFRELLLEDGYNVYQSEAHGLPLHLCGNKSPHRDPAPRGPARFLPLPGLPPAPPEPPGILAPQPPDVGSSDPLSMVGSQGRSPSYAS

SEQ ID NO: 3537 - protein, 474 aa, Artificial Sequence
  Fusion Protein
HGEGTFTSDKSKQLEEELVRLFYEWLINGGHSKGKPPPKGGGGGGGSGGGGSGGGGSAESKYGPPCPPCPAPEFEGGPSVFLFPPKPKDTLMISRTPEVTCVVVDVSQEDPEVQFNWYVDGVEVHNAKTKPREEQFNSTYRVVSVLTVLHQDWLNGKEYKCKVSNKGLPSSIEKTISKAKGQPREPQVYTLPPSQEEMTKNQVSLTCLVKGFYPSDIAVEWESNGQPENNYKTTPPVLDSDGSFFLYSRLTVDKSRWQEGNVFSCSVMHEALHNHYTQKSLSLSLGGGGSGSAHPIPDSSPLLQFGGQVRQRYLYTDDACQTEAHLEIREDGTVGGAADQSPESLLQLKALKPGVIQILGVKTSRFLCQRPDGALYGSLHFDPEACSFRELLLEDGYNVYQSEAHGLPLHLCGNKSPHRDPAPRGPARFLPLPGLPPAPPEPPGILAPQPPDVGSSDPLSMVYPSQGRSPSYAS

SEQ ID NO: 3538 - protein, 471 aa, Artificial Sequence
  Fusion Protein
HGEGTFTSDKSKQLEEELVRLFYEWLLAGGHSSIKPPPKGGGGGGGSGGGGSGGGGSADKTHTCPPCPAPEAAGGPSVFLFPPKPKDTLMISRTPEVTCVVVDVSHEDPEVKFNWYVDGVEVHNAKTKPREEQYNSTYRVVSVLTVLHQDWLNGKEYKCKVSNKALPAPIEKTISKAKGQPREPQVYTLPPSRDELTKNQVSLTCLVKGFYPSDIAVEWESNGQPENNYKTTPPVLDSDGSFFLYSKLTVDKSRWQQGNVFSCSVMHEALHNHYTQKSLSLSPGGGGSGSAHPIPDSSPLLQFGGQVRQRYLYTDDACQTEAHLEIREDGTVGGAADQSPESLLQLKALKPGVIQILGVKTSRFLCQRPDGALYGSLHFDPEACSFRELLLEDGYNVYQSEAHGLPLHLPGCKSPHRDPAPRGPARFLPLPGLPPAPPEPPGILAPQPPDVGSSDPLSMVGSQGRSPSYAS

SEQ ID NO: 3539 - protein, 472 aa, Artificial Sequence
  Fusion Protein
HGEGTFTSDKSKQLEEELVRLFYEWLLAGGHSSIKPPPKGGGGGGGSGGGGSGGGGSADKTHTCPPCPAPEAAGGPSVFLFPPKPKDTLMISRTPEVTCVVVDVSHEDPEVKFNWYVDGVEVHNAKTKPREEQYNSTYRVVSVLTVLHQDWLNGKEYKCKVSNKALPAPIEKTISKAKGQPREPQVYTLPPSRDELTKNQVSLTCLVKGFYPSDIAVEWESNGQPENNYKTTPPVLDSDGSFFLYSKLTVDKSRWQQGNVFSCSVMHEALHNHYTQKSLSLSPGGGGSGSAHPIPDSSPLLQFGGQVRQRYLYTDDACQTEAHLEIREDGTVGGAADQSPESLLQLKALKPGVIQILGVKTSRFLCQRPDGALYGSLHFDPEACSFRELLLEDGYNVYQSEAHGLPLHLPGCKSPHRDPAPRGPARFLPLPGLPPAPPEPPGILAPQPPDVGSSDPLSMVYPSQGRSPSYAS

SEQ ID NO: 3540 - protein, 471 aa, Artificial Sequence
  Fusion Protein
HGEGTFTSDKSKQLEEELVRLFYEWLLAGGHSSIKPPPKGGGGGGGSGGGGSGGGGSADKTHTCPPCPAPEAAGGPSVFLFPPKPKDTLMISRTPEVTCVVVDVSHEDPEVKFNWYVDGVEVHNAKTKPREEQYNSTYRVVSVLTVLHQDWLNGKEYKCKVSNKALPAPIEKTISKAKGQPREPQVYTLPPSRDELTKNQVSLTCLVKGFYPSDIAVEWESNGQPENNYKTTPPVLDSDGSFFLYSKLTVDKSRWQQGNVFSCSVMHEALHNHYTQKSLSLSPGGGGSGSAHPIPDSSPLLQFGGQVRQRYLYTDDACQTEAHLEIREDGTVGGAADQSPESLLQLKALKPGVIQILGVKTSRFLCQRPDGALYGSLHFDPEACSFRELLLEDGYNVYQSEAHGLPLHLCGNKSPHRDPAPRGPARFLPLPGLPPAPPEPPGILAPQPPDVGSSDPLSMVGSQGRSPSYAS

SEQ ID NO: 3541 - protein, 472 aa, Artificial Sequence
  Fusion Protein
HGEGTFTSDKSKQLEEELVRLFYEWLLAGGHSSIKPPPKGGGGGGGSGGGGSGGGGSADKTHTCPPCPAPEAAGGPSVFLFPPKPKDTLMISRTPEVTCVVVDVSHEDPEVKFNWYVDGVEVHNAKTKPREEQYNSTYRVVSVLTVLHQDWLNGKEYKCKVSNKALPAPIEKTISKAKGQPREPQVYTLPPSRDELTKNQVSLTCLVKGFYPSDIAVEWESNGQPENNYKTTPPVLDSDGSFFLYSKLTVDKSRWQQGNVFSCSVMHEALHNHYTQKSLSLSPGGGGSGSAHPIPDSSPLLQFGGQVRQRYLYTDDACQTEAHLEIREDGTVGGAADQSPESLLQLKALKPGVIQILGVKTSRFLCQRPDGALYGSLHFDPEACSFRELLLEDGYNVYQSEAHGLPLHLCGNKSPHRDPAPRGPARFLPLPGLPPAPPEPPGILAPQPPDVGSSDPLSMVYPSQGRSPSYAS

SEQ ID NO: 3542 - protein, 471 aa, Artificial Sequence
  Fusion Protein
HGEGTFTSDKSKQLEEELVRLFYEWLLAGGHSSIKPPPKGGGGGGGSGGGGSGGGGSADKTHTCPPCPAPELLGGPSVFLFPPKPKDTLMISRTPEVTCVVVDVSHEDPEVKFNWYVDGVEVHNAKTKPREEQYNNASRVVSVLTVLHQDWLNGKEYKCKVSNKALPAPIEKTISKAKGQPREPQVYTLPPSRDELTKNQVSLTCLVKGFYPSDIAVEWESNGQPENNYKTTPPVLDSDGSFFLYSKLTVDKSRWQQGNVFSCSVMHEALHNHYTQKSLSLSPGGGGSGSAHPIPDSSPLLQFGGQVRQRYLYTDDACQTEAHLEIREDGTVGGAADQSPESLLQLKALKPGVIQILGVKTSRFLCQRPDGALYGSLHFDPEACSFRELLLEDGYNVYQSEAHGLPLHLPGCKSPHRDPAPRGPARFLPLPGLPPAPPEPPGILAPQPPDVGSSDPLSMVGSQGRSPSYAS

SEQ ID NO: 3543 - protein, 472 aa, Artificial Sequence
  Fusion Protein
HGEGTFTSDKSKQLEEELVRLFYEWLLAGGHSSIKPPPKGGGGGGGSGGGGSGGGGSADKTHTCPPCPAPELLGGPSVFLFPPKPKDTLMISRTPEVTCVVVDVSHEDPEVKFNWYVDGVEVHNAKTKPREEQYNNASRVVSVLTVLHQDWLNGKEYKCKVSNKALPAPIEKTISKAKGQPREPQVYTLPPSRDELTKNQVSLTCLVKGFYPSDIAVEWESNGQPENNYKTTPPVLDSDGSFFLYSKLTVDKSRWQQGNVFSCSVMHEALHNHYTQKSLSLSPGGGGSGSAHPIPDSSPLLQFGGQVRQRYLYTDDACQTEAHLEIREDGTVGGAADQSPESLLQLKALKPGVIQILGVKTSRFLCQRPDGALYGSLHFDPEACSFRELLLEDGYNVYQSEAHGLPLHLPGCKSPHRDPAPRGPARFLPLPGLPPAPPEPPGILAPQPPDVGSSDPLSMVYPSQGRSPSYAS

SEQ ID NO: 3544 - protein, 471 aa, Artificial Sequence
  Fusion Protein
HGEGTFTSDKSKQLEEELVRLFYEWLLAGGHSSIKPPPKGGGGGGGSGGGGSGGGGSADKTHTCPPCPAPELLGGPSVFLFPPKPKDTLMISRTPEVTCVVVDVSHEDPEVKFNWYVDGVEVHNAKTKPREEQYNNASRVVSVLTVLHQDWLNGKEYKCKVSNKALPAPIEKTISKAKGQPREPQVYTLPPSRDELTKNQVSLTCLVKGFYPSDIAVEWESNGQPENNYKTTPPVLDSDGSFFLYSKLTVDKSRWQQGNVFSCSVMHEALHNHYTQKSLSLSPGGGGSGSAHPIPDSSPLLQFGGQVRQRYLYTDDACQTEAHLEIREDGTVGGAADQSPESLLQLKALKPGVIQILGVKTSRFLCQRPDGALYGSLHFDPEACSFRELLLEDGYNVYQSEAHGLPLHLCGNKSPHRDPAPRGPARFLPLPGLPPAPPEPPGILAPQPPDVGSSDPLSMVGSQGRSPSYAS

SEQ ID NO: 3545 - protein, 472 aa, Artificial Sequence
  Fusion Protein
HGEGTFTSDKSKQLEEELVRLFYEWLLAGGHSSIKPPPKGGGGGGGSGGGGSGGGGSADKTHTCPPCPAPELLGGPSVFLFPPKPKDTLMISRTPEVTCVVVDVSHEDPEVKFNWYVDGVEVHNAKTKPREEQYNNASRVVSVLTVLHQDWLNGKEYKCKVSNKALPAPIEKTISKAKGQPREPQVYTLPPSRDELTKNQVSLTCLVKGFYPSDIAVEWESNGQPENNYKTTPPVLDSDGSFFLYSKLTVDKSRWQQGNVFSCSVMHEALHNHYTQKSLSLSPGGGGSGSAHPIPDSSPLLQFGGQVRQRYLYTDDACQTEAHLEIREDGTVGGAADQSPESLLQLKALKPGVIQILGVKTSRFLCQRPDGALYGSLHFDPEACSFRELLLEDGYNVYQSEAHGLPLHLCGNKSPHRDPAPRGPARFLPLPGLPPAPPEPPGILAPQPPDVGSSDPLSMVYPSQGRSPSYAS

SEQ ID NO: 3546 - protein, 473 aa, Artificial Sequence
  Fusion Protein
HGEGTFTSDKSKQLEEELVRLFYEWLLAGGHSSIKPPPKGGGGGGGSGGGGSGGGGSAESKYGPPCPPCPAPEFEGGPSVFLFPPKPKDTLMISRTPEVTCVVVDVSQEDPEVQFNWYVDGVEVHNAKTKPREEQFNSTYRVVSVLTVLHQDWLNGKEYKCKVSNKGLPSSIEKTISKAKGQPREPQVYTLPPSQEEMTKNQVSLTCLVKGFYPSDIAVEWESNGQPENNYKTTPPVLDSDGSFFLYSRLTVDKSRWQEGNVFSCSVMHEALHNHYTQKSLSLSLGGGGSGSAHPIPDSSPLLQFGGQVRQRYLYTDDACQTEAHLEIREDGTVGGAADQSPESLLQLKALKPGVIQILGVKTSRFLCQRPDGALYGSLHFDPEACSFRELLLEDGYNVYQSEAHGLPLHLPGCKSPHRDPAPRGPARFLPLPGLPPAPPEPPGILAPQPPDVGSSDPLSMVGSQGRSPSYAS

SEQ ID NO: 3547 - protein, 474 aa, Artificial Sequence
  Fusion Protein
HGEGTFTSDKSKQLEEELVRLFYEWLLAGGHSSIKPPPKGGGGGGGSGGGGSGGGGSAESKYGPPCPPCPAPEFEGGPSVFLFPPKPKDTLMISRTPEVTCVVVDVSQEDPEVQFNWYVDGVEVHNAKTKPREEQFNSTYRVVSVLTVLHQDWLNGKEYKCKVSNKGLPSSIEKTISKAKGQPREPQVYTLPPSQEEMTKNQVSLTCLVKGFYPSDIAVEWESNGQPENNYKTTPPVLDSDGSFFLYSRLTVDKSRWQEGNVFSCSVMHEALHNHYTQKSLSLSLGGGGSGSAHPIPDSSPLLQFGGQVRQRYLYTDDACQTEAHLEIREDGTVGGAADQSPESLLQLKALKPGVIQILGVKTSRFLCQRPDGALYGSLHFDPEACSFRELLLEDGYNVYQSEAHGLPLHLPGCKSPHRDPAPRGPARFLPLPGLPPAPPEPPGILAPQPPDVGSSDPLSMVYPSQGRSPSYAS

SEQ ID NO: 3548 - protein, 473 aa, Artificial Sequence
  Fusion Protein
HGEGTFTSDKSKQLEEELVRLFYEWLLAGGHSSIKPPPKGGGGGGGSGGGGSGGGGSAESKYGPPCPPCPAPEFEGGPSVFLFPPKPKDTLMISRTPEVTCVVVDVSQEDPEVQFNWYVDGVEVHNAKTKPREEQFNSTYRVVSVLTVLHQDWLNGKEYKCKVSNKGLPSSIEKTISKAKGQPREPQVYTLPPSQEEMTKNQVSLTCLVKGFYPSDIAVEWESNGQPENNYKTTPPVLDSDGSFFLYSRLTVDKSRWQEGNVFSCSVMHEALHNHYTQKSLSLSLGGGGSGSAHPIPDSSPLLQFGGQVRQRYLYTDDACQTEAHLEIREDGTVGGAADQSPESLLQLKALKPGVIQILGVKTSRFLCQRPDGALYGSLHFDPEACSFRELLLEDGYNVYQSEAHGLPLHLCGNKSPHRDPAPRGPARFLPLPGLPPAPPEPPGILAPQPPDVGSSDPLSMVGSQGRSPSYAS

SEQ ID NO: 3549 - protein, 474 aa, Artificial Sequence
  Fusion Protein
HGEGTFTSDKSKQLEEELVRLFYEWLLAGGHSSIKPPPKGGGGGGGSGGGGSGGGGSAESKYGPPCPPCPAPEFEGGPSVFLFPPKPKDTLMISRTPEVTCVVVDVSQEDPEVQFNWYVDGVEVHNAKTKPREEQFNSTYRVVSVLTVLHQDWLNGKEYKCKVSNKGLPSSIEKTISKAKGQPREPQVYTLPPSQEEMTKNQVSLTCLVKGFYPSDIAVEWESNGQPENNYKTTPPVLDSDGSFFLYSRLTVDKSRWQEGNVFSCSVMHEALHNHYTQKSLSLSLGGGGSGSAHPIPDSSPLLQFGGQVRQRYLYTDDACQTEAHLEIREDGTVGGAADQSPESLLQLKALKPGVIQILGVKTSRFLCQRPDGALYGSLHFDPEACSFRELLLEDGYNVYQSEAHGLPLHLCGNKSPHRDPAPRGPARFLPLPGLPPAPPEPPGILAPQPPDVGSSDPLSMVYPSQGRSPSYAS

SEQ ID NO: 3550 - protein, 471 aa, Artificial Sequence
  Fusion Protein
HGEGTFTSDKSKQLEEELVRLFYEWLIKGGHSSIKPPPKGGGGGGGSGGGGSGGGGSADKTHTCPPCPAPEAAGGPSVFLFPPKPKDTLMISRTPEVTCVVVDVSHEDPEVKFNWYVDGVEVHNAKTKPREEQYNSTYRVVSVLTVLHQDWLNGKEYKCKVSNKALPAPIEKTISKAKGQPREPQVYTLPPSRDELTKNQVSLTCLVKGFYPSDIAVEWESNGQPENNYKTTPPVLDSDGSFFLYSKLTVDKSRWQQGNVFSCSVMHEALHNHYTQKSLSLSPGGGGSGSAHPIPDSSPLLQFGGQVRQRYLYTDDACQTEAHLEIREDGTVGGAADQSPESLLQLKALKPGVIQILGVKTSRFLCQRPDGALYGSLHFDPEACSFRELLLEDGYNVYQSEAHGLPLHLPGCKSPHRDPAPRGPARFLPLPGLPPAPPEPPGILAPQPPDVGSSDPLSMVGSQGRSPSYAS

SEQ ID NO: 3551 - protein, 472 aa, Artificial Sequence
  Fusion Protein
HGEGTFTSDKSKQLEEELVRLFYEWLIKGGHSSIKPPPKGGGGGGGSGGGGSGGGGSADKTHTCPPCPAPEAAGGPSVFLFPPKPKDTLMISRTPEVTCVVVDVSHEDPEVKFNWYVDGVEVHNAKTKPREEQYNSTYRVVSVLTVLHQDWLNGKEYKCKVSNKALPAPIEKTISKAKGQPREPQVYTLPPSRDELTKNQVSLTCLVKGFYPSDIAVEWESNGQPENNYKTTPPVLDSDGSFFLYSKLTVDKSRWQQGNVFSCSVMHEALHNHYTQKSLSLSPGGGGSGSAHPIPDSSPLLQFGGQVRQRYLYTDDACQTEAHLEIREDGTVGGAADQSPESLLQLKALKPGVIQILGVKTSRFLCQRPDGALYGSLHFDPEACSFRELLLEDGYNVYQSEAHGLPLHLPGCKSPHRDPAPRGPARFLPLPGLPPAPPEPPGILAPQPPDVGSSDPLSMVYPSQGRSPSYAS

SEQ ID NO: 3552 - protein, 471 aa, Artificial Sequence
  Fusion Protein
HGEGTFTSDKSKQLEEELVRLFYEWLIKGGHSSIKPPPKGGGGGGGSGGGGSGGGGSADKTHTCPPCPAPEAAGGPSVFLFPPKPKDTLMISRTPEVTCVVVDVSHEDPEVKFNWYVDGVEVHNAKTKPREEQYNSTYRVVSVLTVLHQDWLNGKEYKCKVSNKALPAPIEKTISKAKGQPREPQVYTLPPSRDELTKNQVSLTCLVKGFYPSDIAVEWESNGQPENNYKTTPPVLDSDGSFFLYSKLTVDKSRWQQGNVFSCSVMHEALHNHYTQKSLSLSPGGGGSGSAHPIPDSSPLLQFGGQVRQRYLYTDDACQTEAHLEIREDGTVGGAADQSPESLLQLKALKPGVIQILGVKTSRFLCQRPDGALYGSLHFDPEACSFRELLLEDGYNVYQSEAHGLPLHLCGNKSPHRDPAPRGPARFLPLPGLPPAPPEPPGILAPQPPDVGSSDPLSMVGSQGRSPSYAS

SEQ ID NO: 3553 - protein, 472 aa, Artificial Sequence
  Fusion Protein
HGEGTFTSDKSKQLEEELVRLFYEWLIKGGHSSIKPPPKGGGGGGGSGGGGSGGGGSADKTHTCPPCPAPEAAGGPSVFLFPPKPKDTLMISRTPEVTCVVVDVSHEDPEVKFNWYVDGVEVHNAKTKPREEQYNSTYRVVSVLTVLHQDWLNGKEYKCKVSNKALPAPIEKTISKAKGQPREPQVYTLPPSRDELTKNQVSLTCLVKGFYPSDIAVEWESNGQPENNYKTTPPVLDSDGSFFLYSKLTVDKSRWQQGNVFSCSVMHEALHNHYTQKSLSLSPGGGGSGSAHPIPDSSPLLQFGGQVRQRYLYTDDACQTEAHLEIREDGTVGGAADQSPESLLQLKALKPGVIQILGVKTSRFLCQRPDGALYGSLHFDPEACSFRELLLEDGYNVYQSEAHGLPLHLCGNKSPHRDPAPRGPARFLPLPGLPPAPPEPPGILAPQPPDVGSSDPLSMVYPSQGRSPSYAS

SEQ ID NO: 3554 - protein, 471 aa, Artificial Sequence
  Fusion Protein
HGEGTFTSDKSKQLEEELVRLFYEWLIKGGHSSIKPPPKGGGGGGGSGGGGSGGGGSADKTHTCPPCPAPELLGGPSVFLFPPKPKDTLMISRTPEVTCVVVDVSHEDPEVKFNWYVDGVEVHNAKTKPREEQYNNASRVVSVLTVLHQDWLNGKEYKCKVSNKALPAPIEKTISKAKGQPREPQVYTLPPSRDELTKNQVSLTCLVKGFYPSDIAVEWESNGQPENNYKTTPPVLDSDGSFFLYSKLTVDKSRWQQGNVFSCSVMHEALHNHYTQKSLSLSPGGGGSGSAHPIPDSSPLLQFGGQVRQRYLYTDDACQTEAHLEIREDGTVGGAADQSPESLLQLKALKPGVIQILGVKTSRFLCQRPDGALYGSLHFDPEACSFRELLLEDGYNVYQSEAHGLPLHLPGCKSPHRDPAPRGPARFLPLPGLPPAPPEPPGILAPQPPDVGSSDPLSMVGSQGRSPSYAS

SEQ ID NO: 3555 - protein, 472 aa, Artificial Sequence
  Fusion Protein
HGEGTFTSDKSKQLEEELVRLFYEWLIKGGHSSIKPPPKGGGGGGGSGGGGSGGGGSADKTHTCPPCPAPELLGGPSVFLFPPKPKDTLMISRTPEVTCVVVDVSHEDPEVKFNWYVDGVEVHNAKTKPREEQYNNASRVVSVLTVLHQDWLNGKEYKCKVSNKALPAPIEKTISKAKGQPREPQVYTLPPSRDELTKNQVSLTCLVKGFYPSDIAVEWESNGQPENNYKTTPPVLDSDGSFFLYSKLTVDKSRWQQGNVFSCSVMHEALHNHYTQKSLSLSPGGGGSGSAHPIPDSSPLLQFGGQVRQRYLYTDDACQTEAHLEIREDGTVGGAADQSPESLLQLKALKPGVIQILGVKTSRFLCQRPDGALYGSLHFDPEACSFRELLLEDGYNVYQSEAHGLPLHLPGCKSPHRDPAPRGPARFLPLPGLPPAPPEPPGILAPQPPDVGSSDPLSMVYPSQGRSPSYAS

SEQ ID NO: 3556 - protein, 471 aa, Artificial Sequence
  Fusion Protein
HGEGTFTSDKSKQLEEELVRLFYEWLIKGGHSSIKPPPKGGGGGGGSGGGGSGGGGSADKTHTCPPCPAPELLGGPSVFLFPPKPKDTLMISRTPEVTCVVVDVSHEDPEVKFNWYVDGVEVHNAKTKPREEQYNNASRVVSVLTVLHQDWLNGKEYKCKVSNKALPAPIEKTISKAKGQPREPQVYTLPPSRDELTKNQVSLTCLVKGFYPSDIAVEWESNGQPENNYKTTPPVLDSDGSFFLYSKLTVDKSRWQQGNVFSCSVMHEALHNHYTQKSLSLSPGGGGSGSAHPIPDSSPLLQFGGQVRQRYLYTDDACQTEAHLEIREDGTVGGAADQSPESLLQLKALKPGVIQILGVKTSRFLCQRPDGALYGSLHFDPEACSFRELLLEDGYNVYQSEAHGLPLHLCGNKSPHRDPAPRGPARFLPLPGLPPAPPEPPGILAPQPPDVGSSDPLSMVGSQGRSPSYAS

SEQ ID NO: 3557 - protein, 472 aa, Artificial Sequence
  Fusion Protein
HGEGTFTSDKSKQLEEELVRLFYEWLIKGGHSSIKPPPKGGGGGGGSGGGGSGGGGSADKTHTCPPCPAPELLGGPSVFLFPPKPKDTLMISRTPEVTCVVVDVSHEDPEVKFNWYVDGVEVHNAKTKPREEQYNNASRVVSVLTVLHQDWLNGKEYKCKVSNKALPAPIEKTISKAKGQPREPQVYTLPPSRDELTKNQVSLTCLVKGFYPSDIAVEWESNGQPENNYKTTPPVLDSDGSFFLYSKLTVDKSRWQQGNVFSCSVMHEALHNHYTQKSLSLSPGGGGSGSAHPIPDSSPLLQFGGQVRQRYLYTDDACQTEAHLEIREDGTVGGAADQSPESLLQLKALKPGVIQILGVKTSRFLCQRPDGALYGSLHFDPEACSFRELLLEDGYNVYQSEAHGLPLHLCGNKSPHRDPAPRGPARFLPLPGLPPAPPEPPGILAPQPPDVGSSDPLSMVYPSQGRSPSYAS

SEQ ID NO: 3558 - protein, 473 aa, Artificial Sequence
  Fusion Protein
HGEGTFTSDKSKQLEEELVRLFYEWLIKGGHSSIKPPPKGGGGGGGSGGGGSGGGGSAESKYGPPCPPCPAPEFEGGPSVFLFPPKPKDTLMISRTPEVTCVVVDVSQEDPEVQFNWYVDGVEVHNAKTKPREEQFNSTYRVVSVLTVLHQDWLNGKEYKCKVSNKGLPSSIEKTISKAKGQPREPQVYTLPPSQEEMTKNQVSLTCLVKGFYPSDIAVEWESNGQPENNYKTTPPVLDSDGSFFLYSRLTVDKSRWQEGNVFSCSVMHEALHNHYTQKSLSLSLGGGGSGSAHPIPDSSPLLQFGGQVRQRYLYTDDACQTEAHLEIREDGTVGGAADQSPESLLQLKALKPGVIQILGVKTSRFLCQRPDGALYGSLHFDPEACSFRELLLEDGYNVYQSEAHGLPLHLPGCKSPHRDPAPRGPARFLPLPGLPPAPPEPPGILAPQPPDVGSSDPLSMVGSQGRSPSYAS

SEQ ID NO: 3559 - protein, 474 aa, Artificial Sequence
  Fusion Protein
HGEGTFTSDKSKQLEEELVRLFYEWLIKGGHSSIKPPPKGGGGGGGSGGGGSGGGGSAESKYGPPCPPCPAPEFEGGPSVFLFPPKPKDTLMISRTPEVTCVVVDVSQEDPEVQFNWYVDGVEVHNAKTKPREEQFNSTYRVVSVLTVLHQDWLNGKEYKCKVSNKGLPSSIEKTISKAKGQPREPQVYTLPPSQEEMTKNQVSLTCLVKGFYPSDIAVEWESNGQPENNYKTTPPVLDSDGSFFLYSRLTVDKSRWQEGNVFSCSVMHEALHNHYTQKSLSLSLGGGGSGSAHPIPDSSPLLQFGGQVRQRYLYTDDACQTEAHLEIREDGTVGGAADQSPESLLQLKALKPGVIQILGVKTSRFLCQRPDGALYGSLHFDPEACSFRELLLEDGYNVYQSEAHGLPLHLPGCKSPHRDPAPRGPARFLPLPGLPPAPPEPPGILAPQPPDVGSSDPLSMVYPSQGRSPSYAS

SEQ ID NO: 3560 - protein, 473 aa, Artificial Sequence
  Fusion Protein
HGEGTFTSDKSKQLEEELVRLFYEWLIKGGHSSIKPPPKGGGGGGGSGGGGSGGGGSAESKYGPPCPPCPAPEFEGGPSVFLFPPKPKDTLMISRTPEVTCVVVDVSQEDPEVQFNWYVDGVEVHNAKTKPREEQFNSTYRVVSVLTVLHQDWLNGKEYKCKVSNKGLPSSIEKTISKAKGQPREPQVYTLPPSQEEMTKNQVSLTCLVKGFYPSDIAVEWESNGQPENNYKTTPPVLDSDGSFFLYSRLTVDKSRWQEGNVFSCSVMHEALHNHYTQKSLSLSLGGGGSGSAHPIPDSSPLLQFGGQVRQRYLYTDDACQTEAHLEIREDGTVGGAADQSPESLLQLKALKPGVIQILGVKTSRFLCQRPDGALYGSLHFDPEACSFRELLLEDGYNVYQSEAHGLPLHLCGNKSPHRDPAPRGPARFLPLPGLPPAPPEPPGILAPQPPDVGSSDPLSMVGSQGRSPSYAS

SEQ ID NO: 3561 - protein, 474 aa, Artificial Sequence
  Fusion Protein
HGEGTFTSDKSKQLEEELVRLFYEWLIKGGHSSIKPPPKGGGGGGGSGGGGSGGGGSAESKYGPPCPPCPAPEFEGGPSVFLFPPKPKDTLMISRTPEVTCVVVDVSQEDPEVQFNWYVDGVEVHNAKTKPREEQFNSTYRVVSVLTVLHQDWLNGKEYKCKVSNKGLPSSIEKTISKAKGQPREPQVYTLPPSQEEMTKNQVSLTCLVKGFYPSDIAVEWESNGQPENNYKTTPPVLDSDGSFFLYSRLTVDKSRWQEGNVFSCSVMHEALHNHYTQKSLSLSLGGGGSGSAHPIPDSSPLLQFGGQVRQRYLYTDDACQTEAHLEIREDGTVGGAADQSPESLLQLKALKPGVIQILGVKTSRFLCQRPDGALYGSLHFDPEACSFRELLLEDGYNVYQSEAHGLPLHLCGNKSPHRDPAPRGPARFLPLPGLPPAPPEPPGILAPQPPDVGSSDPLSMVYPSQGRSPSYAS

SEQ ID NO: 3562 - protein, 471 aa, Artificial Sequence
  Fusion Protein
HGEGTFTSDKSKQLEKEAVRLFYEWLKAGGHSKGKPPPKGGGGGGGSGGGGSGGGGSADKTHTCPPCPAPEAAGGPSVFLFPPKPKDTLMISRTPEVTCVVVDVSHEDPEVKFNWYVDGVEVHNAKTKPREEQYNSTYRVVSVLTVLHQDWLNGKEYKCKVSNKALPAPIEKTISKAKGQPREPQVYTLPPSRDELTKNQVSLTCLVKGFYPSDIAVEWESNGQPENNYKTTPPVLDSDGSFFLYSKLTVDKSRWQQGNVFSCSVMHEALHNHYTQKSLSLSPGGGGSGSAHPIPDSSPLLQFGGQVRQRYLYTDDACQTEAHLEIREDGTVGGAADQSPESLLQLKALKPGVIQILGVKTSRFLCQRPDGALYGSLHFDPEACSFRELLLEDGYNVYQSEAHGLPLHLPGCKSPHRDPAPRGPARFLPLPGLPPAPPEPPGILAPQPPDVGSSDPLSMVGSQGRSPSYAS

SEQ ID NO: 3563 - protein, 472 aa, Artificial Sequence
  Fusion Protein
HGEGTFTSDKSKQLEKEAVRLFYEWLKAGGHSKGKPPPKGGGGGGGSGGGGSGGGGSADKTHTCPPCPAPEAAGGPSVFLFPPKPKDTLMISRTPEVTCVVVDVSHEDPEVKFNWYVDGVEVHNAKTKPREEQYNSTYRVVSVLTVLHQDWLNGKEYKCKVSNKALPAPIEKTISKAKGQPREPQVYTLPPSRDELTKNQVSLTCLVKGFYPSDIAVEWESNGQPENNYKTTPPVLDSDGSFFLYSKLTVDKSRWQQGNVFSCSVMHEALHNHYTQKSLSLSPGGGGSGSAHPIPDSSPLLQFGGQVRQRYLYTDDACQTEAHLEIREDGTVGGAADQSPESLLQLKALKPGVIQILGVKTSRFLCQRPDGALYGSLHFDPEACSFRELLLEDGYNVYQSEAHGLPLHLPGCKSPHRDPAPRGPARFLPLPGLPPAPPEPPGILAPQPPDVGSSDPLSMVYPSQGRSPSYAS

SEQ ID NO: 3564 - protein, 471 aa, Artificial Sequence
  Fusion Protein
HGEGTFTSDKSKQLEKEAVRLFYEWLKAGGHSKGKPPPKGGGGGGGSGGGGSGGGGSADKTHTCPPCPAPEAAGGPSVFLFPPKPKDTLMISRTPEVTCVVVDVSHEDPEVKFNWYVDGVEVHNAKTKPREEQYNSTYRVVSVLTVLHQDWLNGKEYKCKVSNKALPAPIEKTISKAKGQPREPQVYTLPPSRDELTKNQVSLTCLVKGFYPSDIAVEWESNGQPENNYKTTPPVLDSDGSFFLYSKLTVDKSRWQQGNVFSCSVMHEALHNHYTQKSLSLSPGGGGSGSAHPIPDSSPLLQFGGQVRQRYLYTDDACQTEAHLEIREDGTVGGAADQSPESLLQLKALKPGVIQILGVKTSRFLCQRPDGALYGSLHFDPEACSFRELLLEDGYNVYQSEAHGLPLHLCGNKSPHRDPAPRGPARFLPLPGLPPAPPEPPGILAPQPPDVGSSDPLSMVGSQGRSPSYAS

SEQ ID NO: 3565 - protein, 472 aa, Artificial Sequence
  Fusion Protein
HGEGTFTSDKSKQLEKEAVRLFYEWLKAGGHSKGKPPPKGGGGGGGSGGGGSGGGGSADKTHTCPPCPAPEAAGGPSVFLFPPKPKDTLMISRTPEVTCVVVDVSHEDPEVKFNWYVDGVEVHNAKTKPREEQYNSTYRVVSVLTVLHQDWLNGKEYKCKVSNKALPAPIEKTISKAKGQPREPQVYTLPPSRDELTKNQVSLTCLVKGFYPSDIAVEWESNGQPENNYKTTPPVLDSDGSFFLYSKLTVDKSRWQQGNVFSCSVMHEALHNHYTQKSLSLSPGGGGSGSAHPIPDSSPLLQFGGQVRQRYLYTDDACQTEAHLEIREDGTVGGAADQSPESLLQLKALKPGVIQILGVKTSRFLCQRPDGALYGSLHFDPEACSFRELLLEDGYNVYQSEAHGLPLHLCGNKSPHRDPAPRGPARFLPLPGLPPAPPEPPGILAPQPPDVGSSDPLSMVYPSQGRSPSYAS

SEQ ID NO: 3566 - protein, 471 aa, Artificial Sequence
  Fusion Protein
HGEGTFTSDKSKQLEKEAVRLFYEWLKAGGHSKGKPPPKGGGGGGGSGGGGSGGGGSADKTHTCPPCPAPELLGGPSVFLFPPKPKDTLMISRTPEVTCVVVDVSHEDPEVKFNWYVDGVEVHNAKTKPREEQYNNASRVVSVLTVLHQDWLNGKEYKCKVSNKALPAPIEKTISKAKGQPREPQVYTLPPSRDELTKNQVSLTCLVKGFYPSDIAVEWESNGQPENNYKTTPPVLDSDGSFFLYSKLTVDKSRWQQGNVFSCSVMHEALHNHYTQKSLSLSPGGGGSGSAHPIPDSSPLLQFGGQVRQRYLYTDDACQTEAHLEIREDGTVGGAADQSPESLLQLKALKPGVIQILGVKTSRFLCQRPDGALYGSLHFDPEACSFRELLLEDGYNVYQSEAHGLPLHLPGCKSPHRDPAPRGPARFLPLPGLPPAPPEPPGILAPQPPDVGSSDPLSMVGSQGRSPSYAS

SEQ ID NO: 3567 - protein, 472 aa, Artificial Sequence
  Fusion Protein
HGEGTFTSDKSKQLEKEAVRLFYEWLKAGGHSKGKPPPKGGGGGGGSGGGGSGGGGSADKTHTCPPCPAPELLGGPSVFLFPPKPKDTLMISRTPEVTCVVVDVSHEDPEVKFNWYVDGVEVHNAKTKPREEQYNNASRVVSVLTVLHQDWLNGKEYKCKVSNKALPAPIEKTISKAKGQPREPQVYTLPPSRDELTKNQVSLTCLVKGFYPSDIAVEWESNGQPENNYKTTPPVLDSDGSFFLYSKLTVDKSRWQQGNVFSCSVMHEALHNHYTQKSLSLSPGGGGSGSAHPIPDSSPLLQFGGQVRQRYLYTDDACQTEAHLEIREDGTVGGAADQSPESLLQLKALKPGVIQILGVKTSRFLCQRPDGALYGSLHFDPEACSFRELLLEDGYNVYQSEAHGLPLHLPGCKSPHRDPAPRGPARFLPLPGLPPAPPEPPGILAPQPPDVGSSDPLSMVYPSQGRSPSYAS

SEQ ID NO: 3568 - protein, 471 aa, Artificial Sequence
  Fusion Protein
HGEGTFTSDKSKQLEKEAVRLFYEWLKAGGHSKGKPPPKGGGGGGGSGGGGSGGGGSADKTHTCPPCPAPELLGGPSVFLFPPKPKDTLMISRTPEVTCVVVDVSHEDPEVKFNWYVDGVEVHNAKTKPREEQYNNASRVVSVLTVLHQDWLNGKEYKCKVSNKALPAPIEKTISKAKGQPREPQVYTLPPSRDELTKNQVSLTCLVKGFYPSDIAVEWESNGQPENNYKTTPPVLDSDGSFFLYSKLTVDKSRWQQGNVFSCSVMHEALHNHYTQKSLSLSPGGGGSGSAHPIPDSSPLLQFGGQVRQRYLYTDDACQTEAHLEIREDGTVGGAADQSPESLLQLKALKPGVIQILGVKTSRFLCQRPDGALYGSLHFDPEACSFRELLLEDGYNVYQSEAHGLPLHLCGNKSPHRDPAPRGPARFLPLPGLPPAPPEPPGILAPQPPDVGSSDPLSMVGSQGRSPSYAS

SEQ ID NO: 3569 - protein, 472 aa, Artificial Sequence
  Fusion Protein
HGEGTFTSDKSKQLEKEAVRLFYEWLKAGGHSKGKPPPKGGGGGGGSGGGGSGGGGSADKTHTCPPCPAPELLGGPSVFLFPPKPKDTLMISRTPEVTCVVVDVSHEDPEVKFNWYVDGVEVHNAKTKPREEQYNNASRVVSVLTVLHQDWLNGKEYKCKVSNKALPAPIEKTISKAKGQPREPQVYTLPPSRDELTKNQVSLTCLVKGFYPSDIAVEWESNGQPENNYKTTPPVLDSDGSFFLYSKLTVDKSRWQQGNVFSCSVMHEALHNHYTQKSLSLSPGGGGSGSAHPIPDSSPLLQFGGQVRQRYLYTDDACQTEAHLEIREDGTVGGAADQSPESLLQLKALKPGVIQILGVKTSRFLCQRPDGALYGSLHFDPEACSFRELLLEDGYNVYQSEAHGLPLHLCGNKSPHRDPAPRGPARFLPLPGLPPAPPEPPGILAPQPPDVGSSDPLSMVYPSQGRSPSYAS

SEQ ID NO: 3570 - protein, 473 aa, Artificial Sequence
  Fusion Protein
HGEGTFTSDKSKQLEKEAVRLFYEWLKAGGHSKGKPPPKGGGGGGGSGGGGSGGGGSAESKYGPPCPPCPAPEFEGGPSVFLFPPKPKDTLMISRTPEVTCVVVDVSQEDPEVQFNWYVDGVEVHNAKTKPREEQFNSTYRVVSVLTVLHQDWLNGKEYKCKVSNKGLPSSIEKTISKAKGQPREPQVYTLPPSQEEMTKNQVSLTCLVKGFYPSDIAVEWESNGQPENNYKTTPPVLDSDGSFFLYSRLTVDKSRWQEGNVFSCSVMHEALHNHYTQKSLSLSLGGGGSGSAHPIPDSSPLLQFGGQVRQRYLYTDDACQTEAHLEIREDGTVGGAADQSPESLLQLKALKPGVIQILGVKTSRFLCQRPDGALYGSLHFDPEACSFRELLLEDGYNVYQSEAHGLPLHLPGCKSPHRDPAPRGPARFLPLPGLPPAPPEPPGILAPQPPDVGSSDPLSMVGSQGRSPSYAS

SEQ ID NO: 3571 - protein, 474 aa, Artificial Sequence
  Fusion Protein
HGEGTFTSDKSKQLEKEAVRLFYEWLKAGGHSKGKPPPKGGGGGGGSGGGGSGGGGSAESKYGPPCPPCPAPEFEGGPSVFLFPPKPKDTLMISRTPEVTCVVVDVSQEDPEVQFNWYVDGVEVHNAKTKPREEQFNSTYRVVSVLTVLHQDWLNGKEYKCKVSNKGLPSSIEKTISKAKGQPREPQVYTLPPSQEEMTKNQVSLTCLVKGFYPSDIAVEWESNGQPENNYKTTPPVLDSDGSFFLYSRLTVDKSRWQEGNVFSCSVMHEALHNHYTQKSLSLSLGGGGSGSAHPIPDSSPLLQFGGQVRQRYLYTDDACQTEAHLEIREDGTVGGAADQSPESLLQLKALKPGVIQILGVKTSRFLCQRPDGALYGSLHFDPEACSFRELLLEDGYNVYQSEAHGLPLHLPGCKSPHRDPAPRGPARFLPLPGLPPAPPEPPGILAPQPPDVGSSDPLSMVYPSQGRSPSYAS

SEQ ID NO: 3572 - protein, 473 aa, Artificial Sequence
  Fusion Protein
HGEGTFTSDKSKQLEKEAVRLFYEWLKAGGHSKGKPPPKGGGGGGGSGGGGSGGGGSAESKYGPPCPPCPAPEFEGGPSVFLFPPKPKDTLMISRTPEVTCVVVDVSQEDPEVQFNWYVDGVEVHNAKTKPREEQFNSTYRVVSVLTVLHQDWLNGKEYKCKVSNKGLPSSIEKTISKAKGQPREPQVYTLPPSQEEMTKNQVSLTCLVKGFYPSDIAVEWESNGQPENNYKTTPPVLDSDGSFFLYSRLTVDKSRWQEGNVFSCSVMHEALHNHYTQKSLSLSLGGGGSGSAHPIPDSSPLLQFGGQVRQRYLYTDDACQTEAHLEIREDGTVGGAADQSPESLLQLKALKPGVIQILGVKTSRFLCQRPDGALYGSLHFDPEACSFRELLLEDGYNVYQSEAHGLPLHLCGNKSPHRDPAPRGPARFLPLPGLPPAPPEPPGILAPQPPDVGSSDPLSMVGSQGRSPSYAS

SEQ ID NO: 3573 - protein, 474 aa, Artificial Sequence
  Fusion Protein
HGEGTFTSDKSKQLEKEAVRLFYEWLKAGGHSKGKPPPKGGGGGGGSGGGGSGGGGSAESKYGPPCPPCPAPEFEGGPSVFLFPPKPKDTLMISRTPEVTCVVVDVSQEDPEVQFNWYVDGVEVHNAKTKPREEQFNSTYRVVSVLTVLHQDWLNGKEYKCKVSNKGLPSSIEKTISKAKGQPREPQVYTLPPSQEEMTKNQVSLTCLVKGFYPSDIAVEWESNGQPENNYKTTPPVLDSDGSFFLYSRLTVDKSRWQEGNVFSCSVMHEALHNHYTQKSLSLSLGGGGSGSAHPIPDSSPLLQFGGQVRQRYLYTDDACQTEAHLEIREDGTVGGAADQSPESLLQLKALKPGVIQILGVKTSRFLCQRPDGALYGSLHFDPEACSFRELLLEDGYNVYQSEAHGLPLHLCGNKSPHRDPAPRGPARFLPLPGLPPAPPEPPGILAPQPPDVGSSDPLSMVYPSQGRSPSYAS

SEQ ID NO: 3574 - protein, 471 aa, Artificial Sequence
  Fusion Protein
HGEGTFTSDKSKQLEKELVRLFYEWLINGGHSSIRPPPKGGGGGGGSGGGGSGGGGSADKTHTCPPCPAPEAAGGPSVFLFPPKPKDTLMISRTPEVTCVVVDVSHEDPEVKFNWYVDGVEVHNAKTKPREEQYNSTYRVVSVLTVLHQDWLNGKEYKCKVSNKALPAPIEKTISKAKGQPREPQVYTLPPSRDELTKNQVSLTCLVKGFYPSDIAVEWESNGQPENNYKTTPPVLDSDGSFFLYSKLTVDKSRWQQGNVFSCSVMHEALHNHYTQKSLSLSPGGGGSGSAHPIPDSSPLLQFGGQVRQRYLYTDDACQTEAHLEIREDGTVGGAADQSPESLLQLKALKPGVIQILGVKTSRFLCQRPDGALYGSLHFDPEACSFRELLLEDGYNVYQSEAHGLPLHLPGCKSPHRDPAPRGPARFLPLPGLPPAPPEPPGILAPQPPDVGSSDPLSMVGSQGRSPSYAS

SEQ ID NO: 3575 - protein, 472 aa, Artificial Sequence
  Fusion Protein
HGEGTFTSDKSKQLEKELVRLFYEWLINGGHSSIRPPPKGGGGGGGSGGGGSGGGGSADKTHTCPPCPAPEAAGGPSVFLFPPKPKDTLMISRTPEVTCVVVDVSHEDPEVKFNWYVDGVEVHNAKTKPREEQYNSTYRVVSVLTVLHQDWLNGKEYKCKVSNKALPAPIEKTISKAKGQPREPQVYTLPPSRDELTKNQVSLTCLVKGFYPSDIAVEWESNGQPENNYKTTPPVLDSDGSFFLYSKLTVDKSRWQQGNVFSCSVMHEALHNHYTQKSLSLSPGGGGSGSAHPIPDSSPLLQFGGQVRQRYLYTDDACQTEAHLEIREDGTVGGAADQSPESLLQLKALKPGVIQILGVKTSRFLCQRPDGALYGSLHFDPEACSFRELLLEDGYNVYQSEAHGLPLHLPGCKSPHRDPAPRGPARFLPLPGLPPAPPEPPGILAPQPPDVGSSDPLSMVYPSQGRSPSYAS

SEQ ID NO: 3576 - protein, 471 aa, Artificial Sequence
  Fusion Protein
HGEGTFTSDKSKQLEKELVRLFYEWLINGGHSSIRPPPKGGGGGGGSGGGGSGGGGSADKTHTCPPCPAPEAAGGPSVFLFPPKPKDTLMISRTPEVTCVVVDVSHEDPEVKFNWYVDGVEVHNAKTKPREEQYNSTYRVVSVLTVLHQDWLNGKEYKCKVSNKALPAPIEKTISKAKGQPREPQVYTLPPSRDELTKNQVSLTCLVKGFYPSDIAVEWESNGQPENNYKTTPPVLDSDGSFFLYSKLTVDKSRWQQGNVFSCSVMHEALHNHYTQKSLSLSPGGGGSGSAHPIPDSSPLLQFGGQVRQRYLYTDDACQTEAHLEIREDGTVGGAADQSPESLLQLKALKPGVIQILGVKTSRFLCQRPDGALYGSLHFDPEACSFRELLLEDGYNVYQSEAHGLPLHLCGNKSPHRDPAPRGPARFLPLPGLPPAPPEPPGILAPQPPDVGSSDPLSMVGSQGRSPSYAS

SEQ ID NO: 3577 - protein, 472 aa, Artificial Sequence
  Fusion Protein
HGEGTFTSDKSKQLEKELVRLFYEWLINGGHSSIRPPPKGGGGGGGSGGGGSGGGGSADKTHTCPPCPAPEAAGGPSVFLFPPKPKDTLMISRTPEVTCVVVDVSHEDPEVKFNWYVDGVEVHNAKTKPREEQYNSTYRVVSVLTVLHQDWLNGKEYKCKVSNKALPAPIEKTISKAKGQPREPQVYTLPPSRDELTKNQVSLTCLVKGFYPSDIAVEWESNGQPENNYKTTPPVLDSDGSFFLYSKLTVDKSRWQQGNVFSCSVMHEALHNHYTQKSLSLSPGGGGSGSAHPIPDSSPLLQFGGQVRQRYLYTDDACQTEAHLEIREDGTVGGAADQSPESLLQLKALKPGVIQILGVKTSRFLCQRPDGALYGSLHFDPEACSFRELLLEDGYNVYQSEAHGLPLHLCGNKSPHRDPAPRGPARFLPLPGLPPAPPEPPGILAPQPPDVGSSDPLSMVYPSQGRSPSYAS

SEQ ID NO: 3578 - protein, 471 aa, Artificial Sequence
  Fusion Protein
HGEGTFTSDKSKQLEKELVRLFYEWLINGGHSSIRPPPKGGGGGGGSGGGGSGGGGSADKTHTCPPCPAPELLGGPSVFLFPPKPKDTLMISRTPEVTCVVVDVSHEDPEVKFNWYVDGVEVHNAKTKPREEQYNNASRVVSVLTVLHQDWLNGKEYKCKVSNKALPAPIEKTISKAKGQPREPQVYTLPPSRDELTKNQVSLTCLVKGFYPSDIAVEWESNGQPENNYKTTPPVLDSDGSFFLYSKLTVDKSRWQQGNVFSCSVMHEALHNHYTQKSLSLSPGGGGSGSAHPIPDSSPLLQFGGQVRQRYLYTDDACQTEAHLEIREDGTVGGAADQSPESLLQLKALKPGVIQILGVKTSRFLCQRPDGALYGSLHFDPEACSFRELLLEDGYNVYQSEAHGLPLHLPGCKSPHRDPAPRGPARFLPLPGLPPAPPEPPGILAPQPPDVGSSDPLSMVGSQGRSPSYAS

SEQ ID NO: 3579 - protein, 472 aa, Artificial Sequence
  Fusion Protein
HGEGTFTSDKSKQLEKELVRLFYEWLINGGHSSIRPPPKGGGGGGGSGGGGSGGGGSADKTHTCPPCPAPELLGGPSVFLFPPKPKDTLMISRTPEVTCVVVDVSHEDPEVKFNWYVDGVEVHNAKTKPREEQYNNASRVVSVLTVLHQDWLNGKEYKCKVSNKALPAPIEKTISKAKGQPREPQVYTLPPSRDELTKNQVSLTCLVKGFYPSDIAVEWESNGQPENNYKTTPPVLDSDGSFFLYSKLTVDKSRWQQGNVFSCSVMHEALHNHYTQKSLSLSPGGGGSGSAHPIPDSSPLLQFGGQVRQRYLYTDDACQTEAHLEIREDGTVGGAADQSPESLLQLKALKPGVIQILGVKTSRFLCQRPDGALYGSLHFDPEACSFRELLLEDGYNVYQSEAHGLPLHLPGCKSPHRDPAPRGPARFLPLPGLPPAPPEPPGILAPQPPDVGSSDPLSMVYPSQGRSPSYAS

SEQ ID NO: 3580 - protein, 471 aa, Artificial Sequence
  Fusion Protein
HGEGTFTSDKSKQLEKELVRLFYEWLINGGHSSIRPPPKGGGGGGGSGGGGSGGGGSADKTHTCPPCPAPELLGGPSVFLFPPKPKDTLMISRTPEVTCVVVDVSHEDPEVKFNWYVDGVEVHNAKTKPREEQYNNASRVVSVLTVLHQDWLNGKEYKCKVSNKALPAPIEKTISKAKGQPREPQVYTLPPSRDELTKNQVSLTCLVKGFYPSDIAVEWESNGQPENNYKTTPPVLDSDGSFFLYSKLTVDKSRWQQGNVFSCSVMHEALHNHYTQKSLSLSPGGGGSGSAHPIPDSSPLLQFGGQVRQRYLYTDDACQTEAHLEIREDGTVGGAADQSPESLLQLKALKPGVIQILGVKTSRFLCQRPDGALYGSLHFDPEACSFRELLLEDGYNVYQSEAHGLPLHLCGNKSPHRDPAPRGPARFLPLPGLPPAPPEPPGILAPQPPDVGSSDPLSMVGSQGRSPSYAS

SEQ ID NO: 3581 - protein, 472 aa, Artificial Sequence
  Fusion Protein
HGEGTFTSDKSKQLEKELVRLFYEWLINGGHSSIRPPPKGGGGGGGSGGGGSGGGGSADKTHTCPPCPAPELLGGPSVFLFPPKPKDTLMISRTPEVTCVVVDVSHEDPEVKFNWYVDGVEVHNAKTKPREEQYNNASRVVSVLTVLHQDWLNGKEYKCKVSNKALPAPIEKTISKAKGQPREPQVYTLPPSRDELTKNQVSLTCLVKGFYPSDIAVEWESNGQPENNYKTTPPVLDSDGSFFLYSKLTVDKSRWQQGNVFSCSVMHEALHNHYTQKSLSLSPGGGGSGSAHPIPDSSPLLQFGGQVRQRYLYTDDACQTEAHLEIREDGTVGGAADQSPESLLQLKALKPGVIQILGVKTSRFLCQRPDGALYGSLHFDPEACSFRELLLEDGYNVYQSEAHGLPLHLCGNKSPHRDPAPRGPARFLPLPGLPPAPPEPPGILAPQPPDVGSSDPLSMVYPSQGRSPSYAS

SEQ ID NO: 3582 - protein, 473 aa, Artificial Sequence
  Fusion Protein
HGEGTFTSDKSKQLEKELVRLFYEWLINGGHSSIRPPPKGGGGGGGSGGGGSGGGGSAESKYGPPCPPCPAPEFEGGPSVFLFPPKPKDTLMISRTPEVTCVVVDVSQEDPEVQFNWYVDGVEVHNAKTKPREEQFNSTYRVVSVLTVLHQDWLNGKEYKCKVSNKGLPSSIEKTISKAKGQPREPQVYTLPPSQEEMTKNQVSLTCLVKGFYPSDIAVEWESNGQPENNYKTTPPVLDSDGSFFLYSRLTVDKSRWQEGNVFSCSVMHEALHNHYTQKSLSLSLGGGGSGSAHPIPDSSPLLQFGGQVRQRYLYTDDACQTEAHLEIREDGTVGGAADQSPESLLQLKALKPGVIQILGVKTSRFLCQRPDGALYGSLHFDPEACSFRELLLEDGYNVYQSEAHGLPLHLPGCKSPHRDPAPRGPARFLPLPGLPPAPPEPPGILAPQPPDVGSSDPLSMVGSQGRSPSYAS

SEQ ID NO: 3583 - protein, 474 aa, Artificial Sequence
  Fusion Protein
HGEGTFTSDKSKQLEKELVRLFYEWLINGGHSSIRPPPKGGGGGGGSGGGGSGGGGSAESKYGPPCPPCPAPEFEGGPSVFLFPPKPKDTLMISRTPEVTCVVVDVSQEDPEVQFNWYVDGVEVHNAKTKPREEQFNSTYRVVSVLTVLHQDWLNGKEYKCKVSNKGLPSSIEKTISKAKGQPREPQVYTLPPSQEEMTKNQVSLTCLVKGFYPSDIAVEWESNGQPENNYKTTPPVLDSDGSFFLYSRLTVDKSRWQEGNVFSCSVMHEALHNHYTQKSLSLSLGGGGSGSAHPIPDSSPLLQFGGQVRQRYLYTDDACQTEAHLEIREDGTVGGAADQSPESLLQLKALKPGVIQILGVKTSRFLCQRPDGALYGSLHFDPEACSFRELLLEDGYNVYQSEAHGLPLHLPGCKSPHRDPAPRGPARFLPLPGLPPAPPEPPGILAPQPPDVGSSDPLSMVYPSQGRSPSYAS

SEQ ID NO: 3584 - protein, 473 aa, Artificial Sequence
  Fusion Protein
HGEGTFTSDKSKQLEKELVRLFYEWLINGGHSSIRPPPKGGGGGGGSGGGGSGGGGSAESKYGPPCPPCPAPEFEGGPSVFLFPPKPKDTLMISRTPEVTCVVVDVSQEDPEVQFNWYVDGVEVHNAKTKPREEQFNSTYRVVSVLTVLHQDWLNGKEYKCKVSNKGLPSSIEKTISKAKGQPREPQVYTLPPSQEEMTKNQVSLTCLVKGFYPSDIAVEWESNGQPENNYKTTPPVLDSDGSFFLYSRLTVDKSRWQEGNVFSCSVMHEALHNHYTQKSLSLSLGGGGSGSAHPIPDSSPLLQFGGQVRQRYLYTDDACQTEAHLEIREDGTVGGAADQSPESLLQLKALKPGVIQILGVKTSRFLCQRPDGALYGSLHFDPEACSFRELLLEDGYNVYQSEAHGLPLHLCGNKSPHRDPAPRGPARFLPLPGLPPAPPEPPGILAPQPPDVGSSDPLSMVGSQGRSPSYAS

SEQ ID NO: 3585 - protein, 474 aa, Artificial Sequence
  Fusion Protein
HGEGTFTSDKSKQLEKELVRLFYEWLINGGHSSIRPPPKGGGGGGGSGGGGSGGGGSAESKYGPPCPPCPAPEFEGGPSVFLFPPKPKDTLMISRTPEVTCVVVDVSQEDPEVQFNWYVDGVEVHNAKTKPREEQFNSTYRVVSVLTVLHQDWLNGKEYKCKVSNKGLPSSIEKTISKAKGQPREPQVYTLPPSQEEMTKNQVSLTCLVKGFYPSDIAVEWESNGQPENNYKTTPPVLDSDGSFFLYSRLTVDKSRWQEGNVFSCSVMHEALHNHYTQKSLSLSLGGGGSGSAHPIPDSSPLLQFGGQVRQRYLYTDDACQTEAHLEIREDGTVGGAADQSPESLLQLKALKPGVIQILGVKTSRFLCQRPDGALYGSLHFDPEACSFRELLLEDGYNVYQSEAHGLPLHLCGNKSPHRDPAPRGPARFLPLPGLPPAPPEPPGILAPQPPDVGSSDPLSMVYPSQGRSPSYAS

SEQ ID NO: 3586 - protein, 471 aa, Artificial Sequence
  Fusion Protein
HGEGTFTSDKSKQLEKELVRLFYEWLINGGHSKIKPPPKGGGGGGGSGGGGSGGGGSADKTHTCPPCPAPEAAGGPSVFLFPPKPKDTLMISRTPEVTCVVVDVSHEDPEVKFNWYVDGVEVHNAKTKPREEQYNSTYRVVSVLTVLHQDWLNGKEYKCKVSNKALPAPIEKTISKAKGQPREPQVYTLPPSRDELTKNQVSLTCLVKGFYPSDIAVEWESNGQPENNYKTTPPVLDSDGSFFLYSKLTVDKSRWQQGNVFSCSVMHEALHNHYTQKSLSLSPGGGGSGSAHPIPDSSPLLQFGGQVRQRYLYTDDACQTEAHLEIREDGTVGGAADQSPESLLQLKALKPGVIQILGVKTSRFLCQRPDGALYGSLHFDPEACSFRELLLEDGYNVYQSEAHGLPLHLPGCKSPHRDPAPRGPARFLPLPGLPPAPPEPPGILAPQPPDVGSSDPLSMVGSQGRSPSYAS

SEQ ID NO: 3587 - protein, 472 aa, Artificial Sequence
  Fusion Protein
HGEGTFTSDKSKQLEKELVRLFYEWLINGGHSKIKPPPKGGGGGGGSGGGGSGGGGSADKTHTCPPCPAPEAAGGPSVFLFPPKPKDTLMISRTPEVTCVVVDVSHEDPEVKFNWYVDGVEVHNAKTKPREEQYNSTYRVVSVLTVLHQDWLNGKEYKCKVSNKALPAPIEKTISKAKGQPREPQVYTLPPSRDELTKNQVSLTCLVKGFYPSDIAVEWESNGQPENNYKTTPPVLDSDGSFFLYSKLTVDKSRWQQGNVFSCSVMHEALHNHYTQKSLSLSPGGGGSGSAHPIPDSSPLLQFGGQVRQRYLYTDDACQTEAHLEIREDGTVGGAADQSPESLLQLKALKPGVIQILGVKTSRFLCQRPDGALYGSLHFDPEACSFRELLLEDGYNVYQSEAHGLPLHLPGCKSPHRDPAPRGPARFLPLPGLPPAPPEPPGILAPQPPDVGSSDPLSMVYPSQGRSPSYAS

SEQ ID NO: 3588 - protein, 471 aa, Artificial Sequence
  Fusion Protein
HGEGTFTSDKSKQLEKELVRLFYEWLINGGHSKIKPPPKGGGGGGGSGGGGSGGGGSADKTHTCPPCPAPEAAGGPSVFLFPPKPKDTLMISRTPEVTCVVVDVSHEDPEVKFNWYVDGVEVHNAKTKPREEQYNSTYRVVSVLTVLHQDWLNGKEYKCKVSNKALPAPIEKTISKAKGQPREPQVYTLPPSRDELTKNQVSLTCLVKGFYPSDIAVEWESNGQPENNYKTTPPVLDSDGSFFLYSKLTVDKSRWQQGNVFSCSVMHEALHNHYTQKSLSLSPGGGGSGSAHPIPDSSPLLQFGGQVRQRYLYTDDACQTEAHLEIREDGTVGGAADQSPESLLQLKALKPGVIQILGVKTSRFLCQRPDGALYGSLHFDPEACSFRELLLEDGYNVYQSEAHGLPLHLCGNKSPHRDPAPRGPARFLPLPGLPPAPPEPPGILAPQPPDVGSSDPLSMVGSQGRSPSYAS

SEQ ID NO: 3589 - protein, 472 aa, Artificial Sequence
  Fusion Protein
HGEGTFTSDKSKQLEKELVRLFYEWLINGGHSKIKPPPKGGGGGGGSGGGGSGGGGSADKTHTCPPCPAPEAAGGPSVFLFPPKPKDTLMISRTPEVTCVVVDVSHEDPEVKFNWYVDGVEVHNAKTKPREEQYNSTYRVVSVLTVLHQDWLNGKEYKCKVSNKALPAPIEKTISKAKGQPREPQVYTLPPSRDELTKNQVSLTCLVKGFYPSDIAVEWESNGQPENNYKTTPPVLDSDGSFFLYSKLTVDKSRWQQGNVFSCSVMHEALHNHYTQKSLSLSPGGGGSGSAHPIPDSSPLLQFGGQVRQRYLYTDDACQTEAHLEIREDGTVGGAADQSPESLLQLKALKPGVIQILGVKTSRFLCQRPDGALYGSLHFDPEACSFRELLLEDGYNVYQSEAHGLPLHLCGNKSPHRDPAPRGPARFLPLPGLPPAPPEPPGILAPQPPDVGSSDPLSMVYPSQGRSPSYAS

SEQ ID NO: 3590 - protein, 471 aa, Artificial Sequence
  Fusion Protein
HGEGTFTSDKSKQLEKELVRLFYEWLINGGHSKIKPPPKGGGGGGGSGGGGSGGGGSADKTHTCPPCPAPELLGGPSVFLFPPKPKDTLMISRTPEVTCVVVDVSHEDPEVKFNWYVDGVEVHNAKTKPREEQYNNASRVVSVLTVLHQDWLNGKEYKCKVSNKALPAPIEKTISKAKGQPREPQVYTLPPSRDELTKNQVSLTCLVKGFYPSDIAVEWESNGQPENNYKTTPPVLDSDGSFFLYSKLTVDKSRWQQGNVFSCSVMHEALHNHYTQKSLSLSPGGGGSGSAHPIPDSSPLLQFGGQVRQRYLYTDDACQTEAHLEIREDGTVGGAADQSPESLLQLKALKPGVIQILGVKTSRFLCQRPDGALYGSLHFDPEACSFRELLLEDGYNVYQSEAHGLPLHLPGCKSPHRDPAPRGPARFLPLPGLPPAPPEPPGILAPQPPDVGSSDPLSMVGSQGRSPSYAS

SEQ ID NO: 3591 - protein, 472 aa, Artificial Sequence
  Fusion Protein
HGEGTFTSDKSKQLEKELVRLFYEWLINGGHSKIKPPPKGGGGGGGSGGGGSGGGGSADKTHTCPPCPAPELLGGPSVFLFPPKPKDTLMISRTPEVTCVVVDVSHEDPEVKFNWYVDGVEVHNAKTKPREEQYNNASRVVSVLTVLHQDWLNGKEYKCKVSNKALPAPIEKTISKAKGQPREPQVYTLPPSRDELTKNQVSLTCLVKGFYPSDIAVEWESNGQPENNYKTTPPVLDSDGSFFLYSKLTVDKSRWQQGNVFSCSVMHEALHNHYTQKSLSLSPGGGGSGSAHPIPDSSPLLQFGGQVRQRYLYTDDACQTEAHLEIREDGTVGGAADQSPESLLQLKALKPGVIQILGVKTSRFLCQRPDGALYGSLHFDPEACSFRELLLEDGYNVYQSEAHGLPLHLPGCKSPHRDPAPRGPARFLPLPGLPPAPPEPPGILAPQPPDVGSSDPLSMVYPSQGRSPSYAS

SEQ ID NO: 3592 - protein, 471 aa, Artificial Sequence
  Fusion Protein
HGEGTFTSDKSKQLEKELVRLFYEWLINGGHSKIKPPPKGGGGGGGSGGGGSGGGGSADKTHTCPPCPAPELLGGPSVFLFPPKPKDTLMISRTPEVTCVVVDVSHEDPEVKFNWYVDGVEVHNAKTKPREEQYNNASRVVSVLTVLHQDWLNGKEYKCKVSNKALPAPIEKTISKAKGQPREPQVYTLPPSRDELTKNQVSLTCLVKGFYPSDIAVEWESNGQPENNYKTTPPVLDSDGSFFLYSKLTVDKSRWQQGNVFSCSVMHEALHNHYTQKSLSLSPGGGGSGSAHPIPDSSPLLQFGGQVRQRYLYTDDACQTEAHLEIREDGTVGGAADQSPESLLQLKALKPGVIQILGVKTSRFLCQRPDGALYGSLHFDPEACSFRELLLEDGYNVYQSEAHGLPLHLCGNKSPHRDPAPRGPARFLPLPGLPPAPPEPPGILAPQPPDVGSSDPLSMVGSQGRSPSYAS

SEQ ID NO: 3593 - protein, 472 aa, Artificial Sequence
  Fusion Protein
HGEGTFTSDKSKQLEKELVRLFYEWLINGGHSKIKPPPKGGGGGGGSGGGGSGGGGSADKTHTCPPCPAPELLGGPSVFLFPPKPKDTLMISRTPEVTCVVVDVSHEDPEVKFNWYVDGVEVHNAKTKPREEQYNNASRVVSVLTVLHQDWLNGKEYKCKVSNKALPAPIEKTISKAKGQPREPQVYTLPPSRDELTKNQVSLTCLVKGFYPSDIAVEWESNGQPENNYKTTPPVLDSDGSFFLYSKLTVDKSRWQQGNVFSCSVMHEALHNHYTQKSLSLSPGGGGSGSAHPIPDSSPLLQFGGQVRQRYLYTDDACQTEAHLEIREDGTVGGAADQSPESLLQLKALKPGVIQILGVKTSRFLCQRPDGALYGSLHFDPEACSFRELLLEDGYNVYQSEAHGLPLHLCGNKSPHRDPAPRGPARFLPLPGLPPAPPEPPGILAPQPPDVGSSDPLSMVYPSQGRSPSYAS

SEQ ID NO: 3594 - protein, 473 aa, Artificial Sequence
  Fusion Protein
HGEGTFTSDKSKQLEKELVRLFYEWLINGGHSKIKPPPKGGGGGGGSGGGGSGGGGSAESKYGPPCPPCPAPEFEGGPSVFLFPPKPKDTLMISRTPEVTCVVVDVSQEDPEVQFNWYVDGVEVHNAKTKPREEQFNSTYRVVSVLTVLHQDWLNGKEYKCKVSNKGLPSSIEKTISKAKGQPREPQVYTLPPSQEEMTKNQVSLTCLVKGFYPSDIAVEWESNGQPENNYKTTPPVLDSDGSFFLYSRLTVDKSRWQEGNVFSCSVMHEALHNHYTQKSLSLSLGGGGSGSAHPIPDSSPLLQFGGQVRQRYLYTDDACQTEAHLEIREDGTVGGAADQSPESLLQLKALKPGVIQILGVKTSRFLCQRPDGALYGSLHFDPEACSFRELLLEDGYNVYQSEAHGLPLHLPGCKSPHRDPAPRGPARFLPLPGLPPAPPEPPGILAPQPPDVGSSDPLSMVGSQGRSPSYAS

SEQ ID NO: 3595 - protein, 474 aa, Artificial Sequence
  Fusion Protein
HGEGTFTSDKSKQLEKELVRLFYEWLINGGHSKIKPPPKGGGGGGGSGGGGSGGGGSAESKYGPPCPPCPAPEFEGGPSVFLFPPKPKDTLMISRTPEVTCVVVDVSQEDPEVQFNWYVDGVEVHNAKTKPREEQFNSTYRVVSVLTVLHQDWLNGKEYKCKVSNKGLPSSIEKTISKAKGQPREPQVYTLPPSQEEMTKNQVSLTCLVKGFYPSDIAVEWESNGQPENNYKTTPPVLDSDGSFFLYSRLTVDKSRWQEGNVFSCSVMHEALHNHYTQKSLSLSLGGGGSGSAHPIPDSSPLLQFGGQVRQRYLYTDDACQTEAHLEIREDGTVGGAADQSPESLLQLKALKPGVIQILGVKTSRFLCQRPDGALYGSLHFDPEACSFRELLLEDGYNVYQSEAHGLPLHLPGCKSPHRDPAPRGPARFLPLPGLPPAPPEPPGILAPQPPDVGSSDPLSMVYPSQGRSPSYAS

SEQ ID NO: 3596 - protein, 473 aa, Artificial Sequence
  Fusion Protein
HGEGTFTSDKSKQLEKELVRLFYEWLINGGHSKIKPPPKGGGGGGGSGGGGSGGGGSAESKYGPPCPPCPAPEFEGGPSVFLFPPKPKDTLMISRTPEVTCVVVDVSQEDPEVQFNWYVDGVEVHNAKTKPREEQFNSTYRVVSVLTVLHQDWLNGKEYKCKVSNKGLPSSIEKTISKAKGQPREPQVYTLPPSQEEMTKNQVSLTCLVKGFYPSDIAVEWESNGQPENNYKTTPPVLDSDGSFFLYSRLTVDKSRWQEGNVFSCSVMHEALHNHYTQKSLSLSLGGGGSGSAHPIPDSSPLLQFGGQVRQRYLYTDDACQTEAHLEIREDGTVGGAADQSPESLLQLKALKPGVIQILGVKTSRFLCQRPDGALYGSLHFDPEACSFRELLLEDGYNVYQSEAHGLPLHLCGNKSPHRDPAPRGPARFLPLPGLPPAPPEPPGILAPQPPDVGSSDPLSMVGSQGRSPSYAS

SEQ ID NO: 3597 - protein, 474 aa, Artificial Sequence
  Fusion Protein
HGEGTFTSDKSKQLEKELVRLFYEWLINGGHSKIKPPPKGGGGGGGSGGGGSGGGGSAESKYGPPCPPCPAPEFEGGPSVFLFPPKPKDTLMISRTPEVTCVVVDVSQEDPEVQFNWYVDGVEVHNAKTKPREEQFNSTYRVVSVLTVLHQDWLNGKEYKCKVSNKGLPSSIEKTISKAKGQPREPQVYTLPPSQEEMTKNQVSLTCLVKGFYPSDIAVEWESNGQPENNYKTTPPVLDSDGSFFLYSRLTVDKSRWQEGNVFSCSVMHEALHNHYTQKSLSLSLGGGGSGSAHPIPDSSPLLQFGGQVRQRYLYTDDACQTEAHLEIREDGTVGGAADQSPESLLQLKALKPGVIQILGVKTSRFLCQRPDGALYGSLHFDPEACSFRELLLEDGYNVYQSEAHGLPLHLCGNKSPHRDPAPRGPARFLPLPGLPPAPPEPPGILAPQPPDVGSSDPLSMVYPSQGRSPSYAS

SEQ ID NO: 3598 - protein, 471 aa, Artificial Sequence
  Fusion Protein
HGEGTFTSDKSKQLEKELVRLFYEWLINGGPSSIKPPPKGGGGGGGSGGGGSGGGGSADKTHTCPPCPAPEAAGGPSVFLFPPKPKDTLMISRTPEVTCVVVDVSHEDPEVKFNWYVDGVEVHNAKTKPREEQYNSTYRVVSVLTVLHQDWLNGKEYKCKVSNKALPAPIEKTISKAKGQPREPQVYTLPPSRDELTKNQVSLTCLVKGFYPSDIAVEWESNGQPENNYKTTPPVLDSDGSFFLYSKLTVDKSRWQQGNVFSCSVMHEALHNHYTQKSLSLSPGGGGSGSAHPIPDSSPLLQFGGQVRQRYLYTDDACQTEAHLEIREDGTVGGAADQSPESLLQLKALKPGVIQILGVKTSRFLCQRPDGALYGSLHFDPEACSFRELLLEDGYNVYQSEAHGLPLHLPGCKSPHRDPAPRGPARFLPLPGLPPAPPEPPGILAPQPPDVGSSDPLSMVGSQGRSPSYAS

SEQ ID NO: 3599 - protein, 472 aa, Artificial Sequence
  Fusion Protein
HGEGTFTSDKSKQLEKELVRLFYEWLINGGPSSIKPPPKGGGGGGGSGGGGSGGGGSADKTHTCPPCPAPEAAGGPSVFLFPPKPKDTLMISRTPEVTCVVVDVSHEDPEVKFNWYVDGVEVHNAKTKPREEQYNSTYRVVSVLTVLHQDWLNGKEYKCKVSNKALPAPIEKTISKAKGQPREPQVYTLPPSRDELTKNQVSLTCLVKGFYPSDIAVEWESNGQPENNYKTTPPVLDSDGSFFLYSKLTVDKSRWQQGNVFSCSVMHEALHNHYTQKSLSLSPGGGGSGSAHPIPDSSPLLQFGGQVRQRYLYTDDACQTEAHLEIREDGTVGGAADQSPESLLQLKALKPGVIQILGVKTSRFLCQRPDGALYGSLHFDPEACSFRELLLEDGYNVYQSEAHGLPLHLPGCKSPHRDPAPRGPARFLPLPGLPPAPPEPPGILAPQPPDVGSSDPLSMVYPSQGRSPSYAS

SEQ ID NO: 3600 - protein, 471 aa, Artificial Sequence
  Fusion Protein
HGEGTFTSDKSKQLEKELVRLFYEWLINGGPSSIKPPPKGGGGGGGSGGGGSGGGGSADKTHTCPPCPAPEAAGGPSVFLFPPKPKDTLMISRTPEVTCVVVDVSHEDPEVKFNWYVDGVEVHNAKTKPREEQYNSTYRVVSVLTVLHQDWLNGKEYKCKVSNKALPAPIEKTISKAKGQPREPQVYTLPPSRDELTKNQVSLTCLVKGFYPSDIAVEWESNGQPENNYKTTPPVLDSDGSFFLYSKLTVDKSRWQQGNVFSCSVMHEALHNHYTQKSLSLSPGGGGSGSAHPIPDSSPLLQFGGQVRQRYLYTDDACQTEAHLEIREDGTVGGAADQSPESLLQLKALKPGVIQILGVKTSRFLCQRPDGALYGSLHFDPEACSFRELLLEDGYNVYQSEAHGLPLHLCGNKSPHRDPAPRGPARFLPLPGLPPAPPEPPGILAPQPPDVGSSDPLSMVGSQGRSPSYAS

SEQ ID NO: 3601 - protein, 472 aa, Artificial Sequence
  Fusion Protein
HGEGTFTSDKSKQLEKELVRLFYEWLINGGPSSIKPPPKGGGGGGGSGGGGSGGGGSADKTHTCPPCPAPEAAGGPSVFLFPPKPKDTLMISRTPEVTCVVVDVSHEDPEVKFNWYVDGVEVHNAKTKPREEQYNSTYRVVSVLTVLHQDWLNGKEYKCKVSNKALPAPIEKTISKAKGQPREPQVYTLPPSRDELTKNQVSLTCLVKGFYPSDIAVEWESNGQPENNYKTTPPVLDSDGSFFLYSKLTVDKSRWQQGNVFSCSVMHEALHNHYTQKSLSLSPGGGGSGSAHPIPDSSPLLQFGGQVRQRYLYTDDACQTEAHLEIREDGTVGGAADQSPESLLQLKALKPGVIQILGVKTSRFLCQRPDGALYGSLHFDPEACSFRELLLEDGYNVYQSEAHGLPLHLCGNKSPHRDPAPRGPARFLPLPGLPPAPPEPPGILAPQPPDVGSSDPLSMVYPSQGRSPSYAS

SEQ ID NO: 3602 - protein, 471 aa, Artificial Sequence
  Fusion Protein
HGEGTFTSDKSKQLEKELVRLFYEWLINGGPSSIKPPPKGGGGGGGSGGGGSGGGGSADKTHTCPPCPAPELLGGPSVFLFPPKPKDTLMISRTPEVTCVVVDVSHEDPEVKFNWYVDGVEVHNAKTKPREEQYNNASRVVSVLTVLHQDWLNGKEYKCKVSNKALPAPIEKTISKAKGQPREPQVYTLPPSRDELTKNQVSLTCLVKGFYPSDIAVEWESNGQPENNYKTTPPVLDSDGSFFLYSKLTVDKSRWQQGNVFSCSVMHEALHNHYTQKSLSLSPGGGGSGSAHPIPDSSPLLQFGGQVRQRYLYTDDACQTEAHLEIREDGTVGGAADQSPESLLQLKALKPGVIQILGVKTSRFLCQRPDGALYGSLHFDPEACSFRELLLEDGYNVYQSEAHGLPLHLPGCKSPHRDPAPRGPARFLPLPGLPPAPPEPPGILAPQPPDVGSSDPLSMVGSQGRSPSYAS

SEQ ID NO: 3603 - protein, 472 aa, Artificial Sequence
  Fusion Protein
HGEGTFTSDKSKQLEKELVRLFYEWLINGGPSSIKPPPKGGGGGGGSGGGGSGGGGSADKTHTCPPCPAPELLGGPSVFLFPPKPKDTLMISRTPEVTCVVVDVSHEDPEVKFNWYVDGVEVHNAKTKPREEQYNNASRVVSVLTVLHQDWLNGKEYKCKVSNKALPAPIEKTISKAKGQPREPQVYTLPPSRDELTKNQVSLTCLVKGFYPSDIAVEWESNGQPENNYKTTPPVLDSDGSFFLYSKLTVDKSRWQQGNVFSCSVMHEALHNHYTQKSLSLSPGGGGSGSAHPIPDSSPLLQFGGQVRQRYLYTDDACQTEAHLEIREDGTVGGAADQSPESLLQLKALKPGVIQILGVKTSRFLCQRPDGALYGSLHFDPEACSFRELLLEDGYNVYQSEAHGLPLHLPGCKSPHRDPAPRGPARFLPLPGLPPAPPEPPGILAPQPPDVGSSDPLSMVYPSQGRSPSYAS

SEQ ID NO: 3604 - protein, 471 aa, Artificial Sequence
  Fusion Protein
HGEGTFTSDKSKQLEKELVRLFYEWLINGGPSSIKPPPKGGGGGGGSGGGGSGGGGSADKTHTCPPCPAPELLGGPSVFLFPPKPKDTLMISRTPEVTCVVVDVSHEDPEVKFNWYVDGVEVHNAKTKPREEQYNNASRVVSVLTVLHQDWLNGKEYKCKVSNKALPAPIEKTISKAKGQPREPQVYTLPPSRDELTKNQVSLTCLVKGFYPSDIAVEWESNGQPENNYKTTPPVLDSDGSFFLYSKLTVDKSRWQQGNVFSCSVMHEALHNHYTQKSLSLSPGGGGSGSAHPIPDSSPLLQFGGQVRQRYLYTDDACQTEAHLEIREDGTVGGAADQSPESLLQLKALKPGVIQILGVKTSRFLCQRPDGALYGSLHFDPEACSFRELLLEDGYNVYQSEAHGLPLHLCGNKSPHRDPAPRGPARFLPLPGLPPAPPEPPGILAPQPPDVGSSDPLSMVGSQGRSPSYAS

SEQ ID NO: 3605 - protein, 472 aa, Artificial Sequence
  Fusion Protein
HGEGTFTSDKSKQLEKELVRLFYEWLINGGPSSIKPPPKGGGGGGGSGGGGSGGGGSADKTHTCPPCPAPELLGGPSVFLFPPKPKDTLMISRTPEVTCVVVDVSHEDPEVKFNWYVDGVEVHNAKTKPREEQYNNASRVVSVLTVLHQDWLNGKEYKCKVSNKALPAPIEKTISKAKGQPREPQVYTLPPSRDELTKNQVSLTCLVKGFYPSDIAVEWESNGQPENNYKTTPPVLDSDGSFFLYSKLTVDKSRWQQGNVFSCSVMHEALHNHYTQKSLSLSPGGGGSGSAHPIPDSSPLLQFGGQVRQRYLYTDDACQTEAHLEIREDGTVGGAADQSPESLLQLKALKPGVIQILGVKTSRFLCQRPDGALYGSLHFDPEACSFRELLLEDGYNVYQSEAHGLPLHLCGNKSPHRDPAPRGPARFLPLPGLPPAPPEPPGILAPQPPDVGSSDPLSMVYPSQGRSPSYAS

SEQ ID NO: 3606 - protein, 473 aa, Artificial Sequence
  Fusion Protein
HGEGTFTSDKSKQLEKELVRLFYEWLINGGPSSIKPPPKGGGGGGGSGGGGSGGGGSAESKYGPPCPPCPAPEFEGGPSVFLFPPKPKDTLMISRTPEVTCVVVDVSQEDPEVQFNWYVDGVEVHNAKTKPREEQFNSTYRVVSVLTVLHQDWLNGKEYKCKVSNKGLPSSIEKTISKAKGQPREPQVYTLPPSQEEMTKNQVSLTCLVKGFYPSDIAVEWESNGQPENNYKTTPPVLDSDGSFFLYSRLTVDKSRWQEGNVFSCSVMHEALHNHYTQKSLSLSLGGGGSGSAHPIPDSSPLLQFGGQVRQRYLYTDDACQTEAHLEIREDGTVGGAADQSPESLLQLKALKPGVIQILGVKTSRFLCQRPDGALYGSLHFDPEACSFRELLLEDGYNVYQSEAHGLPLHLPGCKSPHRDPAPRGPARFLPLPGLPPAPPEPPGILAPQPPDVGSSDPLSMVGSQGRSPSYAS

SEQ ID NO: 3607 - protein, 474 aa, Artificial Sequence
  Fusion Protein
HGEGTFTSDKSKQLEKELVRLFYEWLINGGPSSIKPPPKGGGGGGGSGGGGSGGGGSAESKYGPPCPPCPAPEFEGGPSVFLFPPKPKDTLMISRTPEVTCVVVDVSQEDPEVQFNWYVDGVEVHNAKTKPREEQFNSTYRVVSVLTVLHQDWLNGKEYKCKVSNKGLPSSIEKTISKAKGQPREPQVYTLPPSQEEMTKNQVSLTCLVKGFYPSDIAVEWESNGQPENNYKTTPPVLDSDGSFFLYSRLTVDKSRWQEGNVFSCSVMHEALHNHYTQKSLSLSLGGGGSGSAHPIPDSSPLLQFGGQVRQRYLYTDDACQTEAHLEIREDGTVGGAADQSPESLLQLKALKPGVIQILGVKTSRFLCQRPDGALYGSLHFDPEACSFRELLLEDGYNVYQSEAHGLPLHLPGCKSPHRDPAPRGPARFLPLPGLPPAPPEPPGILAPQPPDVGSSDPLSMVYPSQGRSPSYAS

SEQ ID NO: 3608 - protein, 473 aa, Artificial Sequence
  Fusion Protein
HGEGTFTSDKSKQLEKELVRLFYEWLINGGPSSIKPPPKGGGGGGGSGGGGSGGGGSAESKYGPPCPPCPAPEFEGGPSVFLFPPKPKDTLMISRTPEVTCVVVDVSQEDPEVQFNWYVDGVEVHNAKTKPREEQFNSTYRVVSVLTVLHQDWLNGKEYKCKVSNKGLPSSIEKTISKAKGQPREPQVYTLPPSQEEMTKNQVSLTCLVKGFYPSDIAVEWESNGQPENNYKTTPPVLDSDGSFFLYSRLTVDKSRWQEGNVFSCSVMHEALHNHYTQKSLSLSLGGGGSGSAHPIPDSSPLLQFGGQVRQRYLYTDDACQTEAHLEIREDGTVGGAADQSPESLLQLKALKPGVIQILGVKTSRFLCQRPDGALYGSLHFDPEACSFRELLLEDGYNVYQSEAHGLPLHLCGNKSPHRDPAPRGPARFLPLPGLPPAPPEPPGILAPQPPDVGSSDPLSMVGSQGRSPSYAS

SEQ ID NO: 3609 - protein, 474 aa, Artificial Sequence
  Fusion Protein
HGEGTFTSDKSKQLEKELVRLFYEWLINGGPSSIKPPPKGGGGGGGSGGGGSGGGGSAESKYGPPCPPCPAPEFEGGPSVFLFPPKPKDTLMISRTPEVTCVVVDVSQEDPEVQFNWYVDGVEVHNAKTKPREEQFNSTYRVVSVLTVLHQDWLNGKEYKCKVSNKGLPSSIEKTISKAKGQPREPQVYTLPPSQEEMTKNQVSLTCLVKGFYPSDIAVEWESNGQPENNYKTTPPVLDSDGSFFLYSRLTVDKSRWQEGNVFSCSVMHEALHNHYTQKSLSLSLGGGGSGSAHPIPDSSPLLQFGGQVRQRYLYTDDACQTEAHLEIREDGTVGGAADQSPESLLQLKALKPGVIQILGVKTSRFLCQRPDGALYGSLHFDPEACSFRELLLEDGYNVYQSEAHGLPLHLCGNKSPHRDPAPRGPARFLPLPGLPPAPPEPPGILAPQPPDVGSSDPLSMVYPSQGRSPSYAS

SEQ ID NO: 3610 - protein, 471 aa, Artificial Sequence
  Fusion Protein
HGEGTFTSDKSKQLEKELVRLFYEWLINGGPSKGKPPPKGGGGGGGSGGGGSGGGGSADKTHTCPPCPAPEAAGGPSVFLFPPKPKDTLMISRTPEVTCVVVDVSHEDPEVKFNWYVDGVEVHNAKTKPREEQYNSTYRVVSVLTVLHQDWLNGKEYKCKVSNKALPAPIEKTISKAKGQPREPQVYTLPPSRDELTKNQVSLTCLVKGFYPSDIAVEWESNGQPENNYKTTPPVLDSDGSFFLYSKLTVDKSRWQQGNVFSCSVMHEALHNHYTQKSLSLSPGGGGSGSAHPIPDSSPLLQFGGQVRQRYLYTDDACQTEAHLEIREDGTVGGAADQSPESLLQLKALKPGVIQILGVKTSRFLCQRPDGALYGSLHFDPEACSFRELLLEDGYNVYQSEAHGLPLHLPGCKSPHRDPAPRGPARFLPLPGLPPAPPEPPGILAPQPPDVGSSDPLSMVGSQGRSPSYAS

SEQ ID NO: 3611 - protein, 472 aa, Artificial Sequence
  Fusion Protein
HGEGTFTSDKSKQLEKELVRLFYEWLINGGPSKGKPPPKGGGGGGGSGGGGSGGGGSADKTHTCPPCPAPEAAGGPSVFLFPPKPKDTLMISRTPEVTCVVVDVSHEDPEVKFNWYVDGVEVHNAKTKPREEQYNSTYRVVSVLTVLHQDWLNGKEYKCKVSNKALPAPIEKTISKAKGQPREPQVYTLPPSRDELTKNQVSLTCLVKGFYPSDIAVEWESNGQPENNYKTTPPVLDSDGSFFLYSKLTVDKSRWQQGNVFSCSVMHEALHNHYTQKSLSLSPGGGGSGSAHPIPDSSPLLQFGGQVRQRYLYTDDACQTEAHLEIREDGTVGGAADQSPESLLQLKALKPGVIQILGVKTSRFLCQRPDGALYGSLHFDPEACSFRELLLEDGYNVYQSEAHGLPLHLPGCKSPHRDPAPRGPARFLPLPGLPPAPPEPPGILAPQPPDVGSSDPLSMVYPSQGRSPSYAS

SEQ ID NO: 3612 - protein, 471 aa, Artificial Sequence
  Fusion Protein
HGEGTFTSDKSKQLEKELVRLFYEWLINGGPSKGKPPPKGGGGGGGSGGGGSGGGGSADKTHTCPPCPAPEAAGGPSVFLFPPKPKDTLMISRTPEVTCVVVDVSHEDPEVKFNWYVDGVEVHNAKTKPREEQYNSTYRVVSVLTVLHQDWLNGKEYKCKVSNKALPAPIEKTISKAKGQPREPQVYTLPPSRDELTKNQVSLTCLVKGFYPSDIAVEWESNGQPENNYKTTPPVLDSDGSFFLYSKLTVDKSRWQQGNVFSCSVMHEALHNHYTQKSLSLSPGGGGSGSAHPIPDSSPLLQFGGQVRQRYLYTDDACQTEAHLEIREDGTVGGAADQSPESLLQLKALKPGVIQILGVKTSRFLCQRPDGALYGSLHFDPEACSFRELLLEDGYNVYQSEAHGLPLHLCGNKSPHRDPAPRGPARFLPLPGLPPAPPEPPGILAPQPPDVGSSDPLSMVGSQGRSPSYAS

SEQ ID NO: 3613 - protein, 472 aa, Artificial Sequence
  Fusion Protein
HGEGTFTSDKSKQLEKELVRLFYEWLINGGPSKGKPPPKGGGGGGGSGGGGSGGGGSADKTHTCPPCPAPEAAGGPSVFLFPPKPKDTLMISRTPEVTCVVVDVSHEDPEVKFNWYVDGVEVHNAKTKPREEQYNSTYRVVSVLTVLHQDWLNGKEYKCKVSNKALPAPIEKTISKAKGQPREPQVYTLPPSRDELTKNQVSLTCLVKGFYPSDIAVEWESNGQPENNYKTTPPVLDSDGSFFLYSKLTVDKSRWQQGNVFSCSVMHEALHNHYTQKSLSLSPGGGGSGSAHPIPDSSPLLQFGGQVRQRYLYTDDACQTEAHLEIREDGTVGGAADQSPESLLQLKALKPGVIQILGVKTSRFLCQRPDGALYGSLHFDPEACSFRELLLEDGYNVYQSEAHGLPLHLCGNKSPHRDPAPRGPARFLPLPGLPPAPPEPPGILAPQPPDVGSSDPLSMVYPSQGRSPSYAS

SEQ ID NO: 3614 - protein, 471 aa, Artificial Sequence
  Fusion Protein
HGEGTFTSDKSKQLEKELVRLFYEWLINGGPSKGKPPPKGGGGGGGSGGGGSGGGGSADKTHTCPPCPAPELLGGPSVFLFPPKPKDTLMISRTPEVTCVVVDVSHEDPEVKFNWYVDGVEVHNAKTKPREEQYNNASRVVSVLTVLHQDWLNGKEYKCKVSNKALPAPIEKTISKAKGQPREPQVYTLPPSRDELTKNQVSLTCLVKGFYPSDIAVEWESNGQPENNYKTTPPVLDSDGSFFLYSKLTVDKSRWQQGNVFSCSVMHEALHNHYTQKSLSLSPGGGGSGSAHPIPDSSPLLQFGGQVRQRYLYTDDACQTEAHLEIREDGTVGGAADQSPESLLQLKALKPGVIQILGVKTSRFLCQRPDGALYGSLHFDPEACSFRELLLEDGYNVYQSEAHGLPLHLPGCKSPHRDPAPRGPARFLPLPGLPPAPPEPPGILAPQPPDVGSSDPLSMVGSQGRSPSYAS

SEQ ID NO: 3615 - protein, 472 aa, Artificial Sequence
  Fusion Protein
HGEGTFTSDKSKQLEKELVRLFYEWLINGGPSKGKPPPKGGGGGGGSGGGGSGGGGSADKTHTCPPCPAPELLGGPSVFLFPPKPKDTLMISRTPEVTCVVVDVSHEDPEVKFNWYVDGVEVHNAKTKPREEQYNNASRVVSVLTVLHQDWLNGKEYKCKVSNKALPAPIEKTISKAKGQPREPQVYTLPPSRDELTKNQVSLTCLVKGFYPSDIAVEWESNGQPENNYKTTPPVLDSDGSFFLYSKLTVDKSRWQQGNVFSCSVMHEALHNHYTQKSLSLSPGGGGSGSAHPIPDSSPLLQFGGQVRQRYLYTDDACQTEAHLEIREDGTVGGAADQSPESLLQLKALKPGVIQILGVKTSRFLCQRPDGALYGSLHFDPEACSFRELLLEDGYNVYQSEAHGLPLHLPGCKSPHRDPAPRGPARFLPLPGLPPAPPEPPGILAPQPPDVGSSDPLSMVYPSQGRSPSYAS

SEQ ID NO: 3616 - protein, 471 aa, Artificial Sequence
  Fusion Protein
HGEGTFTSDKSKQLEKELVRLFYEWLINGGPSKGKPPPKGGGGGGGSGGGGSGGGGSADKTHTCPPCPAPELLGGPSVFLFPPKPKDTLMISRTPEVTCVVVDVSHEDPEVKFNWYVDGVEVHNAKTKPREEQYNNASRVVSVLTVLHQDWLNGKEYKCKVSNKALPAPIEKTISKAKGQPREPQVYTLPPSRDELTKNQVSLTCLVKGFYPSDIAVEWESNGQPENNYKTTPPVLDSDGSFFLYSKLTVDKSRWQQGNVFSCSVMHEALHNHYTQKSLSLSPGGGGSGSAHPIPDSSPLLQFGGQVRQRYLYTDDACQTEAHLEIREDGTVGGAADQSPESLLQLKALKPGVIQILGVKTSRFLCQRPDGALYGSLHFDPEACSFRELLLEDGYNVYQSEAHGLPLHLCGNKSPHRDPAPRGPARFLPLPGLPPAPPEPPGILAPQPPDVGSSDPLSMVGSQGRSPSYAS

SEQ ID NO: 3617 - protein, 472 aa, Artificial Sequence
  Fusion Protein
HGEGTFTSDKSKQLEKELVRLFYEWLINGGPSKGKPPPKGGGGGGGSGGGGSGGGGSADKTHTCPPCPAPELLGGPSVFLFPPKPKDTLMISRTPEVTCVVVDVSHEDPEVKFNWYVDGVEVHNAKTKPREEQYNNASRVVSVLTVLHQDWLNGKEYKCKVSNKALPAPIEKTISKAKGQPREPQVYTLPPSRDELTKNQVSLTCLVKGFYPSDIAVEWESNGQPENNYKTTPPVLDSDGSFFLYSKLTVDKSRWQQGNVFSCSVMHEALHNHYTQKSLSLSPGGGGSGSAHPIPDSSPLLQFGGQVRQRYLYTDDACQTEAHLEIREDGTVGGAADQSPESLLQLKALKPGVIQILGVKTSRFLCQRPDGALYGSLHFDPEACSFRELLLEDGYNVYQSEAHGLPLHLCGNKSPHRDPAPRGPARFLPLPGLPPAPPEPPGILAPQPPDVGSSDPLSMVYPSQGRSPSYAS

SEQ ID NO: 3618 - protein, 473 aa, Artificial Sequence
  Fusion Protein
HGEGTFTSDKSKQLEKELVRLFYEWLINGGPSKGKPPPKGGGGGGGSGGGGSGGGGSAESKYGPPCPPCPAPEFEGGPSVFLFPPKPKDTLMISRTPEVTCVVVDVSQEDPEVQFNWYVDGVEVHNAKTKPREEQFNSTYRVVSVLTVLHQDWLNGKEYKCKVSNKGLPSSIEKTISKAKGQPREPQVYTLPPSQEEMTKNQVSLTCLVKGFYPSDIAVEWESNGQPENNYKTTPPVLDSDGSFFLYSRLTVDKSRWQEGNVFSCSVMHEALHNHYTQKSLSLSLGGGGSGSAHPIPDSSPLLQFGGQVRQRYLYTDDACQTEAHLEIREDGTVGGAADQSPESLLQLKALKPGVIQILGVKTSRFLCQRPDGALYGSLHFDPEACSFRELLLEDGYNVYQSEAHGLPLHLPGCKSPHRDPAPRGPARFLPLPGLPPAPPEPPGILAPQPPDVGSSDPLSMVGSQGRSPSYAS

SEQ ID NO: 3619 - protein, 474 aa, Artificial Sequence
  Fusion Protein
HGEGTFTSDKSKQLEKELVRLFYEWLINGGPSKGKPPPKGGGGGGGSGGGGSGGGGSAESKYGPPCPPCPAPEFEGGPSVFLFPPKPKDTLMISRTPEVTCVVVDVSQEDPEVQFNWYVDGVEVHNAKTKPREEQFNSTYRVVSVLTVLHQDWLNGKEYKCKVSNKGLPSSIEKTISKAKGQPREPQVYTLPPSQEEMTKNQVSLTCLVKGFYPSDIAVEWESNGQPENNYKTTPPVLDSDGSFFLYSRLTVDKSRWQEGNVFSCSVMHEALHNHYTQKSLSLSLGGGGSGSAHPIPDSSPLLQFGGQVRQRYLYTDDACQTEAHLEIREDGTVGGAADQSPESLLQLKALKPGVIQILGVKTSRFLCQRPDGALYGSLHFDPEACSFRELLLEDGYNVYQSEAHGLPLHLPGCKSPHRDPAPRGPARFLPLPGLPPAPPEPPGILAPQPPDVGSSDPLSMVYPSQGRSPSYAS

SEQ ID NO: 3620 - protein, 473 aa, Artificial Sequence
  Fusion Protein
HGEGTFTSDKSKQLEKELVRLFYEWLINGGPSKGKPPPKGGGGGGGSGGGGSGGGGSAESKYGPPCPPCPAPEFEGGPSVFLFPPKPKDTLMISRTPEVTCVVVDVSQEDPEVQFNWYVDGVEVHNAKTKPREEQFNSTYRVVSVLTVLHQDWLNGKEYKCKVSNKGLPSSIEKTISKAKGQPREPQVYTLPPSQEEMTKNQVSLTCLVKGFYPSDIAVEWESNGQPENNYKTTPPVLDSDGSFFLYSRLTVDKSRWQEGNVFSCSVMHEALHNHYTQKSLSLSLGGGGSGSAHPIPDSSPLLQFGGQVRQRYLYTDDACQTEAHLEIREDGTVGGAADQSPESLLQLKALKPGVIQILGVKTSRFLCQRPDGALYGSLHFDPEACSFRELLLEDGYNVYQSEAHGLPLHLCGNKSPHRDPAPRGPARFLPLPGLPPAPPEPPGILAPQPPDVGSSDPLSMVGSQGRSPSYAS

SEQ ID NO: 3621 - protein, 474 aa, Artificial Sequence
  Fusion Protein
HGEGTFTSDKSKQLEKELVRLFYEWLINGGPSKGKPPPKGGGGGGGSGGGGSGGGGSAESKYGPPCPPCPAPEFEGGPSVFLFPPKPKDTLMISRTPEVTCVVVDVSQEDPEVQFNWYVDGVEVHNAKTKPREEQFNSTYRVVSVLTVLHQDWLNGKEYKCKVSNKGLPSSIEKTISKAKGQPREPQVYTLPPSQEEMTKNQVSLTCLVKGFYPSDIAVEWESNGQPENNYKTTPPVLDSDGSFFLYSRLTVDKSRWQEGNVFSCSVMHEALHNHYTQKSLSLSLGGGGSGSAHPIPDSSPLLQFGGQVRQRYLYTDDACQTEAHLEIREDGTVGGAADQSPESLLQLKALKPGVIQILGVKTSRFLCQRPDGALYGSLHFDPEACSFRELLLEDGYNVYQSEAHGLPLHLCGNKSPHRDPAPRGPARFLPLPGLPPAPPEPPGILAPQPPDVGSSDPLSMVYPSQGRSPSYAS

SEQ ID NO: 3622 - protein, 471 aa, Artificial Sequence
  Fusion Protein
HGEGTFTSDKSKQLEKELVRLFYEWLLAGGHSKIKPPPKGGGGGGGSGGGGSGGGGSADKTHTCPPCPAPEAAGGPSVFLFPPKPKDTLMISRTPEVTCVVVDVSHEDPEVKFNWYVDGVEVHNAKTKPREEQYNSTYRVVSVLTVLHQDWLNGKEYKCKVSNKALPAPIEKTISKAKGQPREPQVYTLPPSRDELTKNQVSLTCLVKGFYPSDIAVEWESNGQPENNYKTTPPVLDSDGSFFLYSKLTVDKSRWQQGNVFSCSVMHEALHNHYTQKSLSLSPGGGGSGSAHPIPDSSPLLQFGGQVRQRYLYTDDACQTEAHLEIREDGTVGGAADQSPESLLQLKALKPGVIQILGVKTSRFLCQRPDGALYGSLHFDPEACSFRELLLEDGYNVYQSEAHGLPLHLPGCKSPHRDPAPRGPARFLPLPGLPPAPPEPPGILAPQPPDVGSSDPLSMVGSQGRSPSYAS

SEQ ID NO: 3623 - protein, 472 aa, Artificial Sequence
  Fusion Protein
HGEGTFTSDKSKQLEKELVRLFYEWLLAGGHSKIKPPPKGGGGGGGSGGGGSGGGGSADKTHTCPPCPAPEAAGGPSVFLFPPKPKDTLMISRTPEVTCVVVDVSHEDPEVKFNWYVDGVEVHNAKTKPREEQYNSTYRVVSVLTVLHQDWLNGKEYKCKVSNKALPAPIEKTISKAKGQPREPQVYTLPPSRDELTKNQVSLTCLVKGFYPSDIAVEWESNGQPENNYKTTPPVLDSDGSFFLYSKLTVDKSRWQQGNVFSCSVMHEALHNHYTQKSLSLSPGGGGSGSAHPIPDSSPLLQFGGQVRQRYLYTDDACQTEAHLEIREDGTVGGAADQSPESLLQLKALKPGVIQILGVKTSRFLCQRPDGALYGSLHFDPEACSFRELLLEDGYNVYQSEAHGLPLHLPGCKSPHRDPAPRGPARFLPLPGLPPAPPEPPGILAPQPPDVGSSDPLSMVYPSQGRSPSYAS

SEQ ID NO: 3624 - protein, 471 aa, Artificial Sequence
  Fusion Protein
HGEGTFTSDKSKQLEKELVRLFYEWLLAGGHSKIKPPPKGGGGGGGSGGGGSGGGGSADKTHTCPPCPAPEAAGGPSVFLFPPKPKDTLMISRTPEVTCVVVDVSHEDPEVKFNWYVDGVEVHNAKTKPREEQYNSTYRVVSVLTVLHQDWLNGKEYKCKVSNKALPAPIEKTISKAKGQPREPQVYTLPPSRDELTKNQVSLTCLVKGFYPSDIAVEWESNGQPENNYKTTPPVLDSDGSFFLYSKLTVDKSRWQQGNVFSCSVMHEALHNHYTQKSLSLSPGGGGSGSAHPIPDSSPLLQFGGQVRQRYLYTDDACQTEAHLEIREDGTVGGAADQSPESLLQLKALKPGVIQILGVKTSRFLCQRPDGALYGSLHFDPEACSFRELLLEDGYNVYQSEAHGLPLHLCGNKSPHRDPAPRGPARFLPLPGLPPAPPEPPGILAPQPPDVGSSDPLSMVGSQGRSPSYAS

SEQ ID NO: 3625 - protein, 472 aa, Artificial Sequence
  Fusion Protein
HGEGTFTSDKSKQLEKELVRLFYEWLLAGGHSKIKPPPKGGGGGGGSGGGGSGGGGSADKTHTCPPCPAPEAAGGPSVFLFPPKPKDTLMISRTPEVTCVVVDVSHEDPEVKFNWYVDGVEVHNAKTKPREEQYNSTYRVVSVLTVLHQDWLNGKEYKCKVSNKALPAPIEKTISKAKGQPREPQVYTLPPSRDELTKNQVSLTCLVKGFYPSDIAVEWESNGQPENNYKTTPPVLDSDGSFFLYSKLTVDKSRWQQGNVFSCSVMHEALHNHYTQKSLSLSPGGGGSGSAHPIPDSSPLLQFGGQVRQRYLYTDDACQTEAHLEIREDGTVGGAADQSPESLLQLKALKPGVIQILGVKTSRFLCQRPDGALYGSLHFDPEACSFRELLLEDGYNVYQSEAHGLPLHLCGNKSPHRDPAPRGPARFLPLPGLPPAPPEPPGILAPQPPDVGSSDPLSMVYPSQGRSPSYAS

SEQ ID NO: 3626 - protein, 471 aa, Artificial Sequence
  Fusion Protein
HGEGTFTSDKSKQLEKELVRLFYEWLLAGGHSKIKPPPKGGGGGGGSGGGGSGGGGSADKTHTCPPCPAPELLGGPSVFLFPPKPKDTLMISRTPEVTCVVVDVSHEDPEVKFNWYVDGVEVHNAKTKPREEQYNNASRVVSVLTVLHQDWLNGKEYKCKVSNKALPAPIEKTISKAKGQPREPQVYTLPPSRDELTKNQVSLTCLVKGFYPSDIAVEWESNGQPENNYKTTPPVLDSDGSFFLYSKLTVDKSRWQQGNVFSCSVMHEALHNHYTQKSLSLSPGGGGSGSAHPIPDSSPLLQFGGQVRQRYLYTDDACQTEAHLEIREDGTVGGAADQSPESLLQLKALKPGVIQILGVKTSRFLCQRPDGALYGSLHFDPEACSFRELLLEDGYNVYQSEAHGLPLHLPGCKSPHRDPAPRGPARFLPLPGLPPAPPEPPGILAPQPPDVGSSDPLSMVGSQGRSPSYAS

SEQ ID NO: 3627 - protein, 472 aa, Artificial Sequence
  Fusion Protein
HGEGTFTSDKSKQLEKELVRLFYEWLLAGGHSKIKPPPKGGGGGGGSGGGGSGGGGSADKTHTCPPCPAPELLGGPSVFLFPPKPKDTLMISRTPEVTCVVVDVSHEDPEVKFNWYVDGVEVHNAKTKPREEQYNNASRVVSVLTVLHQDWLNGKEYKCKVSNKALPAPIEKTISKAKGQPREPQVYTLPPSRDELTKNQVSLTCLVKGFYPSDIAVEWESNGQPENNYKTTPPVLDSDGSFFLYSKLTVDKSRWQQGNVFSCSVMHEALHNHYTQKSLSLSPGGGGSGSAHPIPDSSPLLQFGGQVRQRYLYTDDACQTEAHLEIREDGTVGGAADQSPESLLQLKALKPGVIQILGVKTSRFLCQRPDGALYGSLHFDPEACSFRELLLEDGYNVYQSEAHGLPLHLPGCKSPHRDPAPRGPARFLPLPGLPPAPPEPPGILAPQPPDVGSSDPLSMVYPSQGRSPSYAS

SEQ ID NO: 3628 - protein, 471 aa, Artificial Sequence
  Fusion Protein
HGEGTFTSDKSKQLEKELVRLFYEWLLAGGHSKIKPPPKGGGGGGGSGGGGSGGGGSADKTHTCPPCPAPELLGGPSVFLFPPKPKDTLMISRTPEVTCVVVDVSHEDPEVKFNWYVDGVEVHNAKTKPREEQYNNASRVVSVLTVLHQDWLNGKEYKCKVSNKALPAPIEKTISKAKGQPREPQVYTLPPSRDELTKNQVSLTCLVKGFYPSDIAVEWESNGQPENNYKTTPPVLDSDGSFFLYSKLTVDKSRWQQGNVFSCSVMHEALHNHYTQKSLSLSPGGGGSGSAHPIPDSSPLLQFGGQVRQRYLYTDDACQTEAHLEIREDGTVGGAADQSPESLLQLKALKPGVIQILGVKTSRFLCQRPDGALYGSLHFDPEACSFRELLLEDGYNVYQSEAHGLPLHLCGNKSPHRDPAPRGPARFLPLPGLPPAPPEPPGILAPQPPDVGSSDPLSMVGSQGRSPSYAS

SEQ ID NO: 3629 - protein, 472 aa, Artificial Sequence
  Fusion Protein
HGEGTFTSDKSKQLEKELVRLFYEWLLAGGHSKIKPPPKGGGGGGGSGGGGSGGGGSADKTHTCPPCPAPELLGGPSVFLFPPKPKDTLMISRTPEVTCVVVDVSHEDPEVKFNWYVDGVEVHNAKTKPREEQYNNASRVVSVLTVLHQDWLNGKEYKCKVSNKALPAPIEKTISKAKGQPREPQVYTLPPSRDELTKNQVSLTCLVKGFYPSDIAVEWESNGQPENNYKTTPPVLDSDGSFFLYSKLTVDKSRWQQGNVFSCSVMHEALHNHYTQKSLSLSPGGGGSGSAHPIPDSSPLLQFGGQVRQRYLYTDDACQTEAHLEIREDGTVGGAADQSPESLLQLKALKPGVIQILGVKTSRFLCQRPDGALYGSLHFDPEACSFRELLLEDGYNVYQSEAHGLPLHLCGNKSPHRDPAPRGPARFLPLPGLPPAPPEPPGILAPQPPDVGSSDPLSMVYPSQGRSPSYAS

SEQ ID NO: 3630 - protein, 473 aa, Artificial Sequence
  Fusion Protein
HGEGTFTSDKSKQLEKELVRLFYEWLLAGGHSKIKPPPKGGGGGGGSGGGGSGGGGSAESKYGPPCPPCPAPEFEGGPSVFLFPPKPKDTLMISRTPEVTCVVVDVSQEDPEVQFNWYVDGVEVHNAKTKPREEQFNSTYRVVSVLTVLHQDWLNGKEYKCKVSNKGLPSSIEKTISKAKGQPREPQVYTLPPSQEEMTKNQVSLTCLVKGFYPSDIAVEWESNGQPENNYKTTPPVLDSDGSFFLYSRLTVDKSRWQEGNVFSCSVMHEALHNHYTQKSLSLSLGGGGSGSAHPIPDSSPLLQFGGQVRQRYLYTDDACQTEAHLEIREDGTVGGAADQSPESLLQLKALKPGVIQILGVKTSRFLCQRPDGALYGSLHFDPEACSFRELLLEDGYNVYQSEAHGLPLHLPGCKSPHRDPAPRGPARFLPLPGLPPAPPEPPGILAPQPPDVGSSDPLSMVGSQGRSPSYAS

SEQ ID NO: 3631 - protein, 474 aa, Artificial Sequence
  Fusion Protein
HGEGTFTSDKSKQLEKELVRLFYEWLLAGGHSKIKPPPKGGGGGGGSGGGGSGGGGSAESKYGPPCPPCPAPEFEGGPSVFLFPPKPKDTLMISRTPEVTCVVVDVSQEDPEVQFNWYVDGVEVHNAKTKPREEQFNSTYRVVSVLTVLHQDWLNGKEYKCKVSNKGLPSSIEKTISKAKGQPREPQVYTLPPSQEEMTKNQVSLTCLVKGFYPSDIAVEWESNGQPENNYKTTPPVLDSDGSFFLYSRLTVDKSRWQEGNVFSCSVMHEALHNHYTQKSLSLSLGGGGSGSAHPIPDSSPLLQFGGQVRQRYLYTDDACQTEAHLEIREDGTVGGAADQSPESLLQLKALKPGVIQILGVKTSRFLCQRPDGALYGSLHFDPEACSFRELLLEDGYNVYQSEAHGLPLHLPGCKSPHRDPAPRGPARFLPLPGLPPAPPEPPGILAPQPPDVGSSDPLSMVYPSQGRSPSYAS

SEQ ID NO: 3632 - protein, 473 aa, Artificial Sequence
  Fusion Protein
HGEGTFTSDKSKQLEKELVRLFYEWLLAGGHSKIKPPPKGGGGGGGSGGGGSGGGGSAESKYGPPCPPCPAPEFEGGPSVFLFPPKPKDTLMISRTPEVTCVVVDVSQEDPEVQFNWYVDGVEVHNAKTKPREEQFNSTYRVVSVLTVLHQDWLNGKEYKCKVSNKGLPSSIEKTISKAKGQPREPQVYTLPPSQEEMTKNQVSLTCLVKGFYPSDIAVEWESNGQPENNYKTTPPVLDSDGSFFLYSRLTVDKSRWQEGNVFSCSVMHEALHNHYTQKSLSLSLGGGGSGSAHPIPDSSPLLQFGGQVRQRYLYTDDACQTEAHLEIREDGTVGGAADQSPESLLQLKALKPGVIQILGVKTSRFLCQRPDGALYGSLHFDPEACSFRELLLEDGYNVYQSEAHGLPLHLCGNKSPHRDPAPRGPARFLPLPGLPPAPPEPPGILAPQPPDVGSSDPLSMVGSQGRSPSYAS

SEQ ID NO: 3633 - protein, 474 aa, Artificial Sequence
  Fusion Protein
HGEGTFTSDKSKQLEKELVRLFYEWLLAGGHSKIKPPPKGGGGGGGSGGGGSGGGGSAESKYGPPCPPCPAPEFEGGPSVFLFPPKPKDTLMISRTPEVTCVVVDVSQEDPEVQFNWYVDGVEVHNAKTKPREEQFNSTYRVVSVLTVLHQDWLNGKEYKCKVSNKGLPSSIEKTISKAKGQPREPQVYTLPPSQEEMTKNQVSLTCLVKGFYPSDIAVEWESNGQPENNYKTTPPVLDSDGSFFLYSRLTVDKSRWQEGNVFSCSVMHEALHNHYTQKSLSLSLGGGGSGSAHPIPDSSPLLQFGGQVRQRYLYTDDACQTEAHLEIREDGTVGGAADQSPESLLQLKALKPGVIQILGVKTSRFLCQRPDGALYGSLHFDPEACSFRELLLEDGYNVYQSEAHGLPLHLCGNKSPHRDPAPRGPARFLPLPGLPPAPPEPPGILAPQPPDVGSSDPLSMVYPSQGRSPSYAS

SEQ ID NO: 3634 - protein, 471 aa, Artificial Sequence
  Fusion Protein
HGEGTFTSDKSKQLEKELVRLFYEWLKNGGHSSIKPPPKGGGGGGGSGGGGSGGGGSADKTHTCPPCPAPEAAGGPSVFLFPPKPKDTLMISRTPEVTCVVVDVSHEDPEVKFNWYVDGVEVHNAKTKPREEQYNSTYRVVSVLTVLHQDWLNGKEYKCKVSNKALPAPIEKTISKAKGQPREPQVYTLPPSRDELTKNQVSLTCLVKGFYPSDIAVEWESNGQPENNYKTTPPVLDSDGSFFLYSKLTVDKSRWQQGNVFSCSVMHEALHNHYTQKSLSLSPGGGGSGSAHPIPDSSPLLQFGGQVRQRYLYTDDACQTEAHLEIREDGTVGGAADQSPESLLQLKALKPGVIQILGVKTSRFLCQRPDGALYGSLHFDPEACSFRELLLEDGYNVYQSEAHGLPLHLPGCKSPHRDPAPRGPARFLPLPGLPPAPPEPPGILAPQPPDVGSSDPLSMVGSQGRSPSYAS

SEQ ID NO: 3635 - protein, 472 aa, Artificial Sequence
  Fusion Protein
HGEGTFTSDKSKQLEKELVRLFYEWLKNGGHSSIKPPPKGGGGGGGSGGGGSGGGGSADKTHTCPPCPAPEAAGGPSVFLFPPKPKDTLMISRTPEVTCVVVDVSHEDPEVKFNWYVDGVEVHNAKTKPREEQYNSTYRVVSVLTVLHQDWLNGKEYKCKVSNKALPAPIEKTISKAKGQPREPQVYTLPPSRDELTKNQVSLTCLVKGFYPSDIAVEWESNGQPENNYKTTPPVLDSDGSFFLYSKLTVDKSRWQQGNVFSCSVMHEALHNHYTQKSLSLSPGGGGSGSAHPIPDSSPLLQFGGQVRQRYLYTDDACQTEAHLEIREDGTVGGAADQSPESLLQLKALKPGVIQILGVKTSRFLCQRPDGALYGSLHFDPEACSFRELLLEDGYNVYQSEAHGLPLHLPGCKSPHRDPAPRGPARFLPLPGLPPAPPEPPGILAPQPPDVGSSDPLSMVYPSQGRSPSYAS

SEQ ID NO: 3636 - protein, 471 aa, Artificial Sequence
  Fusion Protein
HGEGTFTSDKSKQLEKELVRLFYEWLKNGGHSSIKPPPKGGGGGGGSGGGGSGGGGSADKTHTCPPCPAPEAAGGPSVFLFPPKPKDTLMISRTPEVTCVVVDVSHEDPEVKFNWYVDGVEVHNAKTKPREEQYNSTYRVVSVLTVLHQDWLNGKEYKCKVSNKALPAPIEKTISKAKGQPREPQVYTLPPSRDELTKNQVSLTCLVKGFYPSDIAVEWESNGQPENNYKTTPPVLDSDGSFFLYSKLTVDKSRWQQGNVFSCSVMHEALHNHYTQKSLSLSPGGGGSGSAHPIPDSSPLLQFGGQVRQRYLYTDDACQTEAHLEIREDGTVGGAADQSPESLLQLKALKPGVIQILGVKTSRFLCQRPDGALYGSLHFDPEACSFRELLLEDGYNVYQSEAHGLPLHLCGNKSPHRDPAPRGPARFLPLPGLPPAPPEPPGILAPQPPDVGSSDPLSMVGSQGRSPSYAS

SEQ ID NO: 3637 - protein, 472 aa, Artificial Sequence
  Fusion Protein
HGEGTFTSDKSKQLEKELVRLFYEWLKNGGHSSIKPPPKGGGGGGGSGGGGSGGGGSADKTHTCPPCPAPEAAGGPSVFLFPPKPKDTLMISRTPEVTCVVVDVSHEDPEVKFNWYVDGVEVHNAKTKPREEQYNSTYRVVSVLTVLHQDWLNGKEYKCKVSNKALPAPIEKTISKAKGQPREPQVYTLPPSRDELTKNQVSLTCLVKGFYPSDIAVEWESNGQPENNYKTTPPVLDSDGSFFLYSKLTVDKSRWQQGNVFSCSVMHEALHNHYTQKSLSLSPGGGGSGSAHPIPDSSPLLQFGGQVRQRYLYTDDACQTEAHLEIREDGTVGGAADQSPESLLQLKALKPGVIQILGVKTSRFLCQRPDGALYGSLHFDPEACSFRELLLEDGYNVYQSEAHGLPLHLCGNKSPHRDPAPRGPARFLPLPGLPPAPPEPPGILAPQPPDVGSSDPLSMVYPSQGRSPSYAS

SEQ ID NO: 3638 - protein, 471 aa, Artificial Sequence
  Fusion Protein
HGEGTFTSDKSKQLEKELVRLFYEWLKNGGHSSIKPPPKGGGGGGGSGGGGSGGGGSADKTHTCPPCPAPELLGGPSVFLFPPKPKDTLMISRTPEVTCVVVDVSHEDPEVKFNWYVDGVEVHNAKTKPREEQYNNASRVVSVLTVLHQDWLNGKEYKCKVSNKALPAPIEKTISKAKGQPREPQVYTLPPSRDELTKNQVSLTCLVKGFYPSDIAVEWESNGQPENNYKTTPPVLDSDGSFFLYSKLTVDKSRWQQGNVFSCSVMHEALHNHYTQKSLSLSPGGGGSGSAHPIPDSSPLLQFGGQVRQRYLYTDDACQTEAHLEIREDGTVGGAADQSPESLLQLKALKPGVIQILGVKTSRFLCQRPDGALYGSLHFDPEACSFRELLLEDGYNVYQSEAHGLPLHLPGCKSPHRDPAPRGPARFLPLPGLPPAPPEPPGILAPQPPDVGSSDPLSMVGSQGRSPSYAS

SEQ ID NO: 3639 - protein, 472 aa, Artificial Sequence
  Fusion Protein
HGEGTFTSDKSKQLEKELVRLFYEWLKNGGHSSIKPPPKGGGGGGGSGGGGSGGGGSADKTHTCPPCPAPELLGGPSVFLFPPKPKDTLMISRTPEVTCVVVDVSHEDPEVKFNWYVDGVEVHNAKTKPREEQYNNASRVVSVLTVLHQDWLNGKEYKCKVSNKALPAPIEKTISKAKGQPREPQVYTLPPSRDELTKNQVSLTCLVKGFYPSDIAVEWESNGQPENNYKTTPPVLDSDGSFFLYSKLTVDKSRWQQGNVFSCSVMHEALHNHYTQKSLSLSPGGGGSGSAHPIPDSSPLLQFGGQVRQRYLYTDDACQTEAHLEIREDGTVGGAADQSPESLLQLKALKPGVIQILGVKTSRFLCQRPDGALYGSLHFDPEACSFRELLLEDGYNVYQSEAHGLPLHLPGCKSPHRDPAPRGPARFLPLPGLPPAPPEPPGILAPQPPDVGSSDPLSMVYPSQGRSPSYAS

SEQ ID NO: 3640 - protein, 471 aa, Artificial Sequence
  Fusion Protein
HGEGTFTSDKSKQLEKELVRLFYEWLKNGGHSSIKPPPKGGGGGGGSGGGGSGGGGSADKTHTCPPCPAPELLGGPSVFLFPPKPKDTLMISRTPEVTCVVVDVSHEDPEVKFNWYVDGVEVHNAKTKPREEQYNNASRVVSVLTVLHQDWLNGKEYKCKVSNKALPAPIEKTISKAKGQPREPQVYTLPPSRDELTKNQVSLTCLVKGFYPSDIAVEWESNGQPENNYKTTPPVLDSDGSFFLYSKLTVDKSRWQQGNVFSCSVMHEALHNHYTQKSLSLSPGGGGSGSAHPIPDSSPLLQFGGQVRQRYLYTDDACQTEAHLEIREDGTVGGAADQSPESLLQLKALKPGVIQILGVKTSRFLCQRPDGALYGSLHFDPEACSFRELLLEDGYNVYQSEAHGLPLHLCGNKSPHRDPAPRGPARFLPLPGLPPAPPEPPGILAPQPPDVGSSDPLSMVGSQGRSPSYAS

SEQ ID NO: 3641 - protein, 472 aa, Artificial Sequence
  Fusion Protein
HGEGTFTSDKSKQLEKELVRLFYEWLKNGGHSSIKPPPKGGGGGGGSGGGGSGGGGSADKTHTCPPCPAPELLGGPSVFLFPPKPKDTLMISRTPEVTCVVVDVSHEDPEVKFNWYVDGVEVHNAKTKPREEQYNNASRVVSVLTVLHQDWLNGKEYKCKVSNKALPAPIEKTISKAKGQPREPQVYTLPPSRDELTKNQVSLTCLVKGFYPSDIAVEWESNGQPENNYKTTPPVLDSDGSFFLYSKLTVDKSRWQQGNVFSCSVMHEALHNHYTQKSLSLSPGGGGSGSAHPIPDSSPLLQFGGQVRQRYLYTDDACQTEAHLEIREDGTVGGAADQSPESLLQLKALKPGVIQILGVKTSRFLCQRPDGALYGSLHFDPEACSFRELLLEDGYNVYQSEAHGLPLHLCGNKSPHRDPAPRGPARFLPLPGLPPAPPEPPGILAPQPPDVGSSDPLSMVYPSQGRSPSYAS

SEQ ID NO: 3642 - protein, 473 aa, Artificial Sequence
  Fusion Protein
HGEGTFTSDKSKQLEKELVRLFYEWLKNGGHSSIKPPPKGGGGGGGSGGGGSGGGGSAESKYGPPCPPCPAPEFEGGPSVFLFPPKPKDTLMISRTPEVTCVVVDVSQEDPEVQFNWYVDGVEVHNAKTKPREEQFNSTYRVVSVLTVLHQDWLNGKEYKCKVSNKGLPSSIEKTISKAKGQPREPQVYTLPPSQEEMTKNQVSLTCLVKGFYPSDIAVEWESNGQPENNYKTTPPVLDSDGSFFLYSRLTVDKSRWQEGNVFSCSVMHEALHNHYTQKSLSLSLGGGGSGSAHPIPDSSPLLQFGGQVRQRYLYTDDACQTEAHLEIREDGTVGGAADQSPESLLQLKALKPGVIQILGVKTSRFLCQRPDGALYGSLHFDPEACSFRELLLEDGYNVYQSEAHGLPLHLPGCKSPHRDPAPRGPARFLPLPGLPPAPPEPPGILAPQPPDVGSSDPLSMVGSQGRSPSYAS

SEQ ID NO: 3643 - protein, 474 aa, Artificial Sequence
  Fusion Protein
HGEGTFTSDKSKQLEKELVRLFYEWLKNGGHSSIKPPPKGGGGGGGSGGGGSGGGGSAESKYGPPCPPCPAPEFEGGPSVFLFPPKPKDTLMISRTPEVTCVVVDVSQEDPEVQFNWYVDGVEVHNAKTKPREEQFNSTYRVVSVLTVLHQDWLNGKEYKCKVSNKGLPSSIEKTISKAKGQPREPQVYTLPPSQEEMTKNQVSLTCLVKGFYPSDIAVEWESNGQPENNYKTTPPVLDSDGSFFLYSRLTVDKSRWQEGNVFSCSVMHEALHNHYTQKSLSLSLGGGGSGSAHPIPDSSPLLQFGGQVRQRYLYTDDACQTEAHLEIREDGTVGGAADQSPESLLQLKALKPGVIQILGVKTSRFLCQRPDGALYGSLHFDPEACSFRELLLEDGYNVYQSEAHGLPLHLPGCKSPHRDPAPRGPARFLPLPGLPPAPPEPPGILAPQPPDVGSSDPLSMVYPSQGRSPSYAS

SEQ ID NO: 3644 - protein, 473 aa, Artificial Sequence
  Fusion Protein
HGEGTFTSDKSKQLEKELVRLFYEWLKNGGHSSIKPPPKGGGGGGGSGGGGSGGGGSAESKYGPPCPPCPAPEFEGGPSVFLFPPKPKDTLMISRTPEVTCVVVDVSQEDPEVQFNWYVDGVEVHNAKTKPREEQFNSTYRVVSVLTVLHQDWLNGKEYKCKVSNKGLPSSIEKTISKAKGQPREPQVYTLPPSQEEMTKNQVSLTCLVKGFYPSDIAVEWESNGQPENNYKTTPPVLDSDGSFFLYSRLTVDKSRWQEGNVFSCSVMHEALHNHYTQKSLSLSLGGGGSGSAHPIPDSSPLLQFGGQVRQRYLYTDDACQTEAHLEIREDGTVGGAADQSPESLLQLKALKPGVIQILGVKTSRFLCQRPDGALYGSLHFDPEACSFRELLLEDGYNVYQSEAHGLPLHLCGNKSPHRDPAPRGPARFLPLPGLPPAPPEPPGILAPQPPDVGSSDPLSMVGSQGRSPSYAS

SEQ ID NO: 3645 - protein, 474 aa, Artificial Sequence
  Fusion Protein
HGEGTFTSDKSKQLEKELVRLFYEWLKNGGHSSIKPPPKGGGGGGGSGGGGSGGGGSAESKYGPPCPPCPAPEFEGGPSVFLFPPKPKDTLMISRTPEVTCVVVDVSQEDPEVQFNWYVDGVEVHNAKTKPREEQFNSTYRVVSVLTVLHQDWLNGKEYKCKVSNKGLPSSIEKTISKAKGQPREPQVYTLPPSQEEMTKNQVSLTCLVKGFYPSDIAVEWESNGQPENNYKTTPPVLDSDGSFFLYSRLTVDKSRWQEGNVFSCSVMHEALHNHYTQKSLSLSLGGGGSGSAHPIPDSSPLLQFGGQVRQRYLYTDDACQTEAHLEIREDGTVGGAADQSPESLLQLKALKPGVIQILGVKTSRFLCQRPDGALYGSLHFDPEACSFRELLLEDGYNVYQSEAHGLPLHLCGNKSPHRDPAPRGPARFLPLPGLPPAPPEPPGILAPQPPDVGSSDPLSMVYPSQGRSPSYAS

SEQ ID NO: 3646 - protein, 471 aa, Artificial Sequence
  Fusion Protein
HGEGTFTSDKSKQLEKELVRLFYEWLKNGGHSKGKPPPKGGGGGGGSGGGGSGGGGSADKTHTCPPCPAPEAAGGPSVFLFPPKPKDTLMISRTPEVTCVVVDVSHEDPEVKFNWYVDGVEVHNAKTKPREEQYNSTYRVVSVLTVLHQDWLNGKEYKCKVSNKALPAPIEKTISKAKGQPREPQVYTLPPSRDELTKNQVSLTCLVKGFYPSDIAVEWESNGQPENNYKTTPPVLDSDGSFFLYSKLTVDKSRWQQGNVFSCSVMHEALHNHYTQKSLSLSPGGGGSGSAHPIPDSSPLLQFGGQVRQRYLYTDDACQTEAHLEIREDGTVGGAADQSPESLLQLKALKPGVIQILGVKTSRFLCQRPDGALYGSLHFDPEACSFRELLLEDGYNVYQSEAHGLPLHLPGCKSPHRDPAPRGPARFLPLPGLPPAPPEPPGILAPQPPDVGSSDPLSMVGSQGRSPSYAS

SEQ ID NO: 3647 - protein, 472 aa, Artificial Sequence
  Fusion Protein
HGEGTFTSDKSKQLEKELVRLFYEWLKNGGHSKGKPPPKGGGGGGGSGGGGSGGGGSADKTHTCPPCPAPEAAGGPSVFLFPPKPKDTLMISRTPEVTCVVVDVSHEDPEVKFNWYVDGVEVHNAKTKPREEQYNSTYRVVSVLTVLHQDWLNGKEYKCKVSNKALPAPIEKTISKAKGQPREPQVYTLPPSRDELTKNQVSLTCLVKGFYPSDIAVEWESNGQPENNYKTTPPVLDSDGSFFLYSKLTVDKSRWQQGNVFSCSVMHEALHNHYTQKSLSLSPGGGGSGSAHPIPDSSPLLQFGGQVRQRYLYTDDACQTEAHLEIREDGTVGGAADQSPESLLQLKALKPGVIQILGVKTSRFLCQRPDGALYGSLHFDPEACSFRELLLEDGYNVYQSEAHGLPLHLPGCKSPHRDPAPRGPARFLPLPGLPPAPPEPPGILAPQPPDVGSSDPLSMVYPSQGRSPSYAS

SEQ ID NO: 3648 - protein, 471 aa, Artificial Sequence
  Fusion Protein
HGEGTFTSDKSKQLEKELVRLFYEWLKNGGHSKGKPPPKGGGGGGGSGGGGSGGGGSADKTHTCPPCPAPEAAGGPSVFLFPPKPKDTLMISRTPEVTCVVVDVSHEDPEVKFNWYVDGVEVHNAKTKPREEQYNSTYRVVSVLTVLHQDWLNGKEYKCKVSNKALPAPIEKTISKAKGQPREPQVYTLPPSRDELTKNQVSLTCLVKGFYPSDIAVEWESNGQPENNYKTTPPVLDSDGSFFLYSKLTVDKSRWQQGNVFSCSVMHEALHNHYTQKSLSLSPGGGGSGSAHPIPDSSPLLQFGGQVRQRYLYTDDACQTEAHLEIREDGTVGGAADQSPESLLQLKALKPGVIQILGVKTSRFLCQRPDGALYGSLHFDPEACSFRELLLEDGYNVYQSEAHGLPLHLCGNKSPHRDPAPRGPARFLPLPGLPPAPPEPPGILAPQPPDVGSSDPLSMVGSQGRSPSYAS

SEQ ID NO: 3649 - protein, 472 aa, Artificial Sequence
  Fusion Protein
HGEGTFTSDKSKQLEKELVRLFYEWLKNGGHSKGKPPPKGGGGGGGSGGGGSGGGGSADKTHTCPPCPAPEAAGGPSVFLFPPKPKDTLMISRTPEVTCVVVDVSHEDPEVKFNWYVDGVEVHNAKTKPREEQYNSTYRVVSVLTVLHQDWLNGKEYKCKVSNKALPAPIEKTISKAKGQPREPQVYTLPPSRDELTKNQVSLTCLVKGFYPSDIAVEWESNGQPENNYKTTPPVLDSDGSFFLYSKLTVDKSRWQQGNVFSCSVMHEALHNHYTQKSLSLSPGGGGSGSAHPIPDSSPLLQFGGQVRQRYLYTDDACQTEAHLEIREDGTVGGAADQSPESLLQLKALKPGVIQILGVKTSRFLCQRPDGALYGSLHFDPEACSFRELLLEDGYNVYQSEAHGLPLHLCGNKSPHRDPAPRGPARFLPLPGLPPAPPEPPGILAPQPPDVGSSDPLSMVYPSQGRSPSYAS

SEQ ID NO: 3650 - protein, 471 aa, Artificial Sequence
  Fusion Protein
HGEGTFTSDKSKQLEKELVRLFYEWLKNGGHSKGKPPPKGGGGGGGSGGGGSGGGGSADKTHTCPPCPAPELLGGPSVFLFPPKPKDTLMISRTPEVTCVVVDVSHEDPEVKFNWYVDGVEVHNAKTKPREEQYNNASRVVSVLTVLHQDWLNGKEYKCKVSNKALPAPIEKTISKAKGQPREPQVYTLPPSRDELTKNQVSLTCLVKGFYPSDIAVEWESNGQPENNYKTTPPVLDSDGSFFLYSKLTVDKSRWQQGNVFSCSVMHEALHNHYTQKSLSLSPGGGGSGSAHPIPDSSPLLQFGGQVRQRYLYTDDACQTEAHLEIREDGTVGGAADQSPESLLQLKALKPGVIQILGVKTSRFLCQRPDGALYGSLHFDPEACSFRELLLEDGYNVYQSEAHGLPLHLPGCKSPHRDPAPRGPARFLPLPGLPPAPPEPPGILAPQPPDVGSSDPLSMVGSQGRSPSYAS

SEQ ID NO: 3651 - protein, 472 aa, Artificial Sequence
  Fusion Protein
HGEGTFTSDKSKQLEKELVRLFYEWLKNGGHSKGKPPPKGGGGGGGSGGGGSGGGGSADKTHTCPPCPAPELLGGPSVFLFPPKPKDTLMISRTPEVTCVVVDVSHEDPEVKFNWYVDGVEVHNAKTKPREEQYNNASRVVSVLTVLHQDWLNGKEYKCKVSNKALPAPIEKTISKAKGQPREPQVYTLPPSRDELTKNQVSLTCLVKGFYPSDIAVEWESNGQPENNYKTTPPVLDSDGSFFLYSKLTVDKSRWQQGNVFSCSVMHEALHNHYTQKSLSLSPGGGGSGSAHPIPDSSPLLQFGGQVRQRYLYTDDACQTEAHLEIREDGTVGGAADQSPESLLQLKALKPGVIQILGVKTSRFLCQRPDGALYGSLHFDPEACSFRELLLEDGYNVYQSEAHGLPLHLPGCKSPHRDPAPRGPARFLPLPGLPPAPPEPPGILAPQPPDVGSSDPLSMVYPSQGRSPSYAS

SEQ ID NO: 3652 - protein, 471 aa, Artificial Sequence
  Fusion Protein
HGEGTFTSDKSKQLEKELVRLFYEWLKNGGHSKGKPPPKGGGGGGGSGGGGSGGGGSADKTHTCPPCPAPELLGGPSVFLFPPKPKDTLMISRTPEVTCVVVDVSHEDPEVKFNWYVDGVEVHNAKTKPREEQYNNASRVVSVLTVLHQDWLNGKEYKCKVSNKALPAPIEKTISKAKGQPREPQVYTLPPSRDELTKNQVSLTCLVKGFYPSDIAVEWESNGQPENNYKTTPPVLDSDGSFFLYSKLTVDKSRWQQGNVFSCSVMHEALHNHYTQKSLSLSPGGGGSGSAHPIPDSSPLLQFGGQVRQRYLYTDDACQTEAHLEIREDGTVGGAADQSPESLLQLKALKPGVIQILGVKTSRFLCQRPDGALYGSLHFDPEACSFRELLLEDGYNVYQSEAHGLPLHLCGNKSPHRDPAPRGPARFLPLPGLPPAPPEPPGILAPQPPDVGSSDPLSMVGSQGRSPSYAS

SEQ ID NO: 3653 - protein, 472 aa, Artificial Sequence
  Fusion Protein
HGEGTFTSDKSKQLEKELVRLFYEWLKNGGHSKGKPPPKGGGGGGGSGGGGSGGGGSADKTHTCPPCPAPELLGGPSVFLFPPKPKDTLMISRTPEVTCVVVDVSHEDPEVKFNWYVDGVEVHNAKTKPREEQYNNASRVVSVLTVLHQDWLNGKEYKCKVSNKALPAPIEKTISKAKGQPREPQVYTLPPSRDELTKNQVSLTCLVKGFYPSDIAVEWESNGQPENNYKTTPPVLDSDGSFFLYSKLTVDKSRWQQGNVFSCSVMHEALHNHYTQKSLSLSPGGGGSGSAHPIPDSSPLLQFGGQVRQRYLYTDDACQTEAHLEIREDGTVGGAADQSPESLLQLKALKPGVIQILGVKTSRFLCQRPDGALYGSLHFDPEACSFRELLLEDGYNVYQSEAHGLPLHLCGNKSPHRDPAPRGPARFLPLPGLPPAPPEPPGILAPQPPDVGSSDPLSMVYPSQGRSPSYAS

SEQ ID NO: 3654 - protein, 473 aa, Artificial Sequence
  Fusion Protein
HGEGTFTSDKSKQLEKELVRLFYEWLKNGGHSKGKPPPKGGGGGGGSGGGGSGGGGSAESKYGPPCPPCPAPEFEGGPSVFLFPPKPKDTLMISRTPEVTCVVVDVSQEDPEVQFNWYVDGVEVHNAKTKPREEQFNSTYRVVSVLTVLHQDWLNGKEYKCKVSNKGLPSSIEKTISKAKGQPREPQVYTLPPSQEEMTKNQVSLTCLVKGFYPSDIAVEWESNGQPENNYKTTPPVLDSDGSFFLYSRLTVDKSRWQEGNVFSCSVMHEALHNHYTQKSLSLSLGGGGSGSAHPIPDSSPLLQFGGQVRQRYLYTDDACQTEAHLEIREDGTVGGAADQSPESLLQLKALKPGVIQILGVKTSRFLCQRPDGALYGSLHFDPEACSFRELLLEDGYNVYQSEAHGLPLHLPGCKSPHRDPAPRGPARFLPLPGLPPAPPEPPGILAPQPPDVGSSDPLSMVGSQGRSPSYAS

SEQ ID NO: 3655 - protein, 474 aa, Artificial Sequence
  Fusion Protein
HGEGTFTSDKSKQLEKELVRLFYEWLKNGGHSKGKPPPKGGGGGGGSGGGGSGGGGSAESKYGPPCPPCPAPEFEGGPSVFLFPPKPKDTLMISRTPEVTCVVVDVSQEDPEVQFNWYVDGVEVHNAKTKPREEQFNSTYRVVSVLTVLHQDWLNGKEYKCKVSNKGLPSSIEKTISKAKGQPREPQVYTLPPSQEEMTKNQVSLTCLVKGFYPSDIAVEWESNGQPENNYKTTPPVLDSDGSFFLYSRLTVDKSRWQEGNVFSCSVMHEALHNHYTQKSLSLSLGGGGSGSAHPIPDSSPLLQFGGQVRQRYLYTDDACQTEAHLEIREDGTVGGAADQSPESLLQLKALKPGVIQILGVKTSRFLCQRPDGALYGSLHFDPEACSFRELLLEDGYNVYQSEAHGLPLHLPGCKSPHRDPAPRGPARFLPLPGLPPAPPEPPGILAPQPPDVGSSDPLSMVYPSQGRSPSYAS

SEQ ID NO: 3656 - protein, 473 aa, Artificial Sequence
  Fusion Protein
HGEGTFTSDKSKQLEKELVRLFYEWLKNGGHSKGKPPPKGGGGGGGSGGGGSGGGGSAESKYGPPCPPCPAPEFEGGPSVFLFPPKPKDTLMISRTPEVTCVVVDVSQEDPEVQFNWYVDGVEVHNAKTKPREEQFNSTYRVVSVLTVLHQDWLNGKEYKCKVSNKGLPSSIEKTISKAKGQPREPQVYTLPPSQEEMTKNQVSLTCLVKGFYPSDIAVEWESNGQPENNYKTTPPVLDSDGSFFLYSRLTVDKSRWQEGNVFSCSVMHEALHNHYTQKSLSLSLGGGGSGSAHPIPDSSPLLQFGGQVRQRYLYTDDACQTEAHLEIREDGTVGGAADQSPESLLQLKALKPGVIQILGVKTSRFLCQRPDGALYGSLHFDPEACSFRELLLEDGYNVYQSEAHGLPLHLCGNKSPHRDPAPRGPARFLPLPGLPPAPPEPPGILAPQPPDVGSSDPLSMVGSQGRSPSYAS

SEQ ID NO: 3657 - protein, 474 aa, Artificial Sequence
  Fusion Protein
HGEGTFTSDKSKQLEKELVRLFYEWLKNGGHSKGKPPPKGGGGGGGSGGGGSGGGGSAESKYGPPCPPCPAPEFEGGPSVFLFPPKPKDTLMISRTPEVTCVVVDVSQEDPEVQFNWYVDGVEVHNAKTKPREEQFNSTYRVVSVLTVLHQDWLNGKEYKCKVSNKGLPSSIEKTISKAKGQPREPQVYTLPPSQEEMTKNQVSLTCLVKGFYPSDIAVEWESNGQPENNYKTTPPVLDSDGSFFLYSRLTVDKSRWQEGNVFSCSVMHEALHNHYTQKSLSLSLGGGGSGSAHPIPDSSPLLQFGGQVRQRYLYTDDACQTEAHLEIREDGTVGGAADQSPESLLQLKALKPGVIQILGVKTSRFLCQRPDGALYGSLHFDPEACSFRELLLEDGYNVYQSEAHGLPLHLCGNKSPHRDPAPRGPARFLPLPGLPPAPPEPPGILAPQPPDVGSSDPLSMVYPSQGRSPSYAS

SEQ ID NO: 3658 - protein, 471 aa, Artificial Sequence
  Fusion Protein
HGEGTFTSDKSKQLEKELVRLFYEWLKKGGHSSIKPPPKGGGGGGGSGGGGSGGGGSADKTHTCPPCPAPEAAGGPSVFLFPPKPKDTLMISRTPEVTCVVVDVSHEDPEVKFNWYVDGVEVHNAKTKPREEQYNSTYRVVSVLTVLHQDWLNGKEYKCKVSNKALPAPIEKTISKAKGQPREPQVYTLPPSRDELTKNQVSLTCLVKGFYPSDIAVEWESNGQPENNYKTTPPVLDSDGSFFLYSKLTVDKSRWQQGNVFSCSVMHEALHNHYTQKSLSLSPGGGGSGSAHPIPDSSPLLQFGGQVRQRYLYTDDACQTEAHLEIREDGTVGGAADQSPESLLQLKALKPGVIQILGVKTSRFLCQRPDGALYGSLHFDPEACSFRELLLEDGYNVYQSEAHGLPLHLPGCKSPHRDPAPRGPARFLPLPGLPPAPPEPPGILAPQPPDVGSSDPLSMVGSQGRSPSYAS

SEQ ID NO: 3659 - protein, 472 aa, Artificial Sequence
  Fusion Protein
HGEGTFTSDKSKQLEKELVRLFYEWLKKGGHSSIKPPPKGGGGGGGSGGGGSGGGGSADKTHTCPPCPAPEAAGGPSVFLFPPKPKDTLMISRTPEVTCVVVDVSHEDPEVKFNWYVDGVEVHNAKTKPREEQYNSTYRVVSVLTVLHQDWLNGKEYKCKVSNKALPAPIEKTISKAKGQPREPQVYTLPPSRDELTKNQVSLTCLVKGFYPSDIAVEWESNGQPENNYKTTPPVLDSDGSFFLYSKLTVDKSRWQQGNVFSCSVMHEALHNHYTQKSLSLSPGGGGSGSAHPIPDSSPLLQFGGQVRQRYLYTDDACQTEAHLEIREDGTVGGAADQSPESLLQLKALKPGVIQILGVKTSRFLCQRPDGALYGSLHFDPEACSFRELLLEDGYNVYQSEAHGLPLHLPGCKSPHRDPAPRGPARFLPLPGLPPAPPEPPGILAPQPPDVGSSDPLSMVYPSQGRSPSYAS

SEQ ID NO: 3660 - protein, 471 aa, Artificial Sequence
  Fusion Protein
HGEGTFTSDKSKQLEKELVRLFYEWLKKGGHSSIKPPPKGGGGGGGSGGGGSGGGGSADKTHTCPPCPAPEAAGGPSVFLFPPKPKDTLMISRTPEVTCVVVDVSHEDPEVKFNWYVDGVEVHNAKTKPREEQYNSTYRVVSVLTVLHQDWLNGKEYKCKVSNKALPAPIEKTISKAKGQPREPQVYTLPPSRDELTKNQVSLTCLVKGFYPSDIAVEWESNGQPENNYKTTPPVLDSDGSFFLYSKLTVDKSRWQQGNVFSCSVMHEALHNHYTQKSLSLSPGGGGSGSAHPIPDSSPLLQFGGQVRQRYLYTDDACQTEAHLEIREDGTVGGAADQSPESLLQLKALKPGVIQILGVKTSRFLCQRPDGALYGSLHFDPEACSFRELLLEDGYNVYQSEAHGLPLHLCGNKSPHRDPAPRGPARFLPLPGLPPAPPEPPGILAPQPPDVGSSDPLSMVGSQGRSPSYAS

SEQ ID NO: 3661 - protein, 472 aa, Artificial Sequence
  Fusion Protein
HGEGTFTSDKSKQLEKELVRLFYEWLKKGGHSSIKPPPKGGGGGGGSGGGGSGGGGSADKTHTCPPCPAPEAAGGPSVFLFPPKPKDTLMISRTPEVTCVVVDVSHEDPEVKFNWYVDGVEVHNAKTKPREEQYNSTYRVVSVLTVLHQDWLNGKEYKCKVSNKALPAPIEKTISKAKGQPREPQVYTLPPSRDELTKNQVSLTCLVKGFYPSDIAVEWESNGQPENNYKTTPPVLDSDGSFFLYSKLTVDKSRWQQGNVFSCSVMHEALHNHYTQKSLSLSPGGGGSGSAHPIPDSSPLLQFGGQVRQRYLYTDDACQTEAHLEIREDGTVGGAADQSPESLLQLKALKPGVIQILGVKTSRFLCQRPDGALYGSLHFDPEACSFRELLLEDGYNVYQSEAHGLPLHLCGNKSPHRDPAPRGPARFLPLPGLPPAPPEPPGILAPQPPDVGSSDPLSMVYPSQGRSPSYAS

SEQ ID NO: 3662 - protein, 471 aa, Artificial Sequence
  Fusion Protein
HGEGTFTSDKSKQLEKELVRLFYEWLKKGGHSSIKPPPKGGGGGGGSGGGGSGGGGSADKTHTCPPCPAPELLGGPSVFLFPPKPKDTLMISRTPEVTCVVVDVSHEDPEVKFNWYVDGVEVHNAKTKPREEQYNNASRVVSVLTVLHQDWLNGKEYKCKVSNKALPAPIEKTISKAKGQPREPQVYTLPPSRDELTKNQVSLTCLVKGFYPSDIAVEWESNGQPENNYKTTPPVLDSDGSFFLYSKLTVDKSRWQQGNVFSCSVMHEALHNHYTQKSLSLSPGGGGSGSAHPIPDSSPLLQFGGQVRQRYLYTDDACQTEAHLEIREDGTVGGAADQSPESLLQLKALKPGVIQILGVKTSRFLCQRPDGALYGSLHFDPEACSFRELLLEDGYNVYQSEAHGLPLHLPGCKSPHRDPAPRGPARFLPLPGLPPAPPEPPGILAPQPPDVGSSDPLSMVGSQGRSPSYAS

SEQ ID NO: 3663 - protein, 472 aa, Artificial Sequence
  Fusion Protein
HGEGTFTSDKSKQLEKELVRLFYEWLKKGGHSSIKPPPKGGGGGGGSGGGGSGGGGSADKTHTCPPCPAPELLGGPSVFLFPPKPKDTLMISRTPEVTCVVVDVSHEDPEVKFNWYVDGVEVHNAKTKPREEQYNNASRVVSVLTVLHQDWLNGKEYKCKVSNKALPAPIEKTISKAKGQPREPQVYTLPPSRDELTKNQVSLTCLVKGFYPSDIAVEWESNGQPENNYKTTPPVLDSDGSFFLYSKLTVDKSRWQQGNVFSCSVMHEALHNHYTQKSLSLSPGGGGSGSAHPIPDSSPLLQFGGQVRQRYLYTDDACQTEAHLEIREDGTVGGAADQSPESLLQLKALKPGVIQILGVKTSRFLCQRPDGALYGSLHFDPEACSFRELLLEDGYNVYQSEAHGLPLHLPGCKSPHRDPAPRGPARFLPLPGLPPAPPEPPGILAPQPPDVGSSDPLSMVYPSQGRSPSYAS

SEQ ID NO: 3664 - protein, 471 aa, Artificial Sequence
  Fusion Protein
HGEGTFTSDKSKQLEKELVRLFYEWLKKGGHSSIKPPPKGGGGGGGSGGGGSGGGGSADKTHTCPPCPAPELLGGPSVFLFPPKPKDTLMISRTPEVTCVVVDVSHEDPEVKFNWYVDGVEVHNAKTKPREEQYNNASRVVSVLTVLHQDWLNGKEYKCKVSNKALPAPIEKTISKAKGQPREPQVYTLPPSRDELTKNQVSLTCLVKGFYPSDIAVEWESNGQPENNYKTTPPVLDSDGSFFLYSKLTVDKSRWQQGNVFSCSVMHEALHNHYTQKSLSLSPGGGGSGSAHPIPDSSPLLQFGGQVRQRYLYTDDACQTEAHLEIREDGTVGGAADQSPESLLQLKALKPGVIQILGVKTSRFLCQRPDGALYGSLHFDPEACSFRELLLEDGYNVYQSEAHGLPLHLCGNKSPHRDPAPRGPARFLPLPGLPPAPPEPPGILAPQPPDVGSSDPLSMVGSQGRSPSYAS

SEQ ID NO: 3665 - protein, 472 aa, Artificial Sequence
  Fusion Protein
HGEGTFTSDKSKQLEKELVRLFYEWLKKGGHSSIKPPPKGGGGGGGSGGGGSGGGGSADKTHTCPPCPAPELLGGPSVFLFPPKPKDTLMISRTPEVTCVVVDVSHEDPEVKFNWYVDGVEVHNAKTKPREEQYNNASRVVSVLTVLHQDWLNGKEYKCKVSNKALPAPIEKTISKAKGQPREPQVYTLPPSRDELTKNQVSLTCLVKGFYPSDIAVEWESNGQPENNYKTTPPVLDSDGSFFLYSKLTVDKSRWQQGNVFSCSVMHEALHNHYTQKSLSLSPGGGGSGSAHPIPDSSPLLQFGGQVRQRYLYTDDACQTEAHLEIREDGTVGGAADQSPESLLQLKALKPGVIQILGVKTSRFLCQRPDGALYGSLHFDPEACSFRELLLEDGYNVYQSEAHGLPLHLCGNKSPHRDPAPRGPARFLPLPGLPPAPPEPPGILAPQPPDVGSSDPLSMVYPSQGRSPSYAS

SEQ ID NO: 3666 - protein, 474 aa, Artificial Sequence
  Fusion Protein
HGEGTFTSDKSKQLEKELVRLFYEWLKKGGHSSIKPPPKGGGGGGGSGGGGSGGGGSAESKYGPPCPPCPAPEFEGGPSVFLFPPKPKDTLMISRTPEVTCVVVDVSQEDPEVQFNWYVDGVEVHNAKTKPREEQFNSTYRVVSVLTVLHQDWLNGKEYKCKVSNKGLPSSIEKTISKAKGQPREPQVYTLPPSQEEMTKNQVSLTCLVKGFYPSDIAVEWESNGQPENNYKTTPPVLDSDGSFFLYSRLTVDKSRWQEGNVFSCSVMHEALHNHYTQKSLSLSLGGGGSGSAHPIPDSSPLLQFGGQVRQRYLYTDDACQTEAHLEIREDGTVGGAADQSPESLLQLKALKPGVIQILGVKTSRFLCQRPDGALYGSLHFDPEACSFRELLLEDGYNVYQSEAHGLPLHLPGCKSPHRDPAPRGPARFLPLPGLPPAPPEPPGILAPQPPDVGSSDPLSMVYPSQGRSPSYAS

SEQ ID NO: 3667 - protein, 473 aa, Artificial Sequence
  Fusion Protein
HGEGTFTSDKSKQLEKELVRLFYEWLKKGGHSSIKPPPKGGGGGGGSGGGGSGGGGSAESKYGPPCPPCPAPEFEGGPSVFLFPPKPKDTLMISRTPEVTCVVVDVSQEDPEVQFNWYVDGVEVHNAKTKPREEQFNSTYRVVSVLTVLHQDWLNGKEYKCKVSNKGLPSSIEKTISKAKGQPREPQVYTLPPSQEEMTKNQVSLTCLVKGFYPSDIAVEWESNGQPENNYKTTPPVLDSDGSFFLYSRLTVDKSRWQEGNVFSCSVMHEALHNHYTQKSLSLSLGGGGSGSAHPIPDSSPLLQFGGQVRQRYLYTDDACQTEAHLEIREDGTVGGAADQSPESLLQLKALKPGVIQILGVKTSRFLCQRPDGALYGSLHFDPEACSFRELLLEDGYNVYQSEAHGLPLHLCGNKSPHRDPAPRGPARFLPLPGLPPAPPEPPGILAPQPPDVGSSDPLSMVGSQGRSPSYAS

SEQ ID NO: 3668 - protein, 474 aa, Artificial Sequence
  Fusion Protein
HGEGTFTSDKSKQLEKELVRLFYEWLKKGGHSSIKPPPKGGGGGGGSGGGGSGGGGSAESKYGPPCPPCPAPEFEGGPSVFLFPPKPKDTLMISRTPEVTCVVVDVSQEDPEVQFNWYVDGVEVHNAKTKPREEQFNSTYRVVSVLTVLHQDWLNGKEYKCKVSNKGLPSSIEKTISKAKGQPREPQVYTLPPSQEEMTKNQVSLTCLVKGFYPSDIAVEWESNGQPENNYKTTPPVLDSDGSFFLYSRLTVDKSRWQEGNVFSCSVMHEALHNHYTQKSLSLSLGGGGSGSAHPIPDSSPLLQFGGQVRQRYLYTDDACQTEAHLEIREDGTVGGAADQSPESLLQLKALKPGVIQILGVKTSRFLCQRPDGALYGSLHFDPEACSFRELLLEDGYNVYQSEAHGLPLHLCGNKSPHRDPAPRGPARFLPLPGLPPAPPEPPGILAPQPPDVGSSDPLSMVYPSQGRSPSYAS

SEQ ID NO: 3669 - protein, 471 aa, Artificial Sequence
  Fusion Protein
HGEGTFTSDKSKQLEKELVRLFYEWLKAGGHSKQKPPPKGGGGGGGSGGGGSGGGGSADKTHTCPPCPAPEAAGGPSVFLFPPKPKDTLMISRTPEVTCVVVDVSHEDPEVKFNWYVDGVEVHNAKTKPREEQYNSTYRVVSVLTVLHQDWLNGKEYKCKVSNKALPAPIEKTISKAKGQPREPQVYTLPPSRDELTKNQVSLTCLVKGFYPSDIAVEWESNGQPENNYKTTPPVLDSDGSFFLYSKLTVDKSRWQQGNVFSCSVMHEALHNHYTQKSLSLSPGGGGSGSAHPIPDSSPLLQFGGQVRQRYLYTDDACQTEAHLEIREDGTVGGAADQSPESLLQLKALKPGVIQILGVKTSRFLCQRPDGALYGSLHFDPEACSFRELLLEDGYNVYQSEAHGLPLHLPGCKSPHRDPAPRGPARFLPLPGLPPAPPEPPGILAPQPPDVGSSDPLSMVGSQGRSPSYAS

SEQ ID NO: 3670 - protein, 472 aa, Artificial Sequence
  Fusion Protein
HGEGTFTSDKSKQLEKELVRLFYEWLKAGGHSKQKPPPKGGGGGGGSGGGGSGGGGSADKTHTCPPCPAPEAAGGPSVFLFPPKPKDTLMISRTPEVTCVVVDVSHEDPEVKFNWYVDGVEVHNAKTKPREEQYNSTYRVVSVLTVLHQDWLNGKEYKCKVSNKALPAPIEKTISKAKGQPREPQVYTLPPSRDELTKNQVSLTCLVKGFYPSDIAVEWESNGQPENNYKTTPPVLDSDGSFFLYSKLTVDKSRWQQGNVFSCSVMHEALHNHYTQKSLSLSPGGGGSGSAHPIPDSSPLLQFGGQVRQRYLYTDDACQTEAHLEIREDGTVGGAADQSPESLLQLKALKPGVIQILGVKTSRFLCQRPDGALYGSLHFDPEACSFRELLLEDGYNVYQSEAHGLPLHLPGCKSPHRDPAPRGPARFLPLPGLPPAPPEPPGILAPQPPDVGSSDPLSMVYPSQGRSPSYAS

SEQ ID NO: 3671 - protein, 471 aa, Artificial Sequence
  Fusion Protein
HGEGTFTSDKSKQLEKELVRLFYEWLKAGGHSKQKPPPKGGGGGGGSGGGGSGGGGSADKTHTCPPCPAPEAAGGPSVFLFPPKPKDTLMISRTPEVTCVVVDVSHEDPEVKFNWYVDGVEVHNAKTKPREEQYNSTYRVVSVLTVLHQDWLNGKEYKCKVSNKALPAPIEKTISKAKGQPREPQVYTLPPSRDELTKNQVSLTCLVKGFYPSDIAVEWESNGQPENNYKTTPPVLDSDGSFFLYSKLTVDKSRWQQGNVFSCSVMHEALHNHYTQKSLSLSPGGGGSGSAHPIPDSSPLLQFGGQVRQRYLYTDDACQTEAHLEIREDGTVGGAADQSPESLLQLKALKPGVIQILGVKTSRFLCQRPDGALYGSLHFDPEACSFRELLLEDGYNVYQSEAHGLPLHLCGNKSPHRDPAPRGPARFLPLPGLPPAPPEPPGILAPQPPDVGSSDPLSMVGSQGRSPSYAS

SEQ ID NO: 3672 - protein, 472 aa, Artificial Sequence
  Fusion Protein
HGEGTFTSDKSKQLEKELVRLFYEWLKAGGHSKQKPPPKGGGGGGGSGGGGSGGGGSADKTHTCPPCPAPEAAGGPSVFLFPPKPKDTLMISRTPEVTCVVVDVSHEDPEVKFNWYVDGVEVHNAKTKPREEQYNSTYRVVSVLTVLHQDWLNGKEYKCKVSNKALPAPIEKTISKAKGQPREPQVYTLPPSRDELTKNQVSLTCLVKGFYPSDIAVEWESNGQPENNYKTTPPVLDSDGSFFLYSKLTVDKSRWQQGNVFSCSVMHEALHNHYTQKSLSLSPGGGGSGSAHPIPDSSPLLQFGGQVRQRYLYTDDACQTEAHLEIREDGTVGGAADQSPESLLQLKALKPGVIQILGVKTSRFLCQRPDGALYGSLHFDPEACSFRELLLEDGYNVYQSEAHGLPLHLCGNKSPHRDPAPRGPARFLPLPGLPPAPPEPPGILAPQPPDVGSSDPLSMVYPSQGRSPSYAS

SEQ ID NO: 3673 - protein, 471 aa, Artificial Sequence
  Fusion Protein
HGEGTFTSDKSKQLEKELVRLFYEWLKAGGHSKQKPPPKGGGGGGGSGGGGSGGGGSADKTHTCPPCPAPELLGGPSVFLFPPKPKDTLMISRTPEVTCVVVDVSHEDPEVKFNWYVDGVEVHNAKTKPREEQYNNASRVVSVLTVLHQDWLNGKEYKCKVSNKALPAPIEKTISKAKGQPREPQVYTLPPSRDELTKNQVSLTCLVKGFYPSDIAVEWESNGQPENNYKTTPPVLDSDGSFFLYSKLTVDKSRWQQGNVFSCSVMHEALHNHYTQKSLSLSPGGGGSGSAHPIPDSSPLLQFGGQVRQRYLYTDDACQTEAHLEIREDGTVGGAADQSPESLLQLKALKPGVIQILGVKTSRFLCQRPDGALYGSLHFDPEACSFRELLLEDGYNVYQSEAHGLPLHLPGCKSPHRDPAPRGPARFLPLPGLPPAPPEPPGILAPQPPDVGSSDPLSMVGSQGRSPSYAS

SEQ ID NO: 3674 - protein, 472 aa, Artificial Sequence
  Fusion Protein
HGEGTFTSDKSKQLEKELVRLFYEWLKAGGHSKQKPPPKGGGGGGGSGGGGSGGGGSADKTHTCPPCPAPELLGGPSVFLFPPKPKDTLMISRTPEVTCVVVDVSHEDPEVKFNWYVDGVEVHNAKTKPREEQYNNASRVVSVLTVLHQDWLNGKEYKCKVSNKALPAPIEKTISKAKGQPREPQVYTLPPSRDELTKNQVSLTCLVKGFYPSDIAVEWESNGQPENNYKTTPPVLDSDGSFFLYSKLTVDKSRWQQGNVFSCSVMHEALHNHYTQKSLSLSPGGGGSGSAHPIPDSSPLLQFGGQVRQRYLYTDDACQTEAHLEIREDGTVGGAADQSPESLLQLKALKPGVIQILGVKTSRFLCQRPDGALYGSLHFDPEACSFRELLLEDGYNVYQSEAHGLPLHLPGCKSPHRDPAPRGPARFLPLPGLPPAPPEPPGILAPQPPDVGSSDPLSMVYPSQGRSPSYAS

SEQ ID NO: 3675 - protein, 471 aa, Artificial Sequence
  Fusion Protein
HGEGTFTSDKSKQLEKELVRLFYEWLKAGGHSKQKPPPKGGGGGGGSGGGGSGGGGSADKTHTCPPCPAPELLGGPSVFLFPPKPKDTLMISRTPEVTCVVVDVSHEDPEVKFNWYVDGVEVHNAKTKPREEQYNNASRVVSVLTVLHQDWLNGKEYKCKVSNKALPAPIEKTISKAKGQPREPQVYTLPPSRDELTKNQVSLTCLVKGFYPSDIAVEWESNGQPENNYKTTPPVLDSDGSFFLYSKLTVDKSRWQQGNVFSCSVMHEALHNHYTQKSLSLSPGGGGSGSAHPIPDSSPLLQFGGQVRQRYLYTDDACQTEAHLEIREDGTVGGAADQSPESLLQLKALKPGVIQILGVKTSRFLCQRPDGALYGSLHFDPEACSFRELLLEDGYNVYQSEAHGLPLHLCGNKSPHRDPAPRGPARFLPLPGLPPAPPEPPGILAPQPPDVGSSDPLSMVGSQGRSPSYAS

SEQ ID NO: 3676 - protein, 472 aa, Artificial Sequence
  Fusion Protein
HGEGTFTSDKSKQLEKELVRLFYEWLKAGGHSKQKPPPKGGGGGGGSGGGGSGGGGSADKTHTCPPCPAPELLGGPSVFLFPPKPKDTLMISRTPEVTCVVVDVSHEDPEVKFNWYVDGVEVHNAKTKPREEQYNNASRVVSVLTVLHQDWLNGKEYKCKVSNKALPAPIEKTISKAKGQPREPQVYTLPPSRDELTKNQVSLTCLVKGFYPSDIAVEWESNGQPENNYKTTPPVLDSDGSFFLYSKLTVDKSRWQQGNVFSCSVMHEALHNHYTQKSLSLSPGGGGSGSAHPIPDSSPLLQFGGQVRQRYLYTDDACQTEAHLEIREDGTVGGAADQSPESLLQLKALKPGVIQILGVKTSRFLCQRPDGALYGSLHFDPEACSFRELLLEDGYNVYQSEAHGLPLHLCGNKSPHRDPAPRGPARFLPLPGLPPAPPEPPGILAPQPPDVGSSDPLSMVYPSQGRSPSYAS

SEQ ID NO: 3677 - protein, 474 aa, Artificial Sequence
  Fusion Protein
HGEGTFTSDKSKQLEKELVRLFYEWLKAGGHSKQKPPPKGGGGGGGSGGGGSGGGGSAESKYGPPCPPCPAPEFEGGPSVFLFPPKPKDTLMISRTPEVTCVVVDVSQEDPEVQFNWYVDGVEVHNAKTKPREEQFNSTYRVVSVLTVLHQDWLNGKEYKCKVSNKGLPSSIEKTISKAKGQPREPQVYTLPPSQEEMTKNQVSLTCLVKGFYPSDIAVEWESNGQPENNYKTTPPVLDSDGSFFLYSRLTVDKSRWQEGNVFSCSVMHEALHNHYTQKSLSLSLGGGGSGSAHPIPDSSPLLQFGGQVRQRYLYTDDACQTEAHLEIREDGTVGGAADQSPESLLQLKALKPGVIQILGVKTSRFLCQRPDGALYGSLHFDPEACSFRELLLEDGYNVYQSEAHGLPLHLPGCKSPHRDPAPRGPARFLPLPGLPPAPPEPPGILAPQPPDVGSSDPLSMVYPSQGRSPSYAS

SEQ ID NO: 3678 - protein, 473 aa, Artificial Sequence
  Fusion Protein
HGEGTFTSDKSKQLEKELVRLFYEWLKAGGHSKQKPPPKGGGGGGGSGGGGSGGGGSAESKYGPPCPPCPAPEFEGGPSVFLFPPKPKDTLMISRTPEVTCVVVDVSQEDPEVQFNWYVDGVEVHNAKTKPREEQFNSTYRVVSVLTVLHQDWLNGKEYKCKVSNKGLPSSIEKTISKAKGQPREPQVYTLPPSQEEMTKNQVSLTCLVKGFYPSDIAVEWESNGQPENNYKTTPPVLDSDGSFFLYSRLTVDKSRWQEGNVFSCSVMHEALHNHYTQKSLSLSLGGGGSGSAHPIPDSSPLLQFGGQVRQRYLYTDDACQTEAHLEIREDGTVGGAADQSPESLLQLKALKPGVIQILGVKTSRFLCQRPDGALYGSLHFDPEACSFRELLLEDGYNVYQSEAHGLPLHLCGNKSPHRDPAPRGPARFLPLPGLPPAPPEPPGILAPQPPDVGSSDPLSMVGSQGRSPSYAS

SEQ ID NO: 3679 - protein, 474 aa, Artificial Sequence
  Fusion Protein
HGEGTFTSDKSKQLEKELVRLFYEWLKAGGHSKQKPPPKGGGGGGGSGGGGSGGGGSAESKYGPPCPPCPAPEFEGGPSVFLFPPKPKDTLMISRTPEVTCVVVDVSQEDPEVQFNWYVDGVEVHNAKTKPREEQFNSTYRVVSVLTVLHQDWLNGKEYKCKVSNKGLPSSIEKTISKAKGQPREPQVYTLPPSQEEMTKNQVSLTCLVKGFYPSDIAVEWESNGQPENNYKTTPPVLDSDGSFFLYSRLTVDKSRWQEGNVFSCSVMHEALHNHYTQKSLSLSLGGGGSGSAHPIPDSSPLLQFGGQVRQRYLYTDDACQTEAHLEIREDGTVGGAADQSPESLLQLKALKPGVIQILGVKTSRFLCQRPDGALYGSLHFDPEACSFRELLLEDGYNVYQSEAHGLPLHLCGNKSPHRDPAPRGPARFLPLPGLPPAPPEPPGILAPQPPDVGSSDPLSMVYPSQGRSPSYAS

SEQ ID NO: 3680 - protein, 471 aa, Artificial Sequence
  Fusion Protein
HGEGTFTSDKSKQLEKELVRLFYEWLKAGGHSKIKPPPKGGGGGGGSGGGGSGGGGSADKTHTCPPCPAPEAAGGPSVFLFPPKPKDTLMISRTPEVTCVVVDVSHEDPEVKFNWYVDGVEVHNAKTKPREEQYNSTYRVVSVLTVLHQDWLNGKEYKCKVSNKALPAPIEKTISKAKGQPREPQVYTLPPSRDELTKNQVSLTCLVKGFYPSDIAVEWESNGQPENNYKTTPPVLDSDGSFFLYSKLTVDKSRWQQGNVFSCSVMHEALHNHYTQKSLSLSPGGGGSGSAHPIPDSSPLLQFGGQVRQRYLYTDDACQTEAHLEIREDGTVGGAADQSPESLLQLKALKPGVIQILGVKTSRFLCQRPDGALYGSLHFDPEACSFRELLLEDGYNVYQSEAHGLPLHLPGCKSPHRDPAPRGPARFLPLPGLPPAPPEPPGILAPQPPDVGSSDPLSMVGSQGRSPSYAS

SEQ ID NO: 3681 - protein, 472 aa, Artificial Sequence
  Fusion Protein
HGEGTFTSDKSKQLEKELVRLFYEWLKAGGHSKIKPPPKGGGGGGGSGGGGSGGGGSADKTHTCPPCPAPEAAGGPSVFLFPPKPKDTLMISRTPEVTCVVVDVSHEDPEVKFNWYVDGVEVHNAKTKPREEQYNSTYRVVSVLTVLHQDWLNGKEYKCKVSNKALPAPIEKTISKAKGQPREPQVYTLPPSRDELTKNQVSLTCLVKGFYPSDIAVEWESNGQPENNYKTTPPVLDSDGSFFLYSKLTVDKSRWQQGNVFSCSVMHEALHNHYTQKSLSLSPGGGGSGSAHPIPDSSPLLQFGGQVRQRYLYTDDACQTEAHLEIREDGTVGGAADQSPESLLQLKALKPGVIQILGVKTSRFLCQRPDGALYGSLHFDPEACSFRELLLEDGYNVYQSEAHGLPLHLPGCKSPHRDPAPRGPARFLPLPGLPPAPPEPPGILAPQPPDVGSSDPLSMVYPSQGRSPSYAS

SEQ ID NO: 3682 - protein, 471 aa, Artificial Sequence
  Fusion Protein
HGEGTFTSDKSKQLEKELVRLFYEWLKAGGHSKIKPPPKGGGGGGGSGGGGSGGGGSADKTHTCPPCPAPEAAGGPSVFLFPPKPKDTLMISRTPEVTCVVVDVSHEDPEVKFNWYVDGVEVHNAKTKPREEQYNSTYRVVSVLTVLHQDWLNGKEYKCKVSNKALPAPIEKTISKAKGQPREPQVYTLPPSRDELTKNQVSLTCLVKGFYPSDIAVEWESNGQPENNYKTTPPVLDSDGSFFLYSKLTVDKSRWQQGNVFSCSVMHEALHNHYTQKSLSLSPGGGGSGSAHPIPDSSPLLQFGGQVRQRYLYTDDACQTEAHLEIREDGTVGGAADQSPESLLQLKALKPGVIQILGVKTSRFLCQRPDGALYGSLHFDPEACSFRELLLEDGYNVYQSEAHGLPLHLCGNKSPHRDPAPRGPARFLPLPGLPPAPPEPPGILAPQPPDVGSSDPLSMVGSQGRSPSYAS

SEQ ID NO: 3683 - protein, 472 aa, Artificial Sequence
  Fusion Protein
HGEGTFTSDKSKQLEKELVRLFYEWLKAGGHSKIKPPPKGGGGGGGSGGGGSGGGGSADKTHTCPPCPAPEAAGGPSVFLFPPKPKDTLMISRTPEVTCVVVDVSHEDPEVKFNWYVDGVEVHNAKTKPREEQYNSTYRVVSVLTVLHQDWLNGKEYKCKVSNKALPAPIEKTISKAKGQPREPQVYTLPPSRDELTKNQVSLTCLVKGFYPSDIAVEWESNGQPENNYKTTPPVLDSDGSFFLYSKLTVDKSRWQQGNVFSCSVMHEALHNHYTQKSLSLSPGGGGSGSAHPIPDSSPLLQFGGQVRQRYLYTDDACQTEAHLEIREDGTVGGAADQSPESLLQLKALKPGVIQILGVKTSRFLCQRPDGALYGSLHFDPEACSFRELLLEDGYNVYQSEAHGLPLHLCGNKSPHRDPAPRGPARFLPLPGLPPAPPEPPGILAPQPPDVGSSDPLSMVYPSQGRSPSYAS

SEQ ID NO: 3684 - protein, 471 aa, Artificial Sequence
  Fusion Protein
HGEGTFTSDKSKQLEKELVRLFYEWLKAGGHSKIKPPPKGGGGGGGSGGGGSGGGGSADKTHTCPPCPAPELLGGPSVFLFPPKPKDTLMISRTPEVTCVVVDVSHEDPEVKFNWYVDGVEVHNAKTKPREEQYNNASRVVSVLTVLHQDWLNGKEYKCKVSNKALPAPIEKTISKAKGQPREPQVYTLPPSRDELTKNQVSLTCLVKGFYPSDIAVEWESNGQPENNYKTTPPVLDSDGSFFLYSKLTVDKSRWQQGNVFSCSVMHEALHNHYTQKSLSLSPGGGGSGSAHPIPDSSPLLQFGGQVRQRYLYTDDACQTEAHLEIREDGTVGGAADQSPESLLQLKALKPGVIQILGVKTSRFLCQRPDGALYGSLHFDPEACSFRELLLEDGYNVYQSEAHGLPLHLPGCKSPHRDPAPRGPARFLPLPGLPPAPPEPPGILAPQPPDVGSSDPLSMVGSQGRSPSYAS

SEQ ID NO: 3685 - protein, 472 aa, Artificial Sequence
  Fusion Protein
HGEGTFTSDKSKQLEKELVRLFYEWLKAGGHSKIKPPPKGGGGGGGSGGGGSGGGGSADKTHTCPPCPAPELLGGPSVFLFPPKPKDTLMISRTPEVTCVVVDVSHEDPEVKFNWYVDGVEVHNAKTKPREEQYNNASRVVSVLTVLHQDWLNGKEYKCKVSNKALPAPIEKTISKAKGQPREPQVYTLPPSRDELTKNQVSLTCLVKGFYPSDIAVEWESNGQPENNYKTTPPVLDSDGSFFLYSKLTVDKSRWQQGNVFSCSVMHEALHNHYTQKSLSLSPGGGGSGSAHPIPDSSPLLQFGGQVRQRYLYTDDACQTEAHLEIREDGTVGGAADQSPESLLQLKALKPGVIQILGVKTSRFLCQRPDGALYGSLHFDPEACSFRELLLEDGYNVYQSEAHGLPLHLPGCKSPHRDPAPRGPARFLPLPGLPPAPPEPPGILAPQPPDVGSSDPLSMVYPSQGRSPSYAS

SEQ ID NO: 3686 - protein, 471 aa, Artificial Sequence
  Fusion Protein
HGEGTFTSDKSKQLEKELVRLFYEWLKAGGHSKIKPPPKGGGGGGGSGGGGSGGGGSADKTHTCPPCPAPELLGGPSVFLFPPKPKDTLMISRTPEVTCVVVDVSHEDPEVKFNWYVDGVEVHNAKTKPREEQYNNASRVVSVLTVLHQDWLNGKEYKCKVSNKALPAPIEKTISKAKGQPREPQVYTLPPSRDELTKNQVSLTCLVKGFYPSDIAVEWESNGQPENNYKTTPPVLDSDGSFFLYSKLTVDKSRWQQGNVFSCSVMHEALHNHYTQKSLSLSPGGGGSGSAHPIPDSSPLLQFGGQVRQRYLYTDDACQTEAHLEIREDGTVGGAADQSPESLLQLKALKPGVIQILGVKTSRFLCQRPDGALYGSLHFDPEACSFRELLLEDGYNVYQSEAHGLPLHLCGNKSPHRDPAPRGPARFLPLPGLPPAPPEPPGILAPQPPDVGSSDPLSMVGSQGRSPSYAS

SEQ ID NO: 3687 - protein, 472 aa, Artificial Sequence
  Fusion Protein
HGEGTFTSDKSKQLEKELVRLFYEWLKAGGHSKIKPPPKGGGGGGGSGGGGSGGGGSADKTHTCPPCPAPELLGGPSVFLFPPKPKDTLMISRTPEVTCVVVDVSHEDPEVKFNWYVDGVEVHNAKTKPREEQYNNASRVVSVLTVLHQDWLNGKEYKCKVSNKALPAPIEKTISKAKGQPREPQVYTLPPSRDELTKNQVSLTCLVKGFYPSDIAVEWESNGQPENNYKTTPPVLDSDGSFFLYSKLTVDKSRWQQGNVFSCSVMHEALHNHYTQKSLSLSPGGGGSGSAHPIPDSSPLLQFGGQVRQRYLYTDDACQTEAHLEIREDGTVGGAADQSPESLLQLKALKPGVIQILGVKTSRFLCQRPDGALYGSLHFDPEACSFRELLLEDGYNVYQSEAHGLPLHLCGNKSPHRDPAPRGPARFLPLPGLPPAPPEPPGILAPQPPDVGSSDPLSMVYPSQGRSPSYAS

SEQ ID NO: 3688 - protein, 474 aa, Artificial Sequence
  Fusion Protein
HGEGTFTSDKSKQLEKELVRLFYEWLKAGGHSKIKPPPKGGGGGGGSGGGGSGGGGSAESKYGPPCPPCPAPEFEGGPSVFLFPPKPKDTLMISRTPEVTCVVVDVSQEDPEVQFNWYVDGVEVHNAKTKPREEQFNSTYRVVSVLTVLHQDWLNGKEYKCKVSNKGLPSSIEKTISKAKGQPREPQVYTLPPSQEEMTKNQVSLTCLVKGFYPSDIAVEWESNGQPENNYKTTPPVLDSDGSFFLYSRLTVDKSRWQEGNVFSCSVMHEALHNHYTQKSLSLSLGGGGSGSAHPIPDSSPLLQFGGQVRQRYLYTDDACQTEAHLEIREDGTVGGAADQSPESLLQLKALKPGVIQILGVKTSRFLCQRPDGALYGSLHFDPEACSFRELLLEDGYNVYQSEAHGLPLHLPGCKSPHRDPAPRGPARFLPLPGLPPAPPEPPGILAPQPPDVGSSDPLSMVYPSQGRSPSYAS

SEQ ID NO: 3689 - protein, 473 aa, Artificial Sequence
  Fusion Protein
HGEGTFTSDKSKQLEKELVRLFYEWLKAGGHSKIKPPPKGGGGGGGSGGGGSGGGGSAESKYGPPCPPCPAPEFEGGPSVFLFPPKPKDTLMISRTPEVTCVVVDVSQEDPEVQFNWYVDGVEVHNAKTKPREEQFNSTYRVVSVLTVLHQDWLNGKEYKCKVSNKGLPSSIEKTISKAKGQPREPQVYTLPPSQEEMTKNQVSLTCLVKGFYPSDIAVEWESNGQPENNYKTTPPVLDSDGSFFLYSRLTVDKSRWQEGNVFSCSVMHEALHNHYTQKSLSLSLGGGGSGSAHPIPDSSPLLQFGGQVRQRYLYTDDACQTEAHLEIREDGTVGGAADQSPESLLQLKALKPGVIQILGVKTSRFLCQRPDGALYGSLHFDPEACSFRELLLEDGYNVYQSEAHGLPLHLCGNKSPHRDPAPRGPARFLPLPGLPPAPPEPPGILAPQPPDVGSSDPLSMVGSQGRSPSYAS

SEQ ID NO: 3690 - protein, 474 aa, Artificial Sequence
  Fusion Protein
HGEGTFTSDKSKQLEKELVRLFYEWLKAGGHSKIKPPPKGGGGGGGSGGGGSGGGGSAESKYGPPCPPCPAPEFEGGPSVFLFPPKPKDTLMISRTPEVTCVVVDVSQEDPEVQFNWYVDGVEVHNAKTKPREEQFNSTYRVVSVLTVLHQDWLNGKEYKCKVSNKGLPSSIEKTISKAKGQPREPQVYTLPPSQEEMTKNQVSLTCLVKGFYPSDIAVEWESNGQPENNYKTTPPVLDSDGSFFLYSRLTVDKSRWQEGNVFSCSVMHEALHNHYTQKSLSLSLGGGGSGSAHPIPDSSPLLQFGGQVRQRYLYTDDACQTEAHLEIREDGTVGGAADQSPESLLQLKALKPGVIQILGVKTSRFLCQRPDGALYGSLHFDPEACSFRELLLEDGYNVYQSEAHGLPLHLCGNKSPHRDPAPRGPARFLPLPGLPPAPPEPPGILAPQPPDVGSSDPLSMVYPSQGRSPSYAS

SEQ ID NO: 3691 - protein, 471 aa, Artificial Sequence
  Fusion Protein
YGEGTFTSDKSQLLEKRLAHLFIEWLIAGGHSSGKPPPKGGGGGGGSGGGGSGGGGSADKTHTCPPCPAPEAAGGPSVFLFPPKPKDTLMISRTPEVTCVVVDVSHEDPEVKFNWYVDGVEVHNAKTKPREEQYNSTYRVVSVLTVLHQDWLNGKEYKCKVSNKALPAPIEKTISKAKGQPREPQVYTLPPSRDELTKNQVSLTCLVKGFYPSDIAVEWESNGQPENNYKTTPPVLDSDGSFFLYSKLTVDKSRWQQGNVFSCSVMHEALHNHYTQKSLSLSPGGGGSGSAHPIPDSSPLLQFGGQVRQRYLYTDDACQTEAHLEIREDGTVGGAADQSPESLLQLKALKPGVIQILGVKTSRFLCQRPDGALYGSLHFDPEACSFRELLLEDGYNVYQSEAHGLPLHLPGCKSPHRDPAPRGPARFLPLPGLPPAPPEPPGILAPQPPDVGSSDPLSMVGSQGRSPSYAS

SEQ ID NO: 3692 - protein, 472 aa, Artificial Sequence
  Fusion Protein
YGEGTFTSDKSQLLEKRLAHLFIEWLIAGGHSSGKPPPKGGGGGGGSGGGGSGGGGSADKTHTCPPCPAPEAAGGPSVFLFPPKPKDTLMISRTPEVTCVVVDVSHEDPEVKFNWYVDGVEVHNAKTKPREEQYNSTYRVVSVLTVLHQDWLNGKEYKCKVSNKALPAPIEKTISKAKGQPREPQVYTLPPSRDELTKNQVSLTCLVKGFYPSDIAVEWESNGQPENNYKTTPPVLDSDGSFFLYSKLTVDKSRWQQGNVFSCSVMHEALHNHYTQKSLSLSPGGGGSGSAHPIPDSSPLLQFGGQVRQRYLYTDDACQTEAHLEIREDGTVGGAADQSPESLLQLKALKPGVIQILGVKTSRFLCQRPDGALYGSLHFDPEACSFRELLLEDGYNVYQSEAHGLPLHLPGCKSPHRDPAPRGPARFLPLPGLPPAPPEPPGILAPQPPDVGSSDPLSMVYPSQGRSPSYAS

SEQ ID NO: 3693 - protein, 471 aa, Artificial Sequence
  Fusion Protein
YGEGTFTSDKSQLLEKRLAHLFIEWLIAGGHSSGKPPPKGGGGGGGSGGGGSGGGGSADKTHTCPPCPAPEAAGGPSVFLFPPKPKDTLMISRTPEVTCVVVDVSHEDPEVKFNWYVDGVEVHNAKTKPREEQYNSTYRVVSVLTVLHQDWLNGKEYKCKVSNKALPAPIEKTISKAKGQPREPQVYTLPPSRDELTKNQVSLTCLVKGFYPSDIAVEWESNGQPENNYKTTPPVLDSDGSFFLYSKLTVDKSRWQQGNVFSCSVMHEALHNHYTQKSLSLSPGGGGSGSAHPIPDSSPLLQFGGQVRQRYLYTDDACQTEAHLEIREDGTVGGAADQSPESLLQLKALKPGVIQILGVKTSRFLCQRPDGALYGSLHFDPEACSFRELLLEDGYNVYQSEAHGLPLHLCGNKSPHRDPAPRGPARFLPLPGLPPAPPEPPGILAPQPPDVGSSDPLSMVGSQGRSPSYAS

SEQ ID NO: 3694 - protein, 472 aa, Artificial Sequence
  Fusion Protein
YGEGTFTSDKSQLLEKRLAHLFIEWLIAGGHSSGKPPPKGGGGGGGSGGGGSGGGGSADKTHTCPPCPAPEAAGGPSVFLFPPKPKDTLMISRTPEVTCVVVDVSHEDPEVKFNWYVDGVEVHNAKTKPREEQYNSTYRVVSVLTVLHQDWLNGKEYKCKVSNKALPAPIEKTISKAKGQPREPQVYTLPPSRDELTKNQVSLTCLVKGFYPSDIAVEWESNGQPENNYKTTPPVLDSDGSFFLYSKLTVDKSRWQQGNVFSCSVMHEALHNHYTQKSLSLSPGGGGSGSAHPIPDSSPLLQFGGQVRQRYLYTDDACQTEAHLEIREDGTVGGAADQSPESLLQLKALKPGVIQILGVKTSRFLCQRPDGALYGSLHFDPEACSFRELLLEDGYNVYQSEAHGLPLHLCGNKSPHRDPAPRGPARFLPLPGLPPAPPEPPGILAPQPPDVGSSDPLSMVYPSQGRSPSYAS

SEQ ID NO: 3695 - protein, 471 aa, Artificial Sequence
  Fusion Protein
YGEGTFTSDKSQLLEKRLAHLFIEWLIAGGHSSGKPPPKGGGGGGGSGGGGSGGGGSADKTHTCPPCPAPELLGGPSVFLFPPKPKDTLMISRTPEVTCVVVDVSHEDPEVKFNWYVDGVEVHNAKTKPREEQYNNASRVVSVLTVLHQDWLNGKEYKCKVSNKALPAPIEKTISKAKGQPREPQVYTLPPSRDELTKNQVSLTCLVKGFYPSDIAVEWESNGQPENNYKTTPPVLDSDGSFFLYSKLTVDKSRWQQGNVFSCSVMHEALHNHYTQKSLSLSPGGGGSGSAHPIPDSSPLLQFGGQVRQRYLYTDDACQTEAHLEIREDGTVGGAADQSPESLLQLKALKPGVIQILGVKTSRFLCQRPDGALYGSLHFDPEACSFRELLLEDGYNVYQSEAHGLPLHLPGCKSPHRDPAPRGPARFLPLPGLPPAPPEPPGILAPQPPDVGSSDPLSMVGSQGRSPSYAS

SEQ ID NO: 3696 - protein, 472 aa, Artificial Sequence
  Fusion Protein
YGEGTFTSDKSQLLEKRLAHLFIEWLIAGGHSSGKPPPKGGGGGGGSGGGGSGGGGSADKTHTCPPCPAPELLGGPSVFLFPPKPKDTLMISRTPEVTCVVVDVSHEDPEVKFNWYVDGVEVHNAKTKPREEQYNNASRVVSVLTVLHQDWLNGKEYKCKVSNKALPAPIEKTISKAKGQPREPQVYTLPPSRDELTKNQVSLTCLVKGFYPSDIAVEWESNGQPENNYKTTPPVLDSDGSFFLYSKLTVDKSRWQQGNVFSCSVMHEALHNHYTQKSLSLSPGGGGSGSAHPIPDSSPLLQFGGQVRQRYLYTDDACQTEAHLEIREDGTVGGAADQSPESLLQLKALKPGVIQILGVKTSRFLCQRPDGALYGSLHFDPEACSFRELLLEDGYNVYQSEAHGLPLHLPGCKSPHRDPAPRGPARFLPLPGLPPAPPEPPGILAPQPPDVGSSDPLSMVYPSQGRSPSYAS

SEQ ID NO: 3697 - protein, 471 aa, Artificial Sequence
  Fusion Protein
YGEGTFTSDKSQLLEKRLAHLFIEWLIAGGHSSGKPPPKGGGGGGGSGGGGSGGGGSADKTHTCPPCPAPELLGGPSVFLFPPKPKDTLMISRTPEVTCVVVDVSHEDPEVKFNWYVDGVEVHNAKTKPREEQYNNASRVVSVLTVLHQDWLNGKEYKCKVSNKALPAPIEKTISKAKGQPREPQVYTLPPSRDELTKNQVSLTCLVKGFYPSDIAVEWESNGQPENNYKTTPPVLDSDGSFFLYSKLTVDKSRWQQGNVFSCSVMHEALHNHYTQKSLSLSPGGGGSGSAHPIPDSSPLLQFGGQVRQRYLYTDDACQTEAHLEIREDGTVGGAADQSPESLLQLKALKPGVIQILGVKTSRFLCQRPDGALYGSLHFDPEACSFRELLLEDGYNVYQSEAHGLPLHLCGNKSPHRDPAPRGPARFLPLPGLPPAPPEPPGILAPQPPDVGSSDPLSMVGSQGRSPSYAS

SEQ ID NO: 3698 - protein, 472 aa, Artificial Sequence
  Fusion Protein
YGEGTFTSDKSQLLEKRLAHLFIEWLIAGGHSSGKPPPKGGGGGGGSGGGGSGGGGSADKTHTCPPCPAPELLGGPSVFLFPPKPKDTLMISRTPEVTCVVVDVSHEDPEVKFNWYVDGVEVHNAKTKPREEQYNNASRVVSVLTVLHQDWLNGKEYKCKVSNKALPAPIEKTISKAKGQPREPQVYTLPPSRDELTKNQVSLTCLVKGFYPSDIAVEWESNGQPENNYKTTPPVLDSDGSFFLYSKLTVDKSRWQQGNVFSCSVMHEALHNHYTQKSLSLSPGGGGSGSAHPIPDSSPLLQFGGQVRQRYLYTDDACQTEAHLEIREDGTVGGAADQSPESLLQLKALKPGVIQILGVKTSRFLCQRPDGALYGSLHFDPEACSFRELLLEDGYNVYQSEAHGLPLHLCGNKSPHRDPAPRGPARFLPLPGLPPAPPEPPGILAPQPPDVGSSDPLSMVYPSQGRSPSYAS

SEQ ID NO: 3699 - protein, 474 aa, Artificial Sequence
  Fusion Protein
YGEGTFTSDKSQLLEKRLAHLFIEWLIAGGHSSGKPPPKGGGGGGGSGGGGSGGGGSAESKYGPPCPPCPAPEFEGGPSVFLFPPKPKDTLMISRTPEVTCVVVDVSQEDPEVQFNWYVDGVEVHNAKTKPREEQFNSTYRVVSVLTVLHQDWLNGKEYKCKVSNKGLPSSIEKTISKAKGQPREPQVYTLPPSQEEMTKNQVSLTCLVKGFYPSDIAVEWESNGQPENNYKTTPPVLDSDGSFFLYSRLTVDKSRWQEGNVFSCSVMHEALHNHYTQKSLSLSLGGGGSGSAHPIPDSSPLLQFGGQVRQRYLYTDDACQTEAHLEIREDGTVGGAADQSPESLLQLKALKPGVIQILGVKTSRFLCQRPDGALYGSLHFDPEACSFRELLLEDGYNVYQSEAHGLPLHLPGCKSPHRDPAPRGPARFLPLPGLPPAPPEPPGILAPQPPDVGSSDPLSMVYPSQGRSPSYAS

SEQ ID NO: 3700 - protein, 473 aa, Artificial Sequence
  Fusion Protein
YGEGTFTSDKSQLLEKRLAHLFIEWLIAGGHSSGKPPPKGGGGGGGSGGGGSGGGGSAESKYGPPCPPCPAPEFEGGPSVFLFPPKPKDTLMISRTPEVTCVVVDVSQEDPEVQFNWYVDGVEVHNAKTKPREEQFNSTYRVVSVLTVLHQDWLNGKEYKCKVSNKGLPSSIEKTISKAKGQPREPQVYTLPPSQEEMTKNQVSLTCLVKGFYPSDIAVEWESNGQPENNYKTTPPVLDSDGSFFLYSRLTVDKSRWQEGNVFSCSVMHEALHNHYTQKSLSLSLGGGGSGSAHPIPDSSPLLQFGGQVRQRYLYTDDACQTEAHLEIREDGTVGGAADQSPESLLQLKALKPGVIQILGVKTSRFLCQRPDGALYGSLHFDPEACSFRELLLEDGYNVYQSEAHGLPLHLCGNKSPHRDPAPRGPARFLPLPGLPPAPPEPPGILAPQPPDVGSSDPLSMVGSQGRSPSYAS

SEQ ID NO: 3701 - protein, 474 aa, Artificial Sequence
  Fusion Protein
YGEGTFTSDKSQLLEKRLAHLFIEWLIAGGHSSGKPPPKGGGGGGGSGGGGSGGGGSAESKYGPPCPPCPAPEFEGGPSVFLFPPKPKDTLMISRTPEVTCVVVDVSQEDPEVQFNWYVDGVEVHNAKTKPREEQFNSTYRVVSVLTVLHQDWLNGKEYKCKVSNKGLPSSIEKTISKAKGQPREPQVYTLPPSQEEMTKNQVSLTCLVKGFYPSDIAVEWESNGQPENNYKTTPPVLDSDGSFFLYSRLTVDKSRWQEGNVFSCSVMHEALHNHYTQKSLSLSLGGGGSGSAHPIPDSSPLLQFGGQVRQRYLYTDDACQTEAHLEIREDGTVGGAADQSPESLLQLKALKPGVIQILGVKTSRFLCQRPDGALYGSLHFDPEACSFRELLLEDGYNVYQSEAHGLPLHLCGNKSPHRDPAPRGPARFLPLPGLPPAPPEPPGILAPQPPDVGSSDPLSMVYPSQGRSPSYAS

SEQ ID NO: 3702 - protein, 471 aa, Artificial Sequence
  Fusion Protein
HGEGTFTSDLSKQLEERLARLFYEWLIAGGHSSQKPPPKGGGGGGGSGGGGSGGGGSADKTHTCPPCPAPEAAGGPSVFLFPPKPKDTLMISRTPEVTCVVVDVSHEDPEVKFNWYVDGVEVHNAKTKPREEQYNSTYRVVSVLTVLHQDWLNGKEYKCKVSNKALPAPIEKTISKAKGQPREPQVYTLPPSRDELTKNQVSLTCLVKGFYPSDIAVEWESNGQPENNYKTTPPVLDSDGSFFLYSKLTVDKSRWQQGNVFSCSVMHEALHNHYTQKSLSLSPGGGGSGSAHPIPDSSPLLQFGGQVRQRYLYTDDACQTEAHLEIREDGTVGGAADQSPESLLQLKALKPGVIQILGVKTSRFLCQRPDGALYGSLHFDPEACSFRELLLEDGYNVYQSEAHGLPLHLPGCKSPHRDPAPRGPARFLPLPGLPPAPPEPPGILAPQPPDVGSSDPLSMVGSQGRSPSYAS

SEQ ID NO: 3703 - protein, 472 aa, Artificial Sequence
  Fusion Protein
HGEGTFTSDLSKQLEERLARLFYEWLIAGGHSSQKPPPKGGGGGGGSGGGGSGGGGSADKTHTCPPCPAPEAAGGPSVFLFPPKPKDTLMISRTPEVTCVVVDVSHEDPEVKFNWYVDGVEVHNAKTKPREEQYNSTYRVVSVLTVLHQDWLNGKEYKCKVSNKALPAPIEKTISKAKGQPREPQVYTLPPSRDELTKNQVSLTCLVKGFYPSDIAVEWESNGQPENNYKTTPPVLDSDGSFFLYSKLTVDKSRWQQGNVFSCSVMHEALHNHYTQKSLSLSPGGGGSGSAHPIPDSSPLLQFGGQVRQRYLYTDDACQTEAHLEIREDGTVGGAADQSPESLLQLKALKPGVIQILGVKTSRFLCQRPDGALYGSLHFDPEACSFRELLLEDGYNVYQSEAHGLPLHLPGCKSPHRDPAPRGPARFLPLPGLPPAPPEPPGILAPQPPDVGSSDPLSMVYPSQGRSPSYAS

SEQ ID NO: 3704 - protein, 471 aa, Artificial Sequence
  Fusion Protein
HGEGTFTSDLSKQLEERLARLFYEWLIAGGHSSQKPPPKGGGGGGGSGGGGSGGGGSADKTHTCPPCPAPEAAGGPSVFLFPPKPKDTLMISRTPEVTCVVVDVSHEDPEVKFNWYVDGVEVHNAKTKPREEQYNSTYRVVSVLTVLHQDWLNGKEYKCKVSNKALPAPIEKTISKAKGQPREPQVYTLPPSRDELTKNQVSLTCLVKGFYPSDIAVEWESNGQPENNYKTTPPVLDSDGSFFLYSKLTVDKSRWQQGNVFSCSVMHEALHNHYTQKSLSLSPGGGGSGSAHPIPDSSPLLQFGGQVRQRYLYTDDACQTEAHLEIREDGTVGGAADQSPESLLQLKALKPGVIQILGVKTSRFLCQRPDGALYGSLHFDPEACSFRELLLEDGYNVYQSEAHGLPLHLCGNKSPHRDPAPRGPARFLPLPGLPPAPPEPPGILAPQPPDVGSSDPLSMVGSQGRSPSYAS

SEQ ID NO: 3705 - protein, 472 aa, Artificial Sequence
  Fusion Protein
HGEGTFTSDLSKQLEERLARLFYEWLIAGGHSSQKPPPKGGGGGGGSGGGGSGGGGSADKTHTCPPCPAPEAAGGPSVFLFPPKPKDTLMISRTPEVTCVVVDVSHEDPEVKFNWYVDGVEVHNAKTKPREEQYNSTYRVVSVLTVLHQDWLNGKEYKCKVSNKALPAPIEKTISKAKGQPREPQVYTLPPSRDELTKNQVSLTCLVKGFYPSDIAVEWESNGQPENNYKTTPPVLDSDGSFFLYSKLTVDKSRWQQGNVFSCSVMHEALHNHYTQKSLSLSPGGGGSGSAHPIPDSSPLLQFGGQVRQRYLYTDDACQTEAHLEIREDGTVGGAADQSPESLLQLKALKPGVIQILGVKTSRFLCQRPDGALYGSLHFDPEACSFRELLLEDGYNVYQSEAHGLPLHLCGNKSPHRDPAPRGPARFLPLPGLPPAPPEPPGILAPQPPDVGSSDPLSMVYPSQGRSPSYAS

SEQ ID NO: 3706 - protein, 471 aa, Artificial Sequence
  Fusion Protein
HGEGTFTSDLSKQLEERLARLFYEWLIAGGHSSQKPPPKGGGGGGGSGGGGSGGGGSADKTHTCPPCPAPELLGGPSVFLFPPKPKDTLMISRTPEVTCVVVDVSHEDPEVKFNWYVDGVEVHNAKTKPREEQYNNASRVVSVLTVLHQDWLNGKEYKCKVSNKALPAPIEKTISKAKGQPREPQVYTLPPSRDELTKNQVSLTCLVKGFYPSDIAVEWESNGQPENNYKTTPPVLDSDGSFFLYSKLTVDKSRWQQGNVFSCSVMHEALHNHYTQKSLSLSPGGGGSGSAHPIPDSSPLLQFGGQVRQRYLYTDDACQTEAHLEIREDGTVGGAADQSPESLLQLKALKPGVIQILGVKTSRFLCQRPDGALYGSLHFDPEACSFRELLLEDGYNVYQSEAHGLPLHLPGCKSPHRDPAPRGPARFLPLPGLPPAPPEPPGILAPQPPDVGSSDPLSMVGSQGRSPSYAS

SEQ ID NO: 3707 - protein, 472 aa, Artificial Sequence
  Fusion Protein
HGEGTFTSDLSKQLEERLARLFYEWLIAGGHSSQKPPPKGGGGGGGSGGGGSGGGGSADKTHTCPPCPAPELLGGPSVFLFPPKPKDTLMISRTPEVTCVVVDVSHEDPEVKFNWYVDGVEVHNAKTKPREEQYNNASRVVSVLTVLHQDWLNGKEYKCKVSNKALPAPIEKTISKAKGQPREPQVYTLPPSRDELTKNQVSLTCLVKGFYPSDIAVEWESNGQPENNYKTTPPVLDSDGSFFLYSKLTVDKSRWQQGNVFSCSVMHEALHNHYTQKSLSLSPGGGGSGSAHPIPDSSPLLQFGGQVRQRYLYTDDACQTEAHLEIREDGTVGGAADQSPESLLQLKALKPGVIQILGVKTSRFLCQRPDGALYGSLHFDPEACSFRELLLEDGYNVYQSEAHGLPLHLPGCKSPHRDPAPRGPARFLPLPGLPPAPPEPPGILAPQPPDVGSSDPLSMVYPSQGRSPSYAS

SEQ ID NO: 3708 - protein, 471 aa, Artificial Sequence
  Fusion Protein
HGEGTFTSDLSKQLEERLARLFYEWLIAGGHSSQKPPPKGGGGGGGSGGGGSGGGGSADKTHTCPPCPAPELLGGPSVFLFPPKPKDTLMISRTPEVTCVVVDVSHEDPEVKFNWYVDGVEVHNAKTKPREEQYNNASRVVSVLTVLHQDWLNGKEYKCKVSNKALPAPIEKTISKAKGQPREPQVYTLPPSRDELTKNQVSLTCLVKGFYPSDIAVEWESNGQPENNYKTTPPVLDSDGSFFLYSKLTVDKSRWQQGNVFSCSVMHEALHNHYTQKSLSLSPGGGGSGSAHPIPDSSPLLQFGGQVRQRYLYTDDACQTEAHLEIREDGTVGGAADQSPESLLQLKALKPGVIQILGVKTSRFLCQRPDGALYGSLHFDPEACSFRELLLEDGYNVYQSEAHGLPLHLCGNKSPHRDPAPRGPARFLPLPGLPPAPPEPPGILAPQPPDVGSSDPLSMVGSQGRSPSYAS

SEQ ID NO: 3709 - protein, 472 aa, Artificial Sequence
  Fusion Protein
HGEGTFTSDLSKQLEERLARLFYEWLIAGGHSSQKPPPKGGGGGGGSGGGGSGGGGSADKTHTCPPCPAPELLGGPSVFLFPPKPKDTLMISRTPEVTCVVVDVSHEDPEVKFNWYVDGVEVHNAKTKPREEQYNNASRVVSVLTVLHQDWLNGKEYKCKVSNKALPAPIEKTISKAKGQPREPQVYTLPPSRDELTKNQVSLTCLVKGFYPSDIAVEWESNGQPENNYKTTPPVLDSDGSFFLYSKLTVDKSRWQQGNVFSCSVMHEALHNHYTQKSLSLSPGGGGSGSAHPIPDSSPLLQFGGQVRQRYLYTDDACQTEAHLEIREDGTVGGAADQSPESLLQLKALKPGVIQILGVKTSRFLCQRPDGALYGSLHFDPEACSFRELLLEDGYNVYQSEAHGLPLHLCGNKSPHRDPAPRGPARFLPLPGLPPAPPEPPGILAPQPPDVGSSDPLSMVYPSQGRSPSYAS

SEQ ID NO: 3710 - protein, 474 aa, Artificial Sequence
  Fusion Protein
HGEGTFTSDLSKQLEERLARLFYEWLIAGGHSSQKPPPKGGGGGGGSGGGGSGGGGSAESKYGPPCPPCPAPEFEGGPSVFLFPPKPKDTLMISRTPEVTCVVVDVSQEDPEVQFNWYVDGVEVHNAKTKPREEQFNSTYRVVSVLTVLHQDWLNGKEYKCKVSNKGLPSSIEKTISKAKGQPREPQVYTLPPSQEEMTKNQVSLTCLVKGFYPSDIAVEWESNGQPENNYKTTPPVLDSDGSFFLYSRLTVDKSRWQEGNVFSCSVMHEALHNHYTQKSLSLSLGGGGSGSAHPIPDSSPLLQFGGQVRQRYLYTDDACQTEAHLEIREDGTVGGAADQSPESLLQLKALKPGVIQILGVKTSRFLCQRPDGALYGSLHFDPEACSFRELLLEDGYNVYQSEAHGLPLHLPGCKSPHRDPAPRGPARFLPLPGLPPAPPEPPGILAPQPPDVGSSDPLSMVYPSQGRSPSYAS

SEQ ID NO: 3711 - protein, 473 aa, Artificial Sequence
  Fusion Protein
HGEGTFTSDLSKQLEERLARLFYEWLIAGGHSSQKPPPKGGGGGGGSGGGGSGGGGSAESKYGPPCPPCPAPEFEGGPSVFLFPPKPKDTLMISRTPEVTCVVVDVSQEDPEVQFNWYVDGVEVHNAKTKPREEQFNSTYRVVSVLTVLHQDWLNGKEYKCKVSNKGLPSSIEKTISKAKGQPREPQVYTLPPSQEEMTKNQVSLTCLVKGFYPSDIAVEWESNGQPENNYKTTPPVLDSDGSFFLYSRLTVDKSRWQEGNVFSCSVMHEALHNHYTQKSLSLSLGGGGSGSAHPIPDSSPLLQFGGQVRQRYLYTDDACQTEAHLEIREDGTVGGAADQSPESLLQLKALKPGVIQILGVKTSRFLCQRPDGALYGSLHFDPEACSFRELLLEDGYNVYQSEAHGLPLHLCGNKSPHRDPAPRGPARFLPLPGLPPAPPEPPGILAPQPPDVGSSDPLSMVGSQGRSPSYAS

SEQ ID NO: 3712 - protein, 474 aa, Artificial Sequence
  Fusion Protein
HGEGTFTSDLSKQLEERLARLFYEWLIAGGHSSQKPPPKGGGGGGGSGGGGSGGGGSAESKYGPPCPPCPAPEFEGGPSVFLFPPKPKDTLMISRTPEVTCVVVDVSQEDPEVQFNWYVDGVEVHNAKTKPREEQFNSTYRVVSVLTVLHQDWLNGKEYKCKVSNKGLPSSIEKTISKAKGQPREPQVYTLPPSQEEMTKNQVSLTCLVKGFYPSDIAVEWESNGQPENNYKTTPPVLDSDGSFFLYSRLTVDKSRWQEGNVFSCSVMHEALHNHYTQKSLSLSLGGGGSGSAHPIPDSSPLLQFGGQVRQRYLYTDDACQTEAHLEIREDGTVGGAADQSPESLLQLKALKPGVIQILGVKTSRFLCQRPDGALYGSLHFDPEACSFRELLLEDGYNVYQSEAHGLPLHLCGNKSPHRDPAPRGPARFLPLPGLPPAPPEPPGILAPQPPDVGSSDPLSMVYPSQGRSPSYAS

SEQ ID NO: 3713 - protein, 471 aa, Artificial Sequence
  Fusion Protein
HGEGTFTSDLSKQLEKELVRLFYEWLINGGHSSQKPPPKGGGGGGGSGGGGSGGGGSADKTHTCPPCPAPEAAGGPSVFLFPPKPKDTLMISRTPEVTCVVVDVSHEDPEVKFNWYVDGVEVHNAKTKPREEQYNSTYRVVSVLTVLHQDWLNGKEYKCKVSNKALPAPIEKTISKAKGQPREPQVYTLPPSRDELTKNQVSLTCLVKGFYPSDIAVEWESNGQPENNYKTTPPVLDSDGSFFLYSKLTVDKSRWQQGNVFSCSVMHEALHNHYTQKSLSLSPGGGGSGSAHPIPDSSPLLQFGGQVRQRYLYTDDACQTEAHLEIREDGTVGGAADQSPESLLQLKALKPGVIQILGVKTSRFLCQRPDGALYGSLHFDPEACSFRELLLEDGYNVYQSEAHGLPLHLPGCKSPHRDPAPRGPARFLPLPGLPPAPPEPPGILAPQPPDVGSSDPLSMVGSQGRSPSYAS

SEQ ID NO: 3714 - protein, 472 aa, Artificial Sequence
  Fusion Protein
HGEGTFTSDLSKQLEKELVRLFYEWLINGGHSSQKPPPKGGGGGGGSGGGGSGGGGSADKTHTCPPCPAPEAAGGPSVFLFPPKPKDTLMISRTPEVTCVVVDVSHEDPEVKFNWYVDGVEVHNAKTKPREEQYNSTYRVVSVLTVLHQDWLNGKEYKCKVSNKALPAPIEKTISKAKGQPREPQVYTLPPSRDELTKNQVSLTCLVKGFYPSDIAVEWESNGQPENNYKTTPPVLDSDGSFFLYSKLTVDKSRWQQGNVFSCSVMHEALHNHYTQKSLSLSPGGGGSGSAHPIPDSSPLLQFGGQVRQRYLYTDDACQTEAHLEIREDGTVGGAADQSPESLLQLKALKPGVIQILGVKTSRFLCQRPDGALYGSLHFDPEACSFRELLLEDGYNVYQSEAHGLPLHLPGCKSPHRDPAPRGPARFLPLPGLPPAPPEPPGILAPQPPDVGSSDPLSMVYPSQGRSPSYAS

SEQ ID NO: 3715 - protein, 471 aa, Artificial Sequence
  Fusion Protein
HGEGTFTSDLSKQLEKELVRLFYEWLINGGHSSQKPPPKGGGGGGGSGGGGSGGGGSADKTHTCPPCPAPEAAGGPSVFLFPPKPKDTLMISRTPEVTCVVVDVSHEDPEVKFNWYVDGVEVHNAKTKPREEQYNSTYRVVSVLTVLHQDWLNGKEYKCKVSNKALPAPIEKTISKAKGQPREPQVYTLPPSRDELTKNQVSLTCLVKGFYPSDIAVEWESNGQPENNYKTTPPVLDSDGSFFLYSKLTVDKSRWQQGNVFSCSVMHEALHNHYTQKSLSLSPGGGGSGSAHPIPDSSPLLQFGGQVRQRYLYTDDACQTEAHLEIREDGTVGGAADQSPESLLQLKALKPGVIQILGVKTSRFLCQRPDGALYGSLHFDPEACSFRELLLEDGYNVYQSEAHGLPLHLCGNKSPHRDPAPRGPARFLPLPGLPPAPPEPPGILAPQPPDVGSSDPLSMVGSQGRSPSYAS

SEQ ID NO: 3716 - protein, 472 aa, Artificial Sequence
  Fusion Protein
HGEGTFTSDLSKQLEKELVRLFYEWLINGGHSSQKPPPKGGGGGGGSGGGGSGGGGSADKTHTCPPCPAPEAAGGPSVFLFPPKPKDTLMISRTPEVTCVVVDVSHEDPEVKFNWYVDGVEVHNAKTKPREEQYNSTYRVVSVLTVLHQDWLNGKEYKCKVSNKALPAPIEKTISKAKGQPREPQVYTLPPSRDELTKNQVSLTCLVKGFYPSDIAVEWESNGQPENNYKTTPPVLDSDGSFFLYSKLTVDKSRWQQGNVFSCSVMHEALHNHYTQKSLSLSPGGGGSGSAHPIPDSSPLLQFGGQVRQRYLYTDDACQTEAHLEIREDGTVGGAADQSPESLLQLKALKPGVIQILGVKTSRFLCQRPDGALYGSLHFDPEACSFRELLLEDGYNVYQSEAHGLPLHLCGNKSPHRDPAPRGPARFLPLPGLPPAPPEPPGILAPQPPDVGSSDPLSMVYPSQGRSPSYAS

SEQ ID NO: 3717 - protein, 471 aa, Artificial Sequence
  Fusion Protein
HGEGTFTSDLSKQLEKELVRLFYEWLINGGHSSQKPPPKGGGGGGGSGGGGSGGGGSADKTHTCPPCPAPELLGGPSVFLFPPKPKDTLMISRTPEVTCVVVDVSHEDPEVKFNWYVDGVEVHNAKTKPREEQYNNASRVVSVLTVLHQDWLNGKEYKCKVSNKALPAPIEKTISKAKGQPREPQVYTLPPSRDELTKNQVSLTCLVKGFYPSDIAVEWESNGQPENNYKTTPPVLDSDGSFFLYSKLTVDKSRWQQGNVFSCSVMHEALHNHYTQKSLSLSPGGGGSGSAHPIPDSSPLLQFGGQVRQRYLYTDDACQTEAHLEIREDGTVGGAADQSPESLLQLKALKPGVIQILGVKTSRFLCQRPDGALYGSLHFDPEACSFRELLLEDGYNVYQSEAHGLPLHLPGCKSPHRDPAPRGPARFLPLPGLPPAPPEPPGILAPQPPDVGSSDPLSMVGSQGRSPSYAS

SEQ ID NO: 3718 - protein, 472 aa, Artificial Sequence
  Fusion Protein
HGEGTFTSDLSKQLEKELVRLFYEWLINGGHSSQKPPPKGGGGGGGSGGGGSGGGGSADKTHTCPPCPAPELLGGPSVFLFPPKPKDTLMISRTPEVTCVVVDVSHEDPEVKFNWYVDGVEVHNAKTKPREEQYNNASRVVSVLTVLHQDWLNGKEYKCKVSNKALPAPIEKTISKAKGQPREPQVYTLPPSRDELTKNQVSLTCLVKGFYPSDIAVEWESNGQPENNYKTTPPVLDSDGSFFLYSKLTVDKSRWQQGNVFSCSVMHEALHNHYTQKSLSLSPGGGGSGSAHPIPDSSPLLQFGGQVRQRYLYTDDACQTEAHLEIREDGTVGGAADQSPESLLQLKALKPGVIQILGVKTSRFLCQRPDGALYGSLHFDPEACSFRELLLEDGYNVYQSEAHGLPLHLPGCKSPHRDPAPRGPARFLPLPGLPPAPPEPPGILAPQPPDVGSSDPLSMVYPSQGRSPSYAS

SEQ ID NO: 3719 - protein, 471 aa, Artificial Sequence
  Fusion Protein
HGEGTFTSDLSKQLEKELVRLFYEWLINGGHSSQKPPPKGGGGGGGSGGGGSGGGGSADKTHTCPPCPAPELLGGPSVFLFPPKPKDTLMISRTPEVTCVVVDVSHEDPEVKFNWYVDGVEVHNAKTKPREEQYNNASRVVSVLTVLHQDWLNGKEYKCKVSNKALPAPIEKTISKAKGQPREPQVYTLPPSRDELTKNQVSLTCLVKGFYPSDIAVEWESNGQPENNYKTTPPVLDSDGSFFLYSKLTVDKSRWQQGNVFSCSVMHEALHNHYTQKSLSLSPGGGGSGSAHPIPDSSPLLQFGGQVRQRYLYTDDACQTEAHLEIREDGTVGGAADQSPESLLQLKALKPGVIQILGVKTSRFLCQRPDGALYGSLHFDPEACSFRELLLEDGYNVYQSEAHGLPLHLCGNKSPHRDPAPRGPARFLPLPGLPPAPPEPPGILAPQPPDVGSSDPLSMVGSQGRSPSYAS

SEQ ID NO: 3720 - protein, 472 aa, Artificial Sequence
  Fusion Protein
HGEGTFTSDLSKQLEKELVRLFYEWLINGGHSSQKPPPKGGGGGGGSGGGGSGGGGSADKTHTCPPCPAPELLGGPSVFLFPPKPKDTLMISRTPEVTCVVVDVSHEDPEVKFNWYVDGVEVHNAKTKPREEQYNNASRVVSVLTVLHQDWLNGKEYKCKVSNKALPAPIEKTISKAKGQPREPQVYTLPPSRDELTKNQVSLTCLVKGFYPSDIAVEWESNGQPENNYKTTPPVLDSDGSFFLYSKLTVDKSRWQQGNVFSCSVMHEALHNHYTQKSLSLSPGGGGSGSAHPIPDSSPLLQFGGQVRQRYLYTDDACQTEAHLEIREDGTVGGAADQSPESLLQLKALKPGVIQILGVKTSRFLCQRPDGALYGSLHFDPEACSFRELLLEDGYNVYQSEAHGLPLHLCGNKSPHRDPAPRGPARFLPLPGLPPAPPEPPGILAPQPPDVGSSDPLSMVYPSQGRSPSYAS

SEQ ID NO: 3721 - protein, 474 aa, Artificial Sequence
  Fusion Protein
HGEGTFTSDLSKQLEKELVRLFYEWLINGGHSSQKPPPKGGGGGGGSGGGGSGGGGSAESKYGPPCPPCPAPEFEGGPSVFLFPPKPKDTLMISRTPEVTCVVVDVSQEDPEVQFNWYVDGVEVHNAKTKPREEQFNSTYRVVSVLTVLHQDWLNGKEYKCKVSNKGLPSSIEKTISKAKGQPREPQVYTLPPSQEEMTKNQVSLTCLVKGFYPSDIAVEWESNGQPENNYKTTPPVLDSDGSFFLYSRLTVDKSRWQEGNVFSCSVMHEALHNHYTQKSLSLSLGGGGSGSAHPIPDSSPLLQFGGQVRQRYLYTDDACQTEAHLEIREDGTVGGAADQSPESLLQLKALKPGVIQILGVKTSRFLCQRPDGALYGSLHFDPEACSFRELLLEDGYNVYQSEAHGLPLHLPGCKSPHRDPAPRGPARFLPLPGLPPAPPEPPGILAPQPPDVGSSDPLSMVYPSQGRSPSYAS

SEQ ID NO: 3722 - protein, 473 aa, Artificial Sequence
  Fusion Protein
HGEGTFTSDLSKQLEKELVRLFYEWLINGGHSSQKPPPKGGGGGGGSGGGGSGGGGSAESKYGPPCPPCPAPEFEGGPSVFLFPPKPKDTLMISRTPEVTCVVVDVSQEDPEVQFNWYVDGVEVHNAKTKPREEQFNSTYRVVSVLTVLHQDWLNGKEYKCKVSNKGLPSSIEKTISKAKGQPREPQVYTLPPSQEEMTKNQVSLTCLVKGFYPSDIAVEWESNGQPENNYKTTPPVLDSDGSFFLYSRLTVDKSRWQEGNVFSCSVMHEALHNHYTQKSLSLSLGGGGSGSAHPIPDSSPLLQFGGQVRQRYLYTDDACQTEAHLEIREDGTVGGAADQSPESLLQLKALKPGVIQILGVKTSRFLCQRPDGALYGSLHFDPEACSFRELLLEDGYNVYQSEAHGLPLHLCGNKSPHRDPAPRGPARFLPLPGLPPAPPEPPGILAPQPPDVGSSDPLSMVGSQGRSPSYAS

SEQ ID NO: 3723 - protein, 474 aa, Artificial Sequence
  Fusion Protein
HGEGTFTSDLSKQLEKELVRLFYEWLINGGHSSQKPPPKGGGGGGGSGGGGSGGGGSAESKYGPPCPPCPAPEFEGGPSVFLFPPKPKDTLMISRTPEVTCVVVDVSQEDPEVQFNWYVDGVEVHNAKTKPREEQFNSTYRVVSVLTVLHQDWLNGKEYKCKVSNKGLPSSIEKTISKAKGQPREPQVYTLPPSQEEMTKNQVSLTCLVKGFYPSDIAVEWESNGQPENNYKTTPPVLDSDGSFFLYSRLTVDKSRWQEGNVFSCSVMHEALHNHYTQKSLSLSLGGGGSGSAHPIPDSSPLLQFGGQVRQRYLYTDDACQTEAHLEIREDGTVGGAADQSPESLLQLKALKPGVIQILGVKTSRFLCQRPDGALYGSLHFDPEACSFRELLLEDGYNVYQSEAHGLPLHLCGNKSPHRDPAPRGPARFLPLPGLPPAPPEPPGILAPQPPDVGSSDPLSMVYPSQGRSPSYAS

SEQ ID NO: 3724 - protein, 471 aa, Artificial Sequence
  Fusion Protein
HGEGTFTSDLSKQLEKELVRLFYEWLINGGHKSGKPPPKGGGGGGGSGGGGSGGGGSADKTHTCPPCPAPEAAGGPSVFLFPPKPKDTLMISRTPEVTCVVVDVSHEDPEVKFNWYVDGVEVHNAKTKPREEQYNSTYRVVSVLTVLHQDWLNGKEYKCKVSNKALPAPIEKTISKAKGQPREPQVYTLPPSRDELTKNQVSLTCLVKGFYPSDIAVEWESNGQPENNYKTTPPVLDSDGSFFLYSKLTVDKSRWQQGNVFSCSVMHEALHNHYTQKSLSLSPGGGGSGSAHPIPDSSPLLQFGGQVRQRYLYTDDACQTEAHLEIREDGTVGGAADQSPESLLQLKALKPGVIQILGVKTSRFLCQRPDGALYGSLHFDPEACSFRELLLEDGYNVYQSEAHGLPLHLPGCKSPHRDPAPRGPARFLPLPGLPPAPPEPPGILAPQPPDVGSSDPLSMVGSQGRSPSYAS

SEQ ID NO: 3725 - protein, 472 aa, Artificial Sequence
  Fusion Protein
HGEGTFTSDLSKQLEKELVRLFYEWLINGGHKSGKPPPKGGGGGGGSGGGGSGGGGSADKTHTCPPCPAPEAAGGPSVFLFPPKPKDTLMISRTPEVTCVVVDVSHEDPEVKFNWYVDGVEVHNAKTKPREEQYNSTYRVVSVLTVLHQDWLNGKEYKCKVSNKALPAPIEKTISKAKGQPREPQVYTLPPSRDELTKNQVSLTCLVKGFYPSDIAVEWESNGQPENNYKTTPPVLDSDGSFFLYSKLTVDKSRWQQGNVFSCSVMHEALHNHYTQKSLSLSPGGGGSGSAHPIPDSSPLLQFGGQVRQRYLYTDDACQTEAHLEIREDGTVGGAADQSPESLLQLKALKPGVIQILGVKTSRFLCQRPDGALYGSLHFDPEACSFRELLLEDGYNVYQSEAHGLPLHLPGCKSPHRDPAPRGPARFLPLPGLPPAPPEPPGILAPQPPDVGSSDPLSMVYPSQGRSPSYAS

SEQ ID NO: 3726 - protein, 471 aa, Artificial Sequence
  Fusion Protein
HGEGTFTSDLSKQLEKELVRLFYEWLINGGHKSGKPPPKGGGGGGGSGGGGSGGGGSADKTHTCPPCPAPEAAGGPSVFLFPPKPKDTLMISRTPEVTCVVVDVSHEDPEVKFNWYVDGVEVHNAKTKPREEQYNSTYRVVSVLTVLHQDWLNGKEYKCKVSNKALPAPIEKTISKAKGQPREPQVYTLPPSRDELTKNQVSLTCLVKGFYPSDIAVEWESNGQPENNYKTTPPVLDSDGSFFLYSKLTVDKSRWQQGNVFSCSVMHEALHNHYTQKSLSLSPGGGGSGSAHPIPDSSPLLQFGGQVRQRYLYTDDACQTEAHLEIREDGTVGGAADQSPESLLQLKALKPGVIQILGVKTSRFLCQRPDGALYGSLHFDPEACSFRELLLEDGYNVYQSEAHGLPLHLCGNKSPHRDPAPRGPARFLPLPGLPPAPPEPPGILAPQPPDVGSSDPLSMVGSQGRSPSYAS

SEQ ID NO: 3727 - protein, 472 aa, Artificial Sequence
  Fusion Protein
HGEGTFTSDLSKQLEKELVRLFYEWLINGGHKSGKPPPKGGGGGGGSGGGGSGGGGSADKTHTCPPCPAPEAAGGPSVFLFPPKPKDTLMISRTPEVTCVVVDVSHEDPEVKFNWYVDGVEVHNAKTKPREEQYNSTYRVVSVLTVLHQDWLNGKEYKCKVSNKALPAPIEKTISKAKGQPREPQVYTLPPSRDELTKNQVSLTCLVKGFYPSDIAVEWESNGQPENNYKTTPPVLDSDGSFFLYSKLTVDKSRWQQGNVFSCSVMHEALHNHYTQKSLSLSPGGGGSGSAHPIPDSSPLLQFGGQVRQRYLYTDDACQTEAHLEIREDGTVGGAADQSPESLLQLKALKPGVIQILGVKTSRFLCQRPDGALYGSLHFDPEACSFRELLLEDGYNVYQSEAHGLPLHLCGNKSPHRDPAPRGPARFLPLPGLPPAPPEPPGILAPQPPDVGSSDPLSMVYPSQGRSPSYAS

SEQ ID NO: 3728 - protein, 471 aa, Artificial Sequence
  Fusion Protein
HGEGTFTSDLSKQLEKELVRLFYEWLINGGHKSGKPPPKGGGGGGGSGGGGSGGGGSADKTHTCPPCPAPELLGGPSVFLFPPKPKDTLMISRTPEVTCVVVDVSHEDPEVKFNWYVDGVEVHNAKTKPREEQYNNASRVVSVLTVLHQDWLNGKEYKCKVSNKALPAPIEKTISKAKGQPREPQVYTLPPSRDELTKNQVSLTCLVKGFYPSDIAVEWESNGQPENNYKTTPPVLDSDGSFFLYSKLTVDKSRWQQGNVFSCSVMHEALHNHYTQKSLSLSPGGGGSGSAHPIPDSSPLLQFGGQVRQRYLYTDDACQTEAHLEIREDGTVGGAADQSPESLLQLKALKPGVIQILGVKTSRFLCQRPDGALYGSLHFDPEACSFRELLLEDGYNVYQSEAHGLPLHLPGCKSPHRDPAPRGPARFLPLPGLPPAPPEPPGILAPQPPDVGSSDPLSMVGSQGRSPSYAS

SEQ ID NO: 3729 - protein, 472 aa, Artificial Sequence
  Fusion Protein
HGEGTFTSDLSKQLEKELVRLFYEWLINGGHKSGKPPPKGGGGGGGSGGGGSGGGGSADKTHTCPPCPAPELLGGPSVFLFPPKPKDTLMISRTPEVTCVVVDVSHEDPEVKFNWYVDGVEVHNAKTKPREEQYNNASRVVSVLTVLHQDWLNGKEYKCKVSNKALPAPIEKTISKAKGQPREPQVYTLPPSRDELTKNQVSLTCLVKGFYPSDIAVEWESNGQPENNYKTTPPVLDSDGSFFLYSKLTVDKSRWQQGNVFSCSVMHEALHNHYTQKSLSLSPGGGGSGSAHPIPDSSPLLQFGGQVRQRYLYTDDACQTEAHLEIREDGTVGGAADQSPESLLQLKALKPGVIQILGVKTSRFLCQRPDGALYGSLHFDPEACSFRELLLEDGYNVYQSEAHGLPLHLPGCKSPHRDPAPRGPARFLPLPGLPPAPPEPPGILAPQPPDVGSSDPLSMVYPSQGRSPSYAS

SEQ ID NO: 3730 - protein, 471 aa, Artificial Sequence
  Fusion Protein
HGEGTFTSDLSKQLEKELVRLFYEWLINGGHKSGKPPPKGGGGGGGSGGGGSGGGGSADKTHTCPPCPAPELLGGPSVFLFPPKPKDTLMISRTPEVTCVVVDVSHEDPEVKFNWYVDGVEVHNAKTKPREEQYNNASRVVSVLTVLHQDWLNGKEYKCKVSNKALPAPIEKTISKAKGQPREPQVYTLPPSRDELTKNQVSLTCLVKGFYPSDIAVEWESNGQPENNYKTTPPVLDSDGSFFLYSKLTVDKSRWQQGNVFSCSVMHEALHNHYTQKSLSLSPGGGGSGSAHPIPDSSPLLQFGGQVRQRYLYTDDACQTEAHLEIREDGTVGGAADQSPESLLQLKALKPGVIQILGVKTSRFLCQRPDGALYGSLHFDPEACSFRELLLEDGYNVYQSEAHGLPLHLCGNKSPHRDPAPRGPARFLPLPGLPPAPPEPPGILAPQPPDVGSSDPLSMVGSQGRSPSYAS

SEQ ID NO: 3731 - protein, 472 aa, Artificial Sequence
  Fusion Protein
HGEGTFTSDLSKQLEKELVRLFYEWLINGGHKSGKPPPKGGGGGGGSGGGGSGGGGSADKTHTCPPCPAPELLGGPSVFLFPPKPKDTLMISRTPEVTCVVVDVSHEDPEVKFNWYVDGVEVHNAKTKPREEQYNNASRVVSVLTVLHQDWLNGKEYKCKVSNKALPAPIEKTISKAKGQPREPQVYTLPPSRDELTKNQVSLTCLVKGFYPSDIAVEWESNGQPENNYKTTPPVLDSDGSFFLYSKLTVDKSRWQQGNVFSCSVMHEALHNHYTQKSLSLSPGGGGSGSAHPIPDSSPLLQFGGQVRQRYLYTDDACQTEAHLEIREDGTVGGAADQSPESLLQLKALKPGVIQILGVKTSRFLCQRPDGALYGSLHFDPEACSFRELLLEDGYNVYQSEAHGLPLHLCGNKSPHRDPAPRGPARFLPLPGLPPAPPEPPGILAPQPPDVGSSDPLSMVYPSQGRSPSYAS

SEQ ID NO: 3732 - protein, 474 aa, Artificial Sequence
  Fusion Protein
HGEGTFTSDLSKQLEKELVRLFYEWLINGGHKSGKPPPKGGGGGGGSGGGGSGGGGSAESKYGPPCPPCPAPEFEGGPSVFLFPPKPKDTLMISRTPEVTCVVVDVSQEDPEVQFNWYVDGVEVHNAKTKPREEQFNSTYRVVSVLTVLHQDWLNGKEYKCKVSNKGLPSSIEKTISKAKGQPREPQVYTLPPSQEEMTKNQVSLTCLVKGFYPSDIAVEWESNGQPENNYKTTPPVLDSDGSFFLYSRLTVDKSRWQEGNVFSCSVMHEALHNHYTQKSLSLSLGGGGSGSAHPIPDSSPLLQFGGQVRQRYLYTDDACQTEAHLEIREDGTVGGAADQSPESLLQLKALKPGVIQILGVKTSRFLCQRPDGALYGSLHFDPEACSFRELLLEDGYNVYQSEAHGLPLHLPGCKSPHRDPAPRGPARFLPLPGLPPAPPEPPGILAPQPPDVGSSDPLSMVYPSQGRSPSYAS

SEQ ID NO: 3733 - protein, 473 aa, Artificial Sequence
  Fusion Protein
HGEGTFTSDLSKQLEKELVRLFYEWLINGGHKSGKPPPKGGGGGGGSGGGGSGGGGSAESKYGPPCPPCPAPEFEGGPSVFLFPPKPKDTLMISRTPEVTCVVVDVSQEDPEVQFNWYVDGVEVHNAKTKPREEQFNSTYRVVSVLTVLHQDWLNGKEYKCKVSNKGLPSSIEKTISKAKGQPREPQVYTLPPSQEEMTKNQVSLTCLVKGFYPSDIAVEWESNGQPENNYKTTPPVLDSDGSFFLYSRLTVDKSRWQEGNVFSCSVMHEALHNHYTQKSLSLSLGGGGSGSAHPIPDSSPLLQFGGQVRQRYLYTDDACQTEAHLEIREDGTVGGAADQSPESLLQLKALKPGVIQILGVKTSRFLCQRPDGALYGSLHFDPEACSFRELLLEDGYNVYQSEAHGLPLHLCGNKSPHRDPAPRGPARFLPLPGLPPAPPEPPGILAPQPPDVGSSDPLSMVGSQGRSPSYAS

SEQ ID NO: 3734 - protein, 474 aa, Artificial Sequence
  Fusion Protein
HGEGTFTSDLSKQLEKELVRLFYEWLINGGHKSGKPPPKGGGGGGGSGGGGSGGGGSAESKYGPPCPPCPAPEFEGGPSVFLFPPKPKDTLMISRTPEVTCVVVDVSQEDPEVQFNWYVDGVEVHNAKTKPREEQFNSTYRVVSVLTVLHQDWLNGKEYKCKVSNKGLPSSIEKTISKAKGQPREPQVYTLPPSQEEMTKNQVSLTCLVKGFYPSDIAVEWESNGQPENNYKTTPPVLDSDGSFFLYSRLTVDKSRWQEGNVFSCSVMHEALHNHYTQKSLSLSLGGGGSGSAHPIPDSSPLLQFGGQVRQRYLYTDDACQTEAHLEIREDGTVGGAADQSPESLLQLKALKPGVIQILGVKTSRFLCQRPDGALYGSLHFDPEACSFRELLLEDGYNVYQSEAHGLPLHLCGNKSPHRDPAPRGPARFLPLPGLPPAPPEPPGILAPQPPDVGSSDPLSMVYPSQGRSPSYAS

SEQ ID NO: 3735 - protein, 471 aa, Artificial Sequence
  Fusion Protein
HGEGTFTSDLSKQLEKELVRLFYEWLINGGHSKGKPPPKGGGGGGGSGGGGSGGGGSADKTHTCPPCPAPEAAGGPSVFLFPPKPKDTLMISRTPEVTCVVVDVSHEDPEVKFNWYVDGVEVHNAKTKPREEQYNSTYRVVSVLTVLHQDWLNGKEYKCKVSNKALPAPIEKTISKAKGQPREPQVYTLPPSRDELTKNQVSLTCLVKGFYPSDIAVEWESNGQPENNYKTTPPVLDSDGSFFLYSKLTVDKSRWQQGNVFSCSVMHEALHNHYTQKSLSLSPGGGGSGSAHPIPDSSPLLQFGGQVRQRYLYTDDACQTEAHLEIREDGTVGGAADQSPESLLQLKALKPGVIQILGVKTSRFLCQRPDGALYGSLHFDPEACSFRELLLEDGYNVYQSEAHGLPLHLPGCKSPHRDPAPRGPARFLPLPGLPPAPPEPPGILAPQPPDVGSSDPLSMVGSQGRSPSYAS

SEQ ID NO: 3736 - protein, 472 aa, Artificial Sequence
  Fusion Protein
HGEGTFTSDLSKQLEKELVRLFYEWLINGGHSKGKPPPKGGGGGGGSGGGGSGGGGSADKTHTCPPCPAPEAAGGPSVFLFPPKPKDTLMISRTPEVTCVVVDVSHEDPEVKFNWYVDGVEVHNAKTKPREEQYNSTYRVVSVLTVLHQDWLNGKEYKCKVSNKALPAPIEKTISKAKGQPREPQVYTLPPSRDELTKNQVSLTCLVKGFYPSDIAVEWESNGQPENNYKTTPPVLDSDGSFFLYSKLTVDKSRWQQGNVFSCSVMHEALHNHYTQKSLSLSPGGGGSGSAHPIPDSSPLLQFGGQVRQRYLYTDDACQTEAHLEIREDGTVGGAADQSPESLLQLKALKPGVIQILGVKTSRFLCQRPDGALYGSLHFDPEACSFRELLLEDGYNVYQSEAHGLPLHLPGCKSPHRDPAPRGPARFLPLPGLPPAPPEPPGILAPQPPDVGSSDPLSMVYPSQGRSPSYAS

SEQ ID NO: 3737 - protein, 471 aa, Artificial Sequence
  Fusion Protein
HGEGTFTSDLSKQLEKELVRLFYEWLINGGHSKGKPPPKGGGGGGGSGGGGSGGGGSADKTHTCPPCPAPEAAGGPSVFLFPPKPKDTLMISRTPEVTCVVVDVSHEDPEVKFNWYVDGVEVHNAKTKPREEQYNSTYRVVSVLTVLHQDWLNGKEYKCKVSNKALPAPIEKTISKAKGQPREPQVYTLPPSRDELTKNQVSLTCLVKGFYPSDIAVEWESNGQPENNYKTTPPVLDSDGSFFLYSKLTVDKSRWQQGNVFSCSVMHEALHNHYTQKSLSLSPGGGGSGSAHPIPDSSPLLQFGGQVRQRYLYTDDACQTEAHLEIREDGTVGGAADQSPESLLQLKALKPGVIQILGVKTSRFLCQRPDGALYGSLHFDPEACSFRELLLEDGYNVYQSEAHGLPLHLCGNKSPHRDPAPRGPARFLPLPGLPPAPPEPPGILAPQPPDVGSSDPLSMVGSQGRSPSYAS

SEQ ID NO: 3738 - protein, 472 aa, Artificial Sequence
  Fusion Protein
HGEGTFTSDLSKQLEKELVRLFYEWLINGGHSKGKPPPKGGGGGGGSGGGGSGGGGSADKTHTCPPCPAPEAAGGPSVFLFPPKPKDTLMISRTPEVTCVVVDVSHEDPEVKFNWYVDGVEVHNAKTKPREEQYNSTYRVVSVLTVLHQDWLNGKEYKCKVSNKALPAPIEKTISKAKGQPREPQVYTLPPSRDELTKNQVSLTCLVKGFYPSDIAVEWESNGQPENNYKTTPPVLDSDGSFFLYSKLTVDKSRWQQGNVFSCSVMHEALHNHYTQKSLSLSPGGGGSGSAHPIPDSSPLLQFGGQVRQRYLYTDDACQTEAHLEIREDGTVGGAADQSPESLLQLKALKPGVIQILGVKTSRFLCQRPDGALYGSLHFDPEACSFRELLLEDGYNVYQSEAHGLPLHLCGNKSPHRDPAPRGPARFLPLPGLPPAPPEPPGILAPQPPDVGSSDPLSMVYPSQGRSPSYAS

SEQ ID NO: 3739 - protein, 471 aa, Artificial Sequence
  Fusion Protein
HGEGTFTSDLSKQLEKELVRLFYEWLINGGHSKGKPPPKGGGGGGGSGGGGSGGGGSADKTHTCPPCPAPELLGGPSVFLFPPKPKDTLMISRTPEVTCVVVDVSHEDPEVKFNWYVDGVEVHNAKTKPREEQYNNASRVVSVLTVLHQDWLNGKEYKCKVSNKALPAPIEKTISKAKGQPREPQVYTLPPSRDELTKNQVSLTCLVKGFYPSDIAVEWESNGQPENNYKTTPPVLDSDGSFFLYSKLTVDKSRWQQGNVFSCSVMHEALHNHYTQKSLSLSPGGGGSGSAHPIPDSSPLLQFGGQVRQRYLYTDDACQTEAHLEIREDGTVGGAADQSPESLLQLKALKPGVIQILGVKTSRFLCQRPDGALYGSLHFDPEACSFRELLLEDGYNVYQSEAHGLPLHLPGCKSPHRDPAPRGPARFLPLPGLPPAPPEPPGILAPQPPDVGSSDPLSMVGSQGRSPSYAS

SEQ ID NO: 3740 - protein, 472 aa, Artificial Sequence
  Fusion Protein
HGEGTFTSDLSKQLEKELVRLFYEWLINGGHSKGKPPPKGGGGGGGSGGGGSGGGGSADKTHTCPPCPAPELLGGPSVFLFPPKPKDTLMISRTPEVTCVVVDVSHEDPEVKFNWYVDGVEVHNAKTKPREEQYNNASRVVSVLTVLHQDWLNGKEYKCKVSNKALPAPIEKTISKAKGQPREPQVYTLPPSRDELTKNQVSLTCLVKGFYPSDIAVEWESNGQPENNYKTTPPVLDSDGSFFLYSKLTVDKSRWQQGNVFSCSVMHEALHNHYTQKSLSLSPGGGGSGSAHPIPDSSPLLQFGGQVRQRYLYTDDACQTEAHLEIREDGTVGGAADQSPESLLQLKALKPGVIQILGVKTSRFLCQRPDGALYGSLHFDPEACSFRELLLEDGYNVYQSEAHGLPLHLPGCKSPHRDPAPRGPARFLPLPGLPPAPPEPPGILAPQPPDVGSSDPLSMVYPSQGRSPSYAS

SEQ ID NO: 3741 - protein, 471 aa, Artificial Sequence
  Fusion Protein
HGEGTFTSDLSKQLEKELVRLFYEWLINGGHSKGKPPPKGGGGGGGSGGGGSGGGGSADKTHTCPPCPAPELLGGPSVFLFPPKPKDTLMISRTPEVTCVVVDVSHEDPEVKFNWYVDGVEVHNAKTKPREEQYNNASRVVSVLTVLHQDWLNGKEYKCKVSNKALPAPIEKTISKAKGQPREPQVYTLPPSRDELTKNQVSLTCLVKGFYPSDIAVEWESNGQPENNYKTTPPVLDSDGSFFLYSKLTVDKSRWQQGNVFSCSVMHEALHNHYTQKSLSLSPGGGGSGSAHPIPDSSPLLQFGGQVRQRYLYTDDACQTEAHLEIREDGTVGGAADQSPESLLQLKALKPGVIQILGVKTSRFLCQRPDGALYGSLHFDPEACSFRELLLEDGYNVYQSEAHGLPLHLCGNKSPHRDPAPRGPARFLPLPGLPPAPPEPPGILAPQPPDVGSSDPLSMVGSQGRSPSYAS

SEQ ID NO: 3742 - protein, 472 aa, Artificial Sequence
  Fusion Protein
HGEGTFTSDLSKQLEKELVRLFYEWLINGGHSKGKPPPKGGGGGGGSGGGGSGGGGSADKTHTCPPCPAPELLGGPSVFLFPPKPKDTLMISRTPEVTCVVVDVSHEDPEVKFNWYVDGVEVHNAKTKPREEQYNNASRVVSVLTVLHQDWLNGKEYKCKVSNKALPAPIEKTISKAKGQPREPQVYTLPPSRDELTKNQVSLTCLVKGFYPSDIAVEWESNGQPENNYKTTPPVLDSDGSFFLYSKLTVDKSRWQQGNVFSCSVMHEALHNHYTQKSLSLSPGGGGSGSAHPIPDSSPLLQFGGQVRQRYLYTDDACQTEAHLEIREDGTVGGAADQSPESLLQLKALKPGVIQILGVKTSRFLCQRPDGALYGSLHFDPEACSFRELLLEDGYNVYQSEAHGLPLHLCGNKSPHRDPAPRGPARFLPLPGLPPAPPEPPGILAPQPPDVGSSDPLSMVYPSQGRSPSYAS

SEQ ID NO: 3743 - protein, 474 aa, Artificial Sequence
  Fusion Protein
HGEGTFTSDLSKQLEKELVRLFYEWLINGGHSKGKPPPKGGGGGGGSGGGGSGGGGSAESKYGPPCPPCPAPEFEGGPSVFLFPPKPKDTLMISRTPEVTCVVVDVSQEDPEVQFNWYVDGVEVHNAKTKPREEQFNSTYRVVSVLTVLHQDWLNGKEYKCKVSNKGLPSSIEKTISKAKGQPREPQVYTLPPSQEEMTKNQVSLTCLVKGFYPSDIAVEWESNGQPENNYKTTPPVLDSDGSFFLYSRLTVDKSRWQEGNVFSCSVMHEALHNHYTQKSLSLSLGGGGSGSAHPIPDSSPLLQFGGQVRQRYLYTDDACQTEAHLEIREDGTVGGAADQSPESLLQLKALKPGVIQILGVKTSRFLCQRPDGALYGSLHFDPEACSFRELLLEDGYNVYQSEAHGLPLHLPGCKSPHRDPAPRGPARFLPLPGLPPAPPEPPGILAPQPPDVGSSDPLSMVYPSQGRSPSYAS

SEQ ID NO: 3744 - protein, 473 aa, Artificial Sequence
  Fusion Protein
HGEGTFTSDLSKQLEKELVRLFYEWLINGGHSKGKPPPKGGGGGGGSGGGGSGGGGSAESKYGPPCPPCPAPEFEGGPSVFLFPPKPKDTLMISRTPEVTCVVVDVSQEDPEVQFNWYVDGVEVHNAKTKPREEQFNSTYRVVSVLTVLHQDWLNGKEYKCKVSNKGLPSSIEKTISKAKGQPREPQVYTLPPSQEEMTKNQVSLTCLVKGFYPSDIAVEWESNGQPENNYKTTPPVLDSDGSFFLYSRLTVDKSRWQEGNVFSCSVMHEALHNHYTQKSLSLSLGGGGSGSAHPIPDSSPLLQFGGQVRQRYLYTDDACQTEAHLEIREDGTVGGAADQSPESLLQLKALKPGVIQILGVKTSRFLCQRPDGALYGSLHFDPEACSFRELLLEDGYNVYQSEAHGLPLHLCGNKSPHRDPAPRGPARFLPLPGLPPAPPEPPGILAPQPPDVGSSDPLSMVGSQGRSPSYAS

SEQ ID NO: 3745 - protein, 474 aa, Artificial Sequence
  Fusion Protein
HGEGTFTSDLSKQLEKELVRLFYEWLINGGHSKGKPPPKGGGGGGGSGGGGSGGGGSAESKYGPPCPPCPAPEFEGGPSVFLFPPKPKDTLMISRTPEVTCVVVDVSQEDPEVQFNWYVDGVEVHNAKTKPREEQFNSTYRVVSVLTVLHQDWLNGKEYKCKVSNKGLPSSIEKTISKAKGQPREPQVYTLPPSQEEMTKNQVSLTCLVKGFYPSDIAVEWESNGQPENNYKTTPPVLDSDGSFFLYSRLTVDKSRWQEGNVFSCSVMHEALHNHYTQKSLSLSLGGGGSGSAHPIPDSSPLLQFGGQVRQRYLYTDDACQTEAHLEIREDGTVGGAADQSPESLLQLKALKPGVIQILGVKTSRFLCQRPDGALYGSLHFDPEACSFRELLLEDGYNVYQSEAHGLPLHLCGNKSPHRDPAPRGPARFLPLPGLPPAPPEPPGILAPQPPDVGSSDPLSMVYPSQGRSPSYAS

SEQ ID NO: 3746 - protein, 471 aa, Artificial Sequence
  Fusion Protein
HGEGTFTSDLSKQLEKELVRLFYEWLINGGPSSGKPPPKGGGGGGGSGGGGSGGGGSADKTHTCPPCPAPEAAGGPSVFLFPPKPKDTLMISRTPEVTCVVVDVSHEDPEVKFNWYVDGVEVHNAKTKPREEQYNSTYRVVSVLTVLHQDWLNGKEYKCKVSNKALPAPIEKTISKAKGQPREPQVYTLPPSRDELTKNQVSLTCLVKGFYPSDIAVEWESNGQPENNYKTTPPVLDSDGSFFLYSKLTVDKSRWQQGNVFSCSVMHEALHNHYTQKSLSLSPGGGGSGSAHPIPDSSPLLQFGGQVRQRYLYTDDACQTEAHLEIREDGTVGGAADQSPESLLQLKALKPGVIQILGVKTSRFLCQRPDGALYGSLHFDPEACSFRELLLEDGYNVYQSEAHGLPLHLPGCKSPHRDPAPRGPARFLPLPGLPPAPPEPPGILAPQPPDVGSSDPLSMVGSQGRSPSYAS

SEQ ID NO: 3747 - protein, 472 aa, Artificial Sequence
  Fusion Protein
HGEGTFTSDLSKQLEKELVRLFYEWLINGGPSSGKPPPKGGGGGGGSGGGGSGGGGSADKTHTCPPCPAPEAAGGPSVFLFPPKPKDTLMISRTPEVTCVVVDVSHEDPEVKFNWYVDGVEVHNAKTKPREEQYNSTYRVVSVLTVLHQDWLNGKEYKCKVSNKALPAPIEKTISKAKGQPREPQVYTLPPSRDELTKNQVSLTCLVKGFYPSDIAVEWESNGQPENNYKTTPPVLDSDGSFFLYSKLTVDKSRWQQGNVFSCSVMHEALHNHYTQKSLSLSPGGGGSGSAHPIPDSSPLLQFGGQVRQRYLYTDDACQTEAHLEIREDGTVGGAADQSPESLLQLKALKPGVIQILGVKTSRFLCQRPDGALYGSLHFDPEACSFRELLLEDGYNVYQSEAHGLPLHLPGCKSPHRDPAPRGPARFLPLPGLPPAPPEPPGILAPQPPDVGSSDPLSMVYPSQGRSPSYAS

SEQ ID NO: 3748 - protein, 471 aa, Artificial Sequence
  Fusion Protein
HGEGTFTSDLSKQLEKELVRLFYEWLINGGPSSGKPPPKGGGGGGGSGGGGSGGGGSADKTHTCPPCPAPEAAGGPSVFLFPPKPKDTLMISRTPEVTCVVVDVSHEDPEVKFNWYVDGVEVHNAKTKPREEQYNSTYRVVSVLTVLHQDWLNGKEYKCKVSNKALPAPIEKTISKAKGQPREPQVYTLPPSRDELTKNQVSLTCLVKGFYPSDIAVEWESNGQPENNYKTTPPVLDSDGSFFLYSKLTVDKSRWQQGNVFSCSVMHEALHNHYTQKSLSLSPGGGGSGSAHPIPDSSPLLQFGGQVRQRYLYTDDACQTEAHLEIREDGTVGGAADQSPESLLQLKALKPGVIQILGVKTSRFLCQRPDGALYGSLHFDPEACSFRELLLEDGYNVYQSEAHGLPLHLCGNKSPHRDPAPRGPARFLPLPGLPPAPPEPPGILAPQPPDVGSSDPLSMVGSQGRSPSYAS

SEQ ID NO: 3749 - protein, 472 aa, Artificial Sequence
  Fusion Protein
HGEGTFTSDLSKQLEKELVRLFYEWLINGGPSSGKPPPKGGGGGGGSGGGGSGGGGSADKTHTCPPCPAPEAAGGPSVFLFPPKPKDTLMISRTPEVTCVVVDVSHEDPEVKFNWYVDGVEVHNAKTKPREEQYNSTYRVVSVLTVLHQDWLNGKEYKCKVSNKALPAPIEKTISKAKGQPREPQVYTLPPSRDELTKNQVSLTCLVKGFYPSDIAVEWESNGQPENNYKTTPPVLDSDGSFFLYSKLTVDKSRWQQGNVFSCSVMHEALHNHYTQKSLSLSPGGGGSGSAHPIPDSSPLLQFGGQVRQRYLYTDDACQTEAHLEIREDGTVGGAADQSPESLLQLKALKPGVIQILGVKTSRFLCQRPDGALYGSLHFDPEACSFRELLLEDGYNVYQSEAHGLPLHLCGNKSPHRDPAPRGPARFLPLPGLPPAPPEPPGILAPQPPDVGSSDPLSMVYPSQGRSPSYAS

SEQ ID NO: 3750 - protein, 471 aa, Artificial Sequence
  Fusion Protein
HGEGTFTSDLSKQLEKELVRLFYEWLINGGPSSGKPPPKGGGGGGGSGGGGSGGGGSADKTHTCPPCPAPELLGGPSVFLFPPKPKDTLMISRTPEVTCVVVDVSHEDPEVKFNWYVDGVEVHNAKTKPREEQYNNASRVVSVLTVLHQDWLNGKEYKCKVSNKALPAPIEKTISKAKGQPREPQVYTLPPSRDELTKNQVSLTCLVKGFYPSDIAVEWESNGQPENNYKTTPPVLDSDGSFFLYSKLTVDKSRWQQGNVFSCSVMHEALHNHYTQKSLSLSPGGGGSGSAHPIPDSSPLLQFGGQVRQRYLYTDDACQTEAHLEIREDGTVGGAADQSPESLLQLKALKPGVIQILGVKTSRFLCQRPDGALYGSLHFDPEACSFRELLLEDGYNVYQSEAHGLPLHLPGCKSPHRDPAPRGPARFLPLPGLPPAPPEPPGILAPQPPDVGSSDPLSMVGSQGRSPSYAS

SEQ ID NO: 3751 - protein, 472 aa, Artificial Sequence
  Fusion Protein
HGEGTFTSDLSKQLEKELVRLFYEWLINGGPSSGKPPPKGGGGGGGSGGGGSGGGGSADKTHTCPPCPAPELLGGPSVFLFPPKPKDTLMISRTPEVTCVVVDVSHEDPEVKFNWYVDGVEVHNAKTKPREEQYNNASRVVSVLTVLHQDWLNGKEYKCKVSNKALPAPIEKTISKAKGQPREPQVYTLPPSRDELTKNQVSLTCLVKGFYPSDIAVEWESNGQPENNYKTTPPVLDSDGSFFLYSKLTVDKSRWQQGNVFSCSVMHEALHNHYTQKSLSLSPGGGGSGSAHPIPDSSPLLQFGGQVRQRYLYTDDACQTEAHLEIREDGTVGGAADQSPESLLQLKALKPGVIQILGVKTSRFLCQRPDGALYGSLHFDPEACSFRELLLEDGYNVYQSEAHGLPLHLPGCKSPHRDPAPRGPARFLPLPGLPPAPPEPPGILAPQPPDVGSSDPLSMVYPSQGRSPSYAS

SEQ ID NO: 3752 - protein, 471 aa, Artificial Sequence
  Fusion Protein
HGEGTFTSDLSKQLEKELVRLFYEWLINGGPSSGKPPPKGGGGGGGSGGGGSGGGGSADKTHTCPPCPAPELLGGPSVFLFPPKPKDTLMISRTPEVTCVVVDVSHEDPEVKFNWYVDGVEVHNAKTKPREEQYNNASRVVSVLTVLHQDWLNGKEYKCKVSNKALPAPIEKTISKAKGQPREPQVYTLPPSRDELTKNQVSLTCLVKGFYPSDIAVEWESNGQPENNYKTTPPVLDSDGSFFLYSKLTVDKSRWQQGNVFSCSVMHEALHNHYTQKSLSLSPGGGGSGSAHPIPDSSPLLQFGGQVRQRYLYTDDACQTEAHLEIREDGTVGGAADQSPESLLQLKALKPGVIQILGVKTSRFLCQRPDGALYGSLHFDPEACSFRELLLEDGYNVYQSEAHGLPLHLCGNKSPHRDPAPRGPARFLPLPGLPPAPPEPPGILAPQPPDVGSSDPLSMVGSQGRSPSYAS

SEQ ID NO: 3753 - protein, 472 aa, Artificial Sequence
  Fusion Protein
HGEGTFTSDLSKQLEKELVRLFYEWLINGGPSSGKPPPKGGGGGGGSGGGGSGGGGSADKTHTCPPCPAPELLGGPSVFLFPPKPKDTLMISRTPEVTCVVVDVSHEDPEVKFNWYVDGVEVHNAKTKPREEQYNNASRVVSVLTVLHQDWLNGKEYKCKVSNKALPAPIEKTISKAKGQPREPQVYTLPPSRDELTKNQVSLTCLVKGFYPSDIAVEWESNGQPENNYKTTPPVLDSDGSFFLYSKLTVDKSRWQQGNVFSCSVMHEALHNHYTQKSLSLSPGGGGSGSAHPIPDSSPLLQFGGQVRQRYLYTDDACQTEAHLEIREDGTVGGAADQSPESLLQLKALKPGVIQILGVKTSRFLCQRPDGALYGSLHFDPEACSFRELLLEDGYNVYQSEAHGLPLHLCGNKSPHRDPAPRGPARFLPLPGLPPAPPEPPGILAPQPPDVGSSDPLSMVYPSQGRSPSYAS

SEQ ID NO: 3754 - protein, 474 aa, Artificial Sequence
  Fusion Protein
HGEGTFTSDLSKQLEKELVRLFYEWLINGGPSSGKPPPKGGGGGGGSGGGGSGGGGSAESKYGPPCPPCPAPEFEGGPSVFLFPPKPKDTLMISRTPEVTCVVVDVSQEDPEVQFNWYVDGVEVHNAKTKPREEQFNSTYRVVSVLTVLHQDWLNGKEYKCKVSNKGLPSSIEKTISKAKGQPREPQVYTLPPSQEEMTKNQVSLTCLVKGFYPSDIAVEWESNGQPENNYKTTPPVLDSDGSFFLYSRLTVDKSRWQEGNVFSCSVMHEALHNHYTQKSLSLSLGGGGSGSAHPIPDSSPLLQFGGQVRQRYLYTDDACQTEAHLEIREDGTVGGAADQSPESLLQLKALKPGVIQILGVKTSRFLCQRPDGALYGSLHFDPEACSFRELLLEDGYNVYQSEAHGLPLHLPGCKSPHRDPAPRGPARFLPLPGLPPAPPEPPGILAPQPPDVGSSDPLSMVYPSQGRSPSYAS

SEQ ID NO: 3755 - protein, 473 aa, Artificial Sequence
  Fusion Protein
HGEGTFTSDLSKQLEKELVRLFYEWLINGGPSSGKPPPKGGGGGGGSGGGGSGGGGSAESKYGPPCPPCPAPEFEGGPSVFLFPPKPKDTLMISRTPEVTCVVVDVSQEDPEVQFNWYVDGVEVHNAKTKPREEQFNSTYRVVSVLTVLHQDWLNGKEYKCKVSNKGLPSSIEKTISKAKGQPREPQVYTLPPSQEEMTKNQVSLTCLVKGFYPSDIAVEWESNGQPENNYKTTPPVLDSDGSFFLYSRLTVDKSRWQEGNVFSCSVMHEALHNHYTQKSLSLSLGGGGSGSAHPIPDSSPLLQFGGQVRQRYLYTDDACQTEAHLEIREDGTVGGAADQSPESLLQLKALKPGVIQILGVKTSRFLCQRPDGALYGSLHFDPEACSFRELLLEDGYNVYQSEAHGLPLHLCGNKSPHRDPAPRGPARFLPLPGLPPAPPEPPGILAPQPPDVGSSDPLSMVGSQGRSPSYAS

SEQ ID NO: 3756 - protein, 474 aa, Artificial Sequence
  Fusion Protein
HGEGTFTSDLSKQLEKELVRLFYEWLINGGPSSGKPPPKGGGGGGGSGGGGSGGGGSAESKYGPPCPPCPAPEFEGGPSVFLFPPKPKDTLMISRTPEVTCVVVDVSQEDPEVQFNWYVDGVEVHNAKTKPREEQFNSTYRVVSVLTVLHQDWLNGKEYKCKVSNKGLPSSIEKTISKAKGQPREPQVYTLPPSQEEMTKNQVSLTCLVKGFYPSDIAVEWESNGQPENNYKTTPPVLDSDGSFFLYSRLTVDKSRWQEGNVFSCSVMHEALHNHYTQKSLSLSLGGGGSGSAHPIPDSSPLLQFGGQVRQRYLYTDDACQTEAHLEIREDGTVGGAADQSPESLLQLKALKPGVIQILGVKTSRFLCQRPDGALYGSLHFDPEACSFRELLLEDGYNVYQSEAHGLPLHLCGNKSPHRDPAPRGPARFLPLPGLPPAPPEPPGILAPQPPDVGSSDPLSMVYPSQGRSPSYAS

SEQ ID NO: 3757 - protein, 471 aa, Artificial Sequence
  Fusion Protein
HGEGTFTSDLSKQLEKELVRLFYEWLINGGHSSGKPPPKGGGGGGGSGGGGSGGGGSADKTHTCPPCPAPEAAGGPSVFLFPPKPKDTLMISRTPEVTCVVVDVSHEDPEVKFNWYVDGVEVHNAKTKPREEQYNSTYRVVSVLTVLHQDWLNGKEYKCKVSNKALPAPIEKTISKAKGQPREPQVYTLPPSRDELTKNQVSLTCLVKGFYPSDIAVEWESNGQPENNYKTTPPVLDSDGSFFLYSKLTVDKSRWQQGNVFSCSVMHEALHNHYTQKSLSLSPGGGGSGSAHPIPDSSPLLQFGGQVRQRYLYTDDACQTEAHLEIREDGTVGGAADQSPESLLQLKALKPGVIQILGVKTSRFLCQRPDGALYGSLHFDPEACSFRELLLEDGYNVYQSEAHGLPLHLPGCKSPHRDPAPRGPARFLPLPGLPPAPPEPPGILAPQPPDVGSSDPLSMVGSQGRSPSYAS

SEQ ID NO: 3758 - protein, 472 aa, Artificial Sequence
  Fusion Protein
HGEGTFTSDLSKQLEKELVRLFYEWLINGGHSSGKPPPKGGGGGGGSGGGGSGGGGSADKTHTCPPCPAPEAAGGPSVFLFPPKPKDTLMISRTPEVTCVVVDVSHEDPEVKFNWYVDGVEVHNAKTKPREEQYNSTYRVVSVLTVLHQDWLNGKEYKCKVSNKALPAPIEKTISKAKGQPREPQVYTLPPSRDELTKNQVSLTCLVKGFYPSDIAVEWESNGQPENNYKTTPPVLDSDGSFFLYSKLTVDKSRWQQGNVFSCSVMHEALHNHYTQKSLSLSPGGGGSGSAHPIPDSSPLLQFGGQVRQRYLYTDDACQTEAHLEIREDGTVGGAADQSPESLLQLKALKPGVIQILGVKTSRFLCQRPDGALYGSLHFDPEACSFRELLLEDGYNVYQSEAHGLPLHLPGCKSPHRDPAPRGPARFLPLPGLPPAPPEPPGILAPQPPDVGSSDPLSMVYPSQGRSPSYAS

SEQ ID NO: 3759 - protein, 471 aa, Artificial Sequence
  Fusion Protein
HGEGTFTSDLSKQLEKELVRLFYEWLINGGHSSGKPPPKGGGGGGGSGGGGSGGGGSADKTHTCPPCPAPEAAGGPSVFLFPPKPKDTLMISRTPEVTCVVVDVSHEDPEVKFNWYVDGVEVHNAKTKPREEQYNSTYRVVSVLTVLHQDWLNGKEYKCKVSNKALPAPIEKTISKAKGQPREPQVYTLPPSRDELTKNQVSLTCLVKGFYPSDIAVEWESNGQPENNYKTTPPVLDSDGSFFLYSKLTVDKSRWQQGNVFSCSVMHEALHNHYTQKSLSLSPGGGGSGSAHPIPDSSPLLQFGGQVRQRYLYTDDACQTEAHLEIREDGTVGGAADQSPESLLQLKALKPGVIQILGVKTSRFLCQRPDGALYGSLHFDPEACSFRELLLEDGYNVYQSEAHGLPLHLCGNKSPHRDPAPRGPARFLPLPGLPPAPPEPPGILAPQPPDVGSSDPLSMVGSQGRSPSYAS

SEQ ID NO: 3760 - protein, 472 aa, Artificial Sequence
  Fusion Protein
HGEGTFTSDLSKQLEKELVRLFYEWLINGGHSSGKPPPKGGGGGGGSGGGGSGGGGSADKTHTCPPCPAPEAAGGPSVFLFPPKPKDTLMISRTPEVTCVVVDVSHEDPEVKFNWYVDGVEVHNAKTKPREEQYNSTYRVVSVLTVLHQDWLNGKEYKCKVSNKALPAPIEKTISKAKGQPREPQVYTLPPSRDELTKNQVSLTCLVKGFYPSDIAVEWESNGQPENNYKTTPPVLDSDGSFFLYSKLTVDKSRWQQGNVFSCSVMHEALHNHYTQKSLSLSPGGGGSGSAHPIPDSSPLLQFGGQVRQRYLYTDDACQTEAHLEIREDGTVGGAADQSPESLLQLKALKPGVIQILGVKTSRFLCQRPDGALYGSLHFDPEACSFRELLLEDGYNVYQSEAHGLPLHLCGNKSPHRDPAPRGPARFLPLPGLPPAPPEPPGILAPQPPDVGSSDPLSMVYPSQGRSPSYAS

SEQ ID NO: 3761 - protein, 471 aa, Artificial Sequence
  Fusion Protein
HGEGTFTSDLSKQLEKELVRLFYEWLINGGHSSGKPPPKGGGGGGGSGGGGSGGGGSADKTHTCPPCPAPELLGGPSVFLFPPKPKDTLMISRTPEVTCVVVDVSHEDPEVKFNWYVDGVEVHNAKTKPREEQYNNASRVVSVLTVLHQDWLNGKEYKCKVSNKALPAPIEKTISKAKGQPREPQVYTLPPSRDELTKNQVSLTCLVKGFYPSDIAVEWESNGQPENNYKTTPPVLDSDGSFFLYSKLTVDKSRWQQGNVFSCSVMHEALHNHYTQKSLSLSPGGGGSGSAHPIPDSSPLLQFGGQVRQRYLYTDDACQTEAHLEIREDGTVGGAADQSPESLLQLKALKPGVIQILGVKTSRFLCQRPDGALYGSLHFDPEACSFRELLLEDGYNVYQSEAHGLPLHLPGCKSPHRDPAPRGPARFLPLPGLPPAPPEPPGILAPQPPDVGSSDPLSMVGSQGRSPSYAS

SEQ ID NO: 3762 - protein, 472 aa, Artificial Sequence
  Fusion Protein
HGEGTFTSDLSKQLEKELVRLFYEWLINGGHSSGKPPPKGGGGGGGSGGGGSGGGGSADKTHTCPPCPAPELLGGPSVFLFPPKPKDTLMISRTPEVTCVVVDVSHEDPEVKFNWYVDGVEVHNAKTKPREEQYNNASRVVSVLTVLHQDWLNGKEYKCKVSNKALPAPIEKTISKAKGQPREPQVYTLPPSRDELTKNQVSLTCLVKGFYPSDIAVEWESNGQPENNYKTTPPVLDSDGSFFLYSKLTVDKSRWQQGNVFSCSVMHEALHNHYTQKSLSLSPGGGGSGSAHPIPDSSPLLQFGGQVRQRYLYTDDACQTEAHLEIREDGTVGGAADQSPESLLQLKALKPGVIQILGVKTSRFLCQRPDGALYGSLHFDPEACSFRELLLEDGYNVYQSEAHGLPLHLPGCKSPHRDPAPRGPARFLPLPGLPPAPPEPPGILAPQPPDVGSSDPLSMVYPSQGRSPSYAS

SEQ ID NO: 3763 - protein, 471 aa, Artificial Sequence
  Fusion Protein
HGEGTFTSDLSKQLEKELVRLFYEWLINGGHSSGKPPPKGGGGGGGSGGGGSGGGGSADKTHTCPPCPAPELLGGPSVFLFPPKPKDTLMISRTPEVTCVVVDVSHEDPEVKFNWYVDGVEVHNAKTKPREEQYNNASRVVSVLTVLHQDWLNGKEYKCKVSNKALPAPIEKTISKAKGQPREPQVYTLPPSRDELTKNQVSLTCLVKGFYPSDIAVEWESNGQPENNYKTTPPVLDSDGSFFLYSKLTVDKSRWQQGNVFSCSVMHEALHNHYTQKSLSLSPGGGGSGSAHPIPDSSPLLQFGGQVRQRYLYTDDACQTEAHLEIREDGTVGGAADQSPESLLQLKALKPGVIQILGVKTSRFLCQRPDGALYGSLHFDPEACSFRELLLEDGYNVYQSEAHGLPLHLCGNKSPHRDPAPRGPARFLPLPGLPPAPPEPPGILAPQPPDVGSSDPLSMVGSQGRSPSYAS

SEQ ID NO: 3764 - protein, 472 aa, Artificial Sequence
  Fusion Protein
HGEGTFTSDLSKQLEKELVRLFYEWLINGGHSSGKPPPKGGGGGGGSGGGGSGGGGSADKTHTCPPCPAPELLGGPSVFLFPPKPKDTLMISRTPEVTCVVVDVSHEDPEVKFNWYVDGVEVHNAKTKPREEQYNNASRVVSVLTVLHQDWLNGKEYKCKVSNKALPAPIEKTISKAKGQPREPQVYTLPPSRDELTKNQVSLTCLVKGFYPSDIAVEWESNGQPENNYKTTPPVLDSDGSFFLYSKLTVDKSRWQQGNVFSCSVMHEALHNHYTQKSLSLSPGGGGSGSAHPIPDSSPLLQFGGQVRQRYLYTDDACQTEAHLEIREDGTVGGAADQSPESLLQLKALKPGVIQILGVKTSRFLCQRPDGALYGSLHFDPEACSFRELLLEDGYNVYQSEAHGLPLHLCGNKSPHRDPAPRGPARFLPLPGLPPAPPEPPGILAPQPPDVGSSDPLSMVYPSQGRSPSYAS

SEQ ID NO: 3765 - protein, 474 aa, Artificial Sequence
  Fusion Protein
HGEGTFTSDLSKQLEKELVRLFYEWLINGGHSSGKPPPKGGGGGGGSGGGGSGGGGSAESKYGPPCPPCPAPEFEGGPSVFLFPPKPKDTLMISRTPEVTCVVVDVSQEDPEVQFNWYVDGVEVHNAKTKPREEQFNSTYRVVSVLTVLHQDWLNGKEYKCKVSNKGLPSSIEKTISKAKGQPREPQVYTLPPSQEEMTKNQVSLTCLVKGFYPSDIAVEWESNGQPENNYKTTPPVLDSDGSFFLYSRLTVDKSRWQEGNVFSCSVMHEALHNHYTQKSLSLSLGGGGSGSAHPIPDSSPLLQFGGQVRQRYLYTDDACQTEAHLEIREDGTVGGAADQSPESLLQLKALKPGVIQILGVKTSRFLCQRPDGALYGSLHFDPEACSFRELLLEDGYNVYQSEAHGLPLHLPGCKSPHRDPAPRGPARFLPLPGLPPAPPEPPGILAPQPPDVGSSDPLSMVYPSQGRSPSYAS

SEQ ID NO: 3766 - protein, 473 aa, Artificial Sequence
  Fusion Protein
HGEGTFTSDLSKQLEKELVRLFYEWLINGGHSSGKPPPKGGGGGGGSGGGGSGGGGSAESKYGPPCPPCPAPEFEGGPSVFLFPPKPKDTLMISRTPEVTCVVVDVSQEDPEVQFNWYVDGVEVHNAKTKPREEQFNSTYRVVSVLTVLHQDWLNGKEYKCKVSNKGLPSSIEKTISKAKGQPREPQVYTLPPSQEEMTKNQVSLTCLVKGFYPSDIAVEWESNGQPENNYKTTPPVLDSDGSFFLYSRLTVDKSRWQEGNVFSCSVMHEALHNHYTQKSLSLSLGGGGSGSAHPIPDSSPLLQFGGQVRQRYLYTDDACQTEAHLEIREDGTVGGAADQSPESLLQLKALKPGVIQILGVKTSRFLCQRPDGALYGSLHFDPEACSFRELLLEDGYNVYQSEAHGLPLHLCGNKSPHRDPAPRGPARFLPLPGLPPAPPEPPGILAPQPPDVGSSDPLSMVGSQGRSPSYAS

SEQ ID NO: 3767 - protein, 474 aa, Artificial Sequence
  Fusion Protein
HGEGTFTSDLSKQLEKELVRLFYEWLINGGHSSGKPPPKGGGGGGGSGGGGSGGGGSAESKYGPPCPPCPAPEFEGGPSVFLFPPKPKDTLMISRTPEVTCVVVDVSQEDPEVQFNWYVDGVEVHNAKTKPREEQFNSTYRVVSVLTVLHQDWLNGKEYKCKVSNKGLPSSIEKTISKAKGQPREPQVYTLPPSQEEMTKNQVSLTCLVKGFYPSDIAVEWESNGQPENNYKTTPPVLDSDGSFFLYSRLTVDKSRWQEGNVFSCSVMHEALHNHYTQKSLSLSLGGGGSGSAHPIPDSSPLLQFGGQVRQRYLYTDDACQTEAHLEIREDGTVGGAADQSPESLLQLKALKPGVIQILGVKTSRFLCQRPDGALYGSLHFDPEACSFRELLLEDGYNVYQSEAHGLPLHLCGNKSPHRDPAPRGPARFLPLPGLPPAPPEPPGILAPQPPDVGSSDPLSMVYPSQGRSPSYAS

SEQ ID NO: 3768 - protein, 471 aa, Artificial Sequence
  Fusion Protein
HGEGTFTSDLSKQLEKELVRLFYEWLIAGGHSSQRPPPKGGGGGGGSGGGGSGGGGSADKTHTCPPCPAPEAAGGPSVFLFPPKPKDTLMISRTPEVTCVVVDVSHEDPEVKFNWYVDGVEVHNAKTKPREEQYNSTYRVVSVLTVLHQDWLNGKEYKCKVSNKALPAPIEKTISKAKGQPREPQVYTLPPSRDELTKNQVSLTCLVKGFYPSDIAVEWESNGQPENNYKTTPPVLDSDGSFFLYSKLTVDKSRWQQGNVFSCSVMHEALHNHYTQKSLSLSPGGGGSGSAHPIPDSSPLLQFGGQVRQRYLYTDDACQTEAHLEIREDGTVGGAADQSPESLLQLKALKPGVIQILGVKTSRFLCQRPDGALYGSLHFDPEACSFRELLLEDGYNVYQSEAHGLPLHLPGCKSPHRDPAPRGPARFLPLPGLPPAPPEPPGILAPQPPDVGSSDPLSMVGSQGRSPSYAS

SEQ ID NO: 3769 - protein, 472 aa, Artificial Sequence
  Fusion Protein
HGEGTFTSDLSKQLEKELVRLFYEWLIAGGHSSQRPPPKGGGGGGGSGGGGSGGGGSADKTHTCPPCPAPEAAGGPSVFLFPPKPKDTLMISRTPEVTCVVVDVSHEDPEVKFNWYVDGVEVHNAKTKPREEQYNSTYRVVSVLTVLHQDWLNGKEYKCKVSNKALPAPIEKTISKAKGQPREPQVYTLPPSRDELTKNQVSLTCLVKGFYPSDIAVEWESNGQPENNYKTTPPVLDSDGSFFLYSKLTVDKSRWQQGNVFSCSVMHEALHNHYTQKSLSLSPGGGGSGSAHPIPDSSPLLQFGGQVRQRYLYTDDACQTEAHLEIREDGTVGGAADQSPESLLQLKALKPGVIQILGVKTSRFLCQRPDGALYGSLHFDPEACSFRELLLEDGYNVYQSEAHGLPLHLPGCKSPHRDPAPRGPARFLPLPGLPPAPPEPPGILAPQPPDVGSSDPLSMVYPSQGRSPSYAS

SEQ ID NO: 3770 - protein, 471 aa, Artificial Sequence
  Fusion Protein
HGEGTFTSDLSKQLEKELVRLFYEWLIAGGHSSQRPPPKGGGGGGGSGGGGSGGGGSADKTHTCPPCPAPEAAGGPSVFLFPPKPKDTLMISRTPEVTCVVVDVSHEDPEVKFNWYVDGVEVHNAKTKPREEQYNSTYRVVSVLTVLHQDWLNGKEYKCKVSNKALPAPIEKTISKAKGQPREPQVYTLPPSRDELTKNQVSLTCLVKGFYPSDIAVEWESNGQPENNYKTTPPVLDSDGSFFLYSKLTVDKSRWQQGNVFSCSVMHEALHNHYTQKSLSLSPGGGGSGSAHPIPDSSPLLQFGGQVRQRYLYTDDACQTEAHLEIREDGTVGGAADQSPESLLQLKALKPGVIQILGVKTSRFLCQRPDGALYGSLHFDPEACSFRELLLEDGYNVYQSEAHGLPLHLCGNKSPHRDPAPRGPARFLPLPGLPPAPPEPPGILAPQPPDVGSSDPLSMVGSQGRSPSYAS

SEQ ID NO: 3771 - protein, 472 aa, Artificial Sequence
  Fusion Protein
HGEGTFTSDLSKQLEKELVRLFYEWLIAGGHSSQRPPPKGGGGGGGSGGGGSGGGGSADKTHTCPPCPAPEAAGGPSVFLFPPKPKDTLMISRTPEVTCVVVDVSHEDPEVKFNWYVDGVEVHNAKTKPREEQYNSTYRVVSVLTVLHQDWLNGKEYKCKVSNKALPAPIEKTISKAKGQPREPQVYTLPPSRDELTKNQVSLTCLVKGFYPSDIAVEWESNGQPENNYKTTPPVLDSDGSFFLYSKLTVDKSRWQQGNVFSCSVMHEALHNHYTQKSLSLSPGGGGSGSAHPIPDSSPLLQFGGQVRQRYLYTDDACQTEAHLEIREDGTVGGAADQSPESLLQLKALKPGVIQILGVKTSRFLCQRPDGALYGSLHFDPEACSFRELLLEDGYNVYQSEAHGLPLHLCGNKSPHRDPAPRGPARFLPLPGLPPAPPEPPGILAPQPPDVGSSDPLSMVYPSQGRSPSYAS

SEQ ID NO: 3772 - protein, 471 aa, Artificial Sequence
  Fusion Protein
HGEGTFTSDLSKQLEKELVRLFYEWLIAGGHSSQRPPPKGGGGGGGSGGGGSGGGGSADKTHTCPPCPAPELLGGPSVFLFPPKPKDTLMISRTPEVTCVVVDVSHEDPEVKFNWYVDGVEVHNAKTKPREEQYNNASRVVSVLTVLHQDWLNGKEYKCKVSNKALPAPIEKTISKAKGQPREPQVYTLPPSRDELTKNQVSLTCLVKGFYPSDIAVEWESNGQPENNYKTTPPVLDSDGSFFLYSKLTVDKSRWQQGNVFSCSVMHEALHNHYTQKSLSLSPGGGGSGSAHPIPDSSPLLQFGGQVRQRYLYTDDACQTEAHLEIREDGTVGGAADQSPESLLQLKALKPGVIQILGVKTSRFLCQRPDGALYGSLHFDPEACSFRELLLEDGYNVYQSEAHGLPLHLPGCKSPHRDPAPRGPARFLPLPGLPPAPPEPPGILAPQPPDVGSSDPLSMVGSQGRSPSYAS

SEQ ID NO: 3773 - protein, 472 aa, Artificial Sequence
  Fusion Protein
HGEGTFTSDLSKQLEKELVRLFYEWLIAGGHSSQRPPPKGGGGGGGSGGGGSGGGGSADKTHTCPPCPAPELLGGPSVFLFPPKPKDTLMISRTPEVTCVVVDVSHEDPEVKFNWYVDGVEVHNAKTKPREEQYNNASRVVSVLTVLHQDWLNGKEYKCKVSNKALPAPIEKTISKAKGQPREPQVYTLPPSRDELTKNQVSLTCLVKGFYPSDIAVEWESNGQPENNYKTTPPVLDSDGSFFLYSKLTVDKSRWQQGNVFSCSVMHEALHNHYTQKSLSLSPGGGGSGSAHPIPDSSPLLQFGGQVRQRYLYTDDACQTEAHLEIREDGTVGGAADQSPESLLQLKALKPGVIQILGVKTSRFLCQRPDGALYGSLHFDPEACSFRELLLEDGYNVYQSEAHGLPLHLPGCKSPHRDPAPRGPARFLPLPGLPPAPPEPPGILAPQPPDVGSSDPLSMVYPSQGRSPSYAS

SEQ ID NO: 3774 - protein, 471 aa, Artificial Sequence
  Fusion Protein
HGEGTFTSDLSKQLEKELVRLFYEWLIAGGHSSQRPPPKGGGGGGGSGGGGSGGGGSADKTHTCPPCPAPELLGGPSVFLFPPKPKDTLMISRTPEVTCVVVDVSHEDPEVKFNWYVDGVEVHNAKTKPREEQYNNASRVVSVLTVLHQDWLNGKEYKCKVSNKALPAPIEKTISKAKGQPREPQVYTLPPSRDELTKNQVSLTCLVKGFYPSDIAVEWESNGQPENNYKTTPPVLDSDGSFFLYSKLTVDKSRWQQGNVFSCSVMHEALHNHYTQKSLSLSPGGGGSGSAHPIPDSSPLLQFGGQVRQRYLYTDDACQTEAHLEIREDGTVGGAADQSPESLLQLKALKPGVIQILGVKTSRFLCQRPDGALYGSLHFDPEACSFRELLLEDGYNVYQSEAHGLPLHLCGNKSPHRDPAPRGPARFLPLPGLPPAPPEPPGILAPQPPDVGSSDPLSMVGSQGRSPSYAS

SEQ ID NO: 3775 - protein, 472 aa, Artificial Sequence
  Fusion Protein
HGEGTFTSDLSKQLEKELVRLFYEWLIAGGHSSQRPPPKGGGGGGGSGGGGSGGGGSADKTHTCPPCPAPELLGGPSVFLFPPKPKDTLMISRTPEVTCVVVDVSHEDPEVKFNWYVDGVEVHNAKTKPREEQYNNASRVVSVLTVLHQDWLNGKEYKCKVSNKALPAPIEKTISKAKGQPREPQVYTLPPSRDELTKNQVSLTCLVKGFYPSDIAVEWESNGQPENNYKTTPPVLDSDGSFFLYSKLTVDKSRWQQGNVFSCSVMHEALHNHYTQKSLSLSPGGGGSGSAHPIPDSSPLLQFGGQVRQRYLYTDDACQTEAHLEIREDGTVGGAADQSPESLLQLKALKPGVIQILGVKTSRFLCQRPDGALYGSLHFDPEACSFRELLLEDGYNVYQSEAHGLPLHLCGNKSPHRDPAPRGPARFLPLPGLPPAPPEPPGILAPQPPDVGSSDPLSMVYPSQGRSPSYAS

SEQ ID NO: 3776 - protein, 474 aa, Artificial Sequence
  Fusion Protein
HGEGTFTSDLSKQLEKELVRLFYEWLIAGGHSSQRPPPKGGGGGGGSGGGGSGGGGSAESKYGPPCPPCPAPEFEGGPSVFLFPPKPKDTLMISRTPEVTCVVVDVSQEDPEVQFNWYVDGVEVHNAKTKPREEQFNSTYRVVSVLTVLHQDWLNGKEYKCKVSNKGLPSSIEKTISKAKGQPREPQVYTLPPSQEEMTKNQVSLTCLVKGFYPSDIAVEWESNGQPENNYKTTPPVLDSDGSFFLYSRLTVDKSRWQEGNVFSCSVMHEALHNHYTQKSLSLSLGGGGSGSAHPIPDSSPLLQFGGQVRQRYLYTDDACQTEAHLEIREDGTVGGAADQSPESLLQLKALKPGVIQILGVKTSRFLCQRPDGALYGSLHFDPEACSFRELLLEDGYNVYQSEAHGLPLHLPGCKSPHRDPAPRGPARFLPLPGLPPAPPEPPGILAPQPPDVGSSDPLSMVYPSQGRSPSYAS

SEQ ID NO: 3777 - protein, 473 aa, Artificial Sequence
  Fusion Protein
HGEGTFTSDLSKQLEKELVRLFYEWLIAGGHSSQRPPPKGGGGGGGSGGGGSGGGGSAESKYGPPCPPCPAPEFEGGPSVFLFPPKPKDTLMISRTPEVTCVVVDVSQEDPEVQFNWYVDGVEVHNAKTKPREEQFNSTYRVVSVLTVLHQDWLNGKEYKCKVSNKGLPSSIEKTISKAKGQPREPQVYTLPPSQEEMTKNQVSLTCLVKGFYPSDIAVEWESNGQPENNYKTTPPVLDSDGSFFLYSRLTVDKSRWQEGNVFSCSVMHEALHNHYTQKSLSLSLGGGGSGSAHPIPDSSPLLQFGGQVRQRYLYTDDACQTEAHLEIREDGTVGGAADQSPESLLQLKALKPGVIQILGVKTSRFLCQRPDGALYGSLHFDPEACSFRELLLEDGYNVYQSEAHGLPLHLCGNKSPHRDPAPRGPARFLPLPGLPPAPPEPPGILAPQPPDVGSSDPLSMVGSQGRSPSYAS

SEQ ID NO: 3778 - protein, 474 aa, Artificial Sequence
  Fusion Protein
HGEGTFTSDLSKQLEKELVRLFYEWLIAGGHSSQRPPPKGGGGGGGSGGGGSGGGGSAESKYGPPCPPCPAPEFEGGPSVFLFPPKPKDTLMISRTPEVTCVVVDVSQEDPEVQFNWYVDGVEVHNAKTKPREEQFNSTYRVVSVLTVLHQDWLNGKEYKCKVSNKGLPSSIEKTISKAKGQPREPQVYTLPPSQEEMTKNQVSLTCLVKGFYPSDIAVEWESNGQPENNYKTTPPVLDSDGSFFLYSRLTVDKSRWQEGNVFSCSVMHEALHNHYTQKSLSLSLGGGGSGSAHPIPDSSPLLQFGGQVRQRYLYTDDACQTEAHLEIREDGTVGGAADQSPESLLQLKALKPGVIQILGVKTSRFLCQRPDGALYGSLHFDPEACSFRELLLEDGYNVYQSEAHGLPLHLCGNKSPHRDPAPRGPARFLPLPGLPPAPPEPPGILAPQPPDVGSSDPLSMVYPSQGRSPSYAS

SEQ ID NO: 3779 - protein, 471 aa, Artificial Sequence
  Fusion Protein
HGEGTFTSDLSKQLEKELVRLFYEWLKAGGHSSGKPPPKGGGGGGGSGGGGSGGGGSADKTHTCPPCPAPEAAGGPSVFLFPPKPKDTLMISRTPEVTCVVVDVSHEDPEVKFNWYVDGVEVHNAKTKPREEQYNSTYRVVSVLTVLHQDWLNGKEYKCKVSNKALPAPIEKTISKAKGQPREPQVYTLPPSRDELTKNQVSLTCLVKGFYPSDIAVEWESNGQPENNYKTTPPVLDSDGSFFLYSKLTVDKSRWQQGNVFSCSVMHEALHNHYTQKSLSLSPGGGGSGSAHPIPDSSPLLQFGGQVRQRYLYTDDACQTEAHLEIREDGTVGGAADQSPESLLQLKALKPGVIQILGVKTSRFLCQRPDGALYGSLHFDPEACSFRELLLEDGYNVYQSEAHGLPLHLPGCKSPHRDPAPRGPARFLPLPGLPPAPPEPPGILAPQPPDVGSSDPLSMVGSQGRSPSYAS

SEQ ID NO: 3780 - protein, 472 aa, Artificial Sequence
  Fusion Protein
HGEGTFTSDLSKQLEKELVRLFYEWLKAGGHSSGKPPPKGGGGGGGSGGGGSGGGGSADKTHTCPPCPAPEAAGGPSVFLFPPKPKDTLMISRTPEVTCVVVDVSHEDPEVKFNWYVDGVEVHNAKTKPREEQYNSTYRVVSVLTVLHQDWLNGKEYKCKVSNKALPAPIEKTISKAKGQPREPQVYTLPPSRDELTKNQVSLTCLVKGFYPSDIAVEWESNGQPENNYKTTPPVLDSDGSFFLYSKLTVDKSRWQQGNVFSCSVMHEALHNHYTQKSLSLSPGGGGSGSAHPIPDSSPLLQFGGQVRQRYLYTDDACQTEAHLEIREDGTVGGAADQSPESLLQLKALKPGVIQILGVKTSRFLCQRPDGALYGSLHFDPEACSFRELLLEDGYNVYQSEAHGLPLHLPGCKSPHRDPAPRGPARFLPLPGLPPAPPEPPGILAPQPPDVGSSDPLSMVYPSQGRSPSYAS

SEQ ID NO: 3781 - protein, 471 aa, Artificial Sequence
  Fusion Protein
HGEGTFTSDLSKQLEKELVRLFYEWLKAGGHSSGKPPPKGGGGGGGSGGGGSGGGGSADKTHTCPPCPAPEAAGGPSVFLFPPKPKDTLMISRTPEVTCVVVDVSHEDPEVKFNWYVDGVEVHNAKTKPREEQYNSTYRVVSVLTVLHQDWLNGKEYKCKVSNKALPAPIEKTISKAKGQPREPQVYTLPPSRDELTKNQVSLTCLVKGFYPSDIAVEWESNGQPENNYKTTPPVLDSDGSFFLYSKLTVDKSRWQQGNVFSCSVMHEALHNHYTQKSLSLSPGGGGSGSAHPIPDSSPLLQFGGQVRQRYLYTDDACQTEAHLEIREDGTVGGAADQSPESLLQLKALKPGVIQILGVKTSRFLCQRPDGALYGSLHFDPEACSFRELLLEDGYNVYQSEAHGLPLHLCGNKSPHRDPAPRGPARFLPLPGLPPAPPEPPGILAPQPPDVGSSDPLSMVGSQGRSPSYAS

SEQ ID NO: 3782 - protein, 472 aa, Artificial Sequence
  Fusion Protein
HGEGTFTSDLSKQLEKELVRLFYEWLKAGGHSSGKPPPKGGGGGGGSGGGGSGGGGSADKTHTCPPCPAPEAAGGPSVFLFPPKPKDTLMISRTPEVTCVVVDVSHEDPEVKFNWYVDGVEVHNAKTKPREEQYNSTYRVVSVLTVLHQDWLNGKEYKCKVSNKALPAPIEKTISKAKGQPREPQVYTLPPSRDELTKNQVSLTCLVKGFYPSDIAVEWESNGQPENNYKTTPPVLDSDGSFFLYSKLTVDKSRWQQGNVFSCSVMHEALHNHYTQKSLSLSPGGGGSGSAHPIPDSSPLLQFGGQVRQRYLYTDDACQTEAHLEIREDGTVGGAADQSPESLLQLKALKPGVIQILGVKTSRFLCQRPDGALYGSLHFDPEACSFRELLLEDGYNVYQSEAHGLPLHLCGNKSPHRDPAPRGPARFLPLPGLPPAPPEPPGILAPQPPDVGSSDPLSMVYPSQGRSPSYAS

SEQ ID NO: 3783 - protein, 471 aa, Artificial Sequence
  Fusion Protein
HGEGTFTSDLSKQLEKELVRLFYEWLKAGGHSSGKPPPKGGGGGGGSGGGGSGGGGSADKTHTCPPCPAPELLGGPSVFLFPPKPKDTLMISRTPEVTCVVVDVSHEDPEVKFNWYVDGVEVHNAKTKPREEQYNNASRVVSVLTVLHQDWLNGKEYKCKVSNKALPAPIEKTISKAKGQPREPQVYTLPPSRDELTKNQVSLTCLVKGFYPSDIAVEWESNGQPENNYKTTPPVLDSDGSFFLYSKLTVDKSRWQQGNVFSCSVMHEALHNHYTQKSLSLSPGGGGSGSAHPIPDSSPLLQFGGQVRQRYLYTDDACQTEAHLEIREDGTVGGAADQSPESLLQLKALKPGVIQILGVKTSRFLCQRPDGALYGSLHFDPEACSFRELLLEDGYNVYQSEAHGLPLHLPGCKSPHRDPAPRGPARFLPLPGLPPAPPEPPGILAPQPPDVGSSDPLSMVGSQGRSPSYAS

SEQ ID NO: 3784 - protein, 472 aa, Artificial Sequence
  Fusion Protein
HGEGTFTSDLSKQLEKELVRLFYEWLKAGGHSSGKPPPKGGGGGGGSGGGGSGGGGSADKTHTCPPCPAPELLGGPSVFLFPPKPKDTLMISRTPEVTCVVVDVSHEDPEVKFNWYVDGVEVHNAKTKPREEQYNNASRVVSVLTVLHQDWLNGKEYKCKVSNKALPAPIEKTISKAKGQPREPQVYTLPPSRDELTKNQVSLTCLVKGFYPSDIAVEWESNGQPENNYKTTPPVLDSDGSFFLYSKLTVDKSRWQQGNVFSCSVMHEALHNHYTQKSLSLSPGGGGSGSAHPIPDSSPLLQFGGQVRQRYLYTDDACQTEAHLEIREDGTVGGAADQSPESLLQLKALKPGVIQILGVKTSRFLCQRPDGALYGSLHFDPEACSFRELLLEDGYNVYQSEAHGLPLHLPGCKSPHRDPAPRGPARFLPLPGLPPAPPEPPGILAPQPPDVGSSDPLSMVYPSQGRSPSYAS

SEQ ID NO: 3785 - protein, 471 aa, Artificial Sequence
  Fusion Protein
HGEGTFTSDLSKQLEKELVRLFYEWLKAGGHSSGKPPPKGGGGGGGSGGGGSGGGGSADKTHTCPPCPAPELLGGPSVFLFPPKPKDTLMISRTPEVTCVVVDVSHEDPEVKFNWYVDGVEVHNAKTKPREEQYNNASRVVSVLTVLHQDWLNGKEYKCKVSNKALPAPIEKTISKAKGQPREPQVYTLPPSRDELTKNQVSLTCLVKGFYPSDIAVEWESNGQPENNYKTTPPVLDSDGSFFLYSKLTVDKSRWQQGNVFSCSVMHEALHNHYTQKSLSLSPGGGGSGSAHPIPDSSPLLQFGGQVRQRYLYTDDACQTEAHLEIREDGTVGGAADQSPESLLQLKALKPGVIQILGVKTSRFLCQRPDGALYGSLHFDPEACSFRELLLEDGYNVYQSEAHGLPLHLCGNKSPHRDPAPRGPARFLPLPGLPPAPPEPPGILAPQPPDVGSSDPLSMVGSQGRSPSYAS

SEQ ID NO: 3786 - protein, 472 aa, Artificial Sequence
  Fusion Protein
HGEGTFTSDLSKQLEKELVRLFYEWLKAGGHSSGKPPPKGGGGGGGSGGGGSGGGGSADKTHTCPPCPAPELLGGPSVFLFPPKPKDTLMISRTPEVTCVVVDVSHEDPEVKFNWYVDGVEVHNAKTKPREEQYNNASRVVSVLTVLHQDWLNGKEYKCKVSNKALPAPIEKTISKAKGQPREPQVYTLPPSRDELTKNQVSLTCLVKGFYPSDIAVEWESNGQPENNYKTTPPVLDSDGSFFLYSKLTVDKSRWQQGNVFSCSVMHEALHNHYTQKSLSLSPGGGGSGSAHPIPDSSPLLQFGGQVRQRYLYTDDACQTEAHLEIREDGTVGGAADQSPESLLQLKALKPGVIQILGVKTSRFLCQRPDGALYGSLHFDPEACSFRELLLEDGYNVYQSEAHGLPLHLCGNKSPHRDPAPRGPARFLPLPGLPPAPPEPPGILAPQPPDVGSSDPLSMVYPSQGRSPSYAS

SEQ ID NO: 3787 - protein, 474 aa, Artificial Sequence
  Fusion Protein
HGEGTFTSDLSKQLEKELVRLFYEWLKAGGHSSGKPPPKGGGGGGGSGGGGSGGGGSAESKYGPPCPPCPAPEFEGGPSVFLFPPKPKDTLMISRTPEVTCVVVDVSQEDPEVQFNWYVDGVEVHNAKTKPREEQFNSTYRVVSVLTVLHQDWLNGKEYKCKVSNKGLPSSIEKTISKAKGQPREPQVYTLPPSQEEMTKNQVSLTCLVKGFYPSDIAVEWESNGQPENNYKTTPPVLDSDGSFFLYSRLTVDKSRWQEGNVFSCSVMHEALHNHYTQKSLSLSLGGGGSGSAHPIPDSSPLLQFGGQVRQRYLYTDDACQTEAHLEIREDGTVGGAADQSPESLLQLKALKPGVIQILGVKTSRFLCQRPDGALYGSLHFDPEACSFRELLLEDGYNVYQSEAHGLPLHLPGCKSPHRDPAPRGPARFLPLPGLPPAPPEPPGILAPQPPDVGSSDPLSMVYPSQGRSPSYAS

SEQ ID NO: 3788 - protein, 473 aa, Artificial Sequence
  Fusion Protein
HGEGTFTSDLSKQLEKELVRLFYEWLKAGGHSSGKPPPKGGGGGGGSGGGGSGGGGSAESKYGPPCPPCPAPEFEGGPSVFLFPPKPKDTLMISRTPEVTCVVVDVSQEDPEVQFNWYVDGVEVHNAKTKPREEQFNSTYRVVSVLTVLHQDWLNGKEYKCKVSNKGLPSSIEKTISKAKGQPREPQVYTLPPSQEEMTKNQVSLTCLVKGFYPSDIAVEWESNGQPENNYKTTPPVLDSDGSFFLYSRLTVDKSRWQEGNVFSCSVMHEALHNHYTQKSLSLSLGGGGSGSAHPIPDSSPLLQFGGQVRQRYLYTDDACQTEAHLEIREDGTVGGAADQSPESLLQLKALKPGVIQILGVKTSRFLCQRPDGALYGSLHFDPEACSFRELLLEDGYNVYQSEAHGLPLHLCGNKSPHRDPAPRGPARFLPLPGLPPAPPEPPGILAPQPPDVGSSDPLSMVGSQGRSPSYAS

SEQ ID NO: 3789 - protein, 474 aa, Artificial Sequence
  Fusion Protein
HGEGTFTSDLSKQLEKELVRLFYEWLKAGGHSSGKPPPKGGGGGGGSGGGGSGGGGSAESKYGPPCPPCPAPEFEGGPSVFLFPPKPKDTLMISRTPEVTCVVVDVSQEDPEVQFNWYVDGVEVHNAKTKPREEQFNSTYRVVSVLTVLHQDWLNGKEYKCKVSNKGLPSSIEKTISKAKGQPREPQVYTLPPSQEEMTKNQVSLTCLVKGFYPSDIAVEWESNGQPENNYKTTPPVLDSDGSFFLYSRLTVDKSRWQEGNVFSCSVMHEALHNHYTQKSLSLSLGGGGSGSAHPIPDSSPLLQFGGQVRQRYLYTDDACQTEAHLEIREDGTVGGAADQSPESLLQLKALKPGVIQILGVKTSRFLCQRPDGALYGSLHFDPEACSFRELLLEDGYNVYQSEAHGLPLHLCGNKSPHRDPAPRGPARFLPLPGLPPAPPEPPGILAPQPPDVGSSDPLSMVYPSQGRSPSYAS

SEQ ID NO: 3790 - protein, 471 aa, Artificial Sequence
  Fusion Protein
HGEGTFTSDLSKQLEKELVRLFYEWLIKGGHSSGRPPPKGGGGGGGSGGGGSGGGGSADKTHTCPPCPAPEAAGGPSVFLFPPKPKDTLMISRTPEVTCVVVDVSHEDPEVKFNWYVDGVEVHNAKTKPREEQYNSTYRVVSVLTVLHQDWLNGKEYKCKVSNKALPAPIEKTISKAKGQPREPQVYTLPPSRDELTKNQVSLTCLVKGFYPSDIAVEWESNGQPENNYKTTPPVLDSDGSFFLYSKLTVDKSRWQQGNVFSCSVMHEALHNHYTQKSLSLSPGGGGSGSAHPIPDSSPLLQFGGQVRQRYLYTDDACQTEAHLEIREDGTVGGAADQSPESLLQLKALKPGVIQILGVKTSRFLCQRPDGALYGSLHFDPEACSFRELLLEDGYNVYQSEAHGLPLHLPGCKSPHRDPAPRGPARFLPLPGLPPAPPEPPGILAPQPPDVGSSDPLSMVGSQGRSPSYAS

SEQ ID NO: 3791 - protein, 472 aa, Artificial Sequence
  Fusion Protein
HGEGTFTSDLSKQLEKELVRLFYEWLIKGGHSSGRPPPKGGGGGGGSGGGGSGGGGSADKTHTCPPCPAPEAAGGPSVFLFPPKPKDTLMISRTPEVTCVVVDVSHEDPEVKFNWYVDGVEVHNAKTKPREEQYNSTYRVVSVLTVLHQDWLNGKEYKCKVSNKALPAPIEKTISKAKGQPREPQVYTLPPSRDELTKNQVSLTCLVKGFYPSDIAVEWESNGQPENNYKTTPPVLDSDGSFFLYSKLTVDKSRWQQGNVFSCSVMHEALHNHYTQKSLSLSPGGGGSGSAHPIPDSSPLLQFGGQVRQRYLYTDDACQTEAHLEIREDGTVGGAADQSPESLLQLKALKPGVIQILGVKTSRFLCQRPDGALYGSLHFDPEACSFRELLLEDGYNVYQSEAHGLPLHLPGCKSPHRDPAPRGPARFLPLPGLPPAPPEPPGILAPQPPDVGSSDPLSMVYPSQGRSPSYAS

SEQ ID NO: 3792 - protein, 471 aa, Artificial Sequence
  Fusion Protein
HGEGTFTSDLSKQLEKELVRLFYEWLIKGGHSSGRPPPKGGGGGGGSGGGGSGGGGSADKTHTCPPCPAPEAAGGPSVFLFPPKPKDTLMISRTPEVTCVVVDVSHEDPEVKFNWYVDGVEVHNAKTKPREEQYNSTYRVVSVLTVLHQDWLNGKEYKCKVSNKALPAPIEKTISKAKGQPREPQVYTLPPSRDELTKNQVSLTCLVKGFYPSDIAVEWESNGQPENNYKTTPPVLDSDGSFFLYSKLTVDKSRWQQGNVFSCSVMHEALHNHYTQKSLSLSPGGGGSGSAHPIPDSSPLLQFGGQVRQRYLYTDDACQTEAHLEIREDGTVGGAADQSPESLLQLKALKPGVIQILGVKTSRFLCQRPDGALYGSLHFDPEACSFRELLLEDGYNVYQSEAHGLPLHLCGNKSPHRDPAPRGPARFLPLPGLPPAPPEPPGILAPQPPDVGSSDPLSMVGSQGRSPSYAS

SEQ ID NO: 3793 - protein, 472 aa, Artificial Sequence
  Fusion Protein
HGEGTFTSDLSKQLEKELVRLFYEWLIKGGHSSGRPPPKGGGGGGGSGGGGSGGGGSADKTHTCPPCPAPEAAGGPSVFLFPPKPKDTLMISRTPEVTCVVVDVSHEDPEVKFNWYVDGVEVHNAKTKPREEQYNSTYRVVSVLTVLHQDWLNGKEYKCKVSNKALPAPIEKTISKAKGQPREPQVYTLPPSRDELTKNQVSLTCLVKGFYPSDIAVEWESNGQPENNYKTTPPVLDSDGSFFLYSKLTVDKSRWQQGNVFSCSVMHEALHNHYTQKSLSLSPGGGGSGSAHPIPDSSPLLQFGGQVRQRYLYTDDACQTEAHLEIREDGTVGGAADQSPESLLQLKALKPGVIQILGVKTSRFLCQRPDGALYGSLHFDPEACSFRELLLEDGYNVYQSEAHGLPLHLCGNKSPHRDPAPRGPARFLPLPGLPPAPPEPPGILAPQPPDVGSSDPLSMVYPSQGRSPSYAS

SEQ ID NO: 3794 - protein, 471 aa, Artificial Sequence
  Fusion Protein
HGEGTFTSDLSKQLEKELVRLFYEWLIKGGHSSGRPPPKGGGGGGGSGGGGSGGGGSADKTHTCPPCPAPELLGGPSVFLFPPKPKDTLMISRTPEVTCVVVDVSHEDPEVKFNWYVDGVEVHNAKTKPREEQYNNASRVVSVLTVLHQDWLNGKEYKCKVSNKALPAPIEKTISKAKGQPREPQVYTLPPSRDELTKNQVSLTCLVKGFYPSDIAVEWESNGQPENNYKTTPPVLDSDGSFFLYSKLTVDKSRWQQGNVFSCSVMHEALHNHYTQKSLSLSPGGGGSGSAHPIPDSSPLLQFGGQVRQRYLYTDDACQTEAHLEIREDGTVGGAADQSPESLLQLKALKPGVIQILGVKTSRFLCQRPDGALYGSLHFDPEACSFRELLLEDGYNVYQSEAHGLPLHLPGCKSPHRDPAPRGPARFLPLPGLPPAPPEPPGILAPQPPDVGSSDPLSMVGSQGRSPSYAS

SEQ ID NO: 3795 - protein, 472 aa, Artificial Sequence
  Fusion Protein
HGEGTFTSDLSKQLEKELVRLFYEWLIKGGHSSGRPPPKGGGGGGGSGGGGSGGGGSADKTHTCPPCPAPELLGGPSVFLFPPKPKDTLMISRTPEVTCVVVDVSHEDPEVKFNWYVDGVEVHNAKTKPREEQYNNASRVVSVLTVLHQDWLNGKEYKCKVSNKALPAPIEKTISKAKGQPREPQVYTLPPSRDELTKNQVSLTCLVKGFYPSDIAVEWESNGQPENNYKTTPPVLDSDGSFFLYSKLTVDKSRWQQGNVFSCSVMHEALHNHYTQKSLSLSPGGGGSGSAHPIPDSSPLLQFGGQVRQRYLYTDDACQTEAHLEIREDGTVGGAADQSPESLLQLKALKPGVIQILGVKTSRFLCQRPDGALYGSLHFDPEACSFRELLLEDGYNVYQSEAHGLPLHLPGCKSPHRDPAPRGPARFLPLPGLPPAPPEPPGILAPQPPDVGSSDPLSMVYPSQGRSPSYAS

SEQ ID NO: 3796 - protein, 471 aa, Artificial Sequence
  Fusion Protein
HGEGTFTSDLSKQLEKELVRLFYEWLIKGGHSSGRPPPKGGGGGGGSGGGGSGGGGSADKTHTCPPCPAPELLGGPSVFLFPPKPKDTLMISRTPEVTCVVVDVSHEDPEVKFNWYVDGVEVHNAKTKPREEQYNNASRVVSVLTVLHQDWLNGKEYKCKVSNKALPAPIEKTISKAKGQPREPQVYTLPPSRDELTKNQVSLTCLVKGFYPSDIAVEWESNGQPENNYKTTPPVLDSDGSFFLYSKLTVDKSRWQQGNVFSCSVMHEALHNHYTQKSLSLSPGGGGSGSAHPIPDSSPLLQFGGQVRQRYLYTDDACQTEAHLEIREDGTVGGAADQSPESLLQLKALKPGVIQILGVKTSRFLCQRPDGALYGSLHFDPEACSFRELLLEDGYNVYQSEAHGLPLHLCGNKSPHRDPAPRGPARFLPLPGLPPAPPEPPGILAPQPPDVGSSDPLSMVGSQGRSPSYAS

SEQ ID NO: 3797 - protein, 472 aa, Artificial Sequence
  Fusion Protein
HGEGTFTSDLSKQLEKELVRLFYEWLIKGGHSSGRPPPKGGGGGGGSGGGGSGGGGSADKTHTCPPCPAPELLGGPSVFLFPPKPKDTLMISRTPEVTCVVVDVSHEDPEVKFNWYVDGVEVHNAKTKPREEQYNNASRVVSVLTVLHQDWLNGKEYKCKVSNKALPAPIEKTISKAKGQPREPQVYTLPPSRDELTKNQVSLTCLVKGFYPSDIAVEWESNGQPENNYKTTPPVLDSDGSFFLYSKLTVDKSRWQQGNVFSCSVMHEALHNHYTQKSLSLSPGGGGSGSAHPIPDSSPLLQFGGQVRQRYLYTDDACQTEAHLEIREDGTVGGAADQSPESLLQLKALKPGVIQILGVKTSRFLCQRPDGALYGSLHFDPEACSFRELLLEDGYNVYQSEAHGLPLHLCGNKSPHRDPAPRGPARFLPLPGLPPAPPEPPGILAPQPPDVGSSDPLSMVYPSQGRSPSYAS

SEQ ID NO: 3798 - protein, 474 aa, Artificial Sequence
  Fusion Protein
HGEGTFTSDLSKQLEKELVRLFYEWLIKGGHSSGRPPPKGGGGGGGSGGGGSGGGGSAESKYGPPCPPCPAPEFEGGPSVFLFPPKPKDTLMISRTPEVTCVVVDVSQEDPEVQFNWYVDGVEVHNAKTKPREEQFNSTYRVVSVLTVLHQDWLNGKEYKCKVSNKGLPSSIEKTISKAKGQPREPQVYTLPPSQEEMTKNQVSLTCLVKGFYPSDIAVEWESNGQPENNYKTTPPVLDSDGSFFLYSRLTVDKSRWQEGNVFSCSVMHEALHNHYTQKSLSLSLGGGGSGSAHPIPDSSPLLQFGGQVRQRYLYTDDACQTEAHLEIREDGTVGGAADQSPESLLQLKALKPGVIQILGVKTSRFLCQRPDGALYGSLHFDPEACSFRELLLEDGYNVYQSEAHGLPLHLPGCKSPHRDPAPRGPARFLPLPGLPPAPPEPPGILAPQPPDVGSSDPLSMVYPSQGRSPSYAS

SEQ ID NO: 3799 - protein, 473 aa, Artificial Sequence
  Fusion Protein
HGEGTFTSDLSKQLEKELVRLFYEWLIKGGHSSGRPPPKGGGGGGGSGGGGSGGGGSAESKYGPPCPPCPAPEFEGGPSVFLFPPKPKDTLMISRTPEVTCVVVDVSQEDPEVQFNWYVDGVEVHNAKTKPREEQFNSTYRVVSVLTVLHQDWLNGKEYKCKVSNKGLPSSIEKTISKAKGQPREPQVYTLPPSQEEMTKNQVSLTCLVKGFYPSDIAVEWESNGQPENNYKTTPPVLDSDGSFFLYSRLTVDKSRWQEGNVFSCSVMHEALHNHYTQKSLSLSLGGGGSGSAHPIPDSSPLLQFGGQVRQRYLYTDDACQTEAHLEIREDGTVGGAADQSPESLLQLKALKPGVIQILGVKTSRFLCQRPDGALYGSLHFDPEACSFRELLLEDGYNVYQSEAHGLPLHLCGNKSPHRDPAPRGPARFLPLPGLPPAPPEPPGILAPQPPDVGSSDPLSMVGSQGRSPSYAS

SEQ ID NO: 3800 - protein, 474 aa, Artificial Sequence
  Fusion Protein
HGEGTFTSDLSKQLEKELVRLFYEWLIKGGHSSGRPPPKGGGGGGGSGGGGSGGGGSAESKYGPPCPPCPAPEFEGGPSVFLFPPKPKDTLMISRTPEVTCVVVDVSQEDPEVQFNWYVDGVEVHNAKTKPREEQFNSTYRVVSVLTVLHQDWLNGKEYKCKVSNKGLPSSIEKTISKAKGQPREPQVYTLPPSQEEMTKNQVSLTCLVKGFYPSDIAVEWESNGQPENNYKTTPPVLDSDGSFFLYSRLTVDKSRWQEGNVFSCSVMHEALHNHYTQKSLSLSLGGGGSGSAHPIPDSSPLLQFGGQVRQRYLYTDDACQTEAHLEIREDGTVGGAADQSPESLLQLKALKPGVIQILGVKTSRFLCQRPDGALYGSLHFDPEACSFRELLLEDGYNVYQSEAHGLPLHLCGNKSPHRDPAPRGPARFLPLPGLPPAPPEPPGILAPQPPDVGSSDPLSMVYPSQGRSPSYAS

SEQ ID NO: 3801 - protein, 471 aa, Artificial Sequence
  Fusion Protein
HGEGTFTSDLSKQLEKELVRLFYEWLIKGGHSSQKPPPKGGGGGGGSGGGGSGGGGSADKTHTCPPCPAPEAAGGPSVFLFPPKPKDTLMISRTPEVTCVVVDVSHEDPEVKFNWYVDGVEVHNAKTKPREEQYNSTYRVVSVLTVLHQDWLNGKEYKCKVSNKALPAPIEKTISKAKGQPREPQVYTLPPSRDELTKNQVSLTCLVKGFYPSDIAVEWESNGQPENNYKTTPPVLDSDGSFFLYSKLTVDKSRWQQGNVFSCSVMHEALHNHYTQKSLSLSPGGGGSGSAHPIPDSSPLLQFGGQVRQRYLYTDDACQTEAHLEIREDGTVGGAADQSPESLLQLKALKPGVIQILGVKTSRFLCQRPDGALYGSLHFDPEACSFRELLLEDGYNVYQSEAHGLPLHLPGCKSPHRDPAPRGPARFLPLPGLPPAPPEPPGILAPQPPDVGSSDPLSMVGSQGRSPSYAS

SEQ ID NO: 3802 - protein, 472 aa, Artificial Sequence
  Fusion Protein
HGEGTFTSDLSKQLEKELVRLFYEWLIKGGHSSQKPPPKGGGGGGGSGGGGSGGGGSADKTHTCPPCPAPEAAGGPSVFLFPPKPKDTLMISRTPEVTCVVVDVSHEDPEVKFNWYVDGVEVHNAKTKPREEQYNSTYRVVSVLTVLHQDWLNGKEYKCKVSNKALPAPIEKTISKAKGQPREPQVYTLPPSRDELTKNQVSLTCLVKGFYPSDIAVEWESNGQPENNYKTTPPVLDSDGSFFLYSKLTVDKSRWQQGNVFSCSVMHEALHNHYTQKSLSLSPGGGGSGSAHPIPDSSPLLQFGGQVRQRYLYTDDACQTEAHLEIREDGTVGGAADQSPESLLQLKALKPGVIQILGVKTSRFLCQRPDGALYGSLHFDPEACSFRELLLEDGYNVYQSEAHGLPLHLPGCKSPHRDPAPRGPARFLPLPGLPPAPPEPPGILAPQPPDVGSSDPLSMVYPSQGRSPSYAS

SEQ ID NO: 3803 - protein, 471 aa, Artificial Sequence
  Fusion Protein
HGEGTFTSDLSKQLEKELVRLFYEWLIKGGHSSQKPPPKGGGGGGGSGGGGSGGGGSADKTHTCPPCPAPEAAGGPSVFLFPPKPKDTLMISRTPEVTCVVVDVSHEDPEVKFNWYVDGVEVHNAKTKPREEQYNSTYRVVSVLTVLHQDWLNGKEYKCKVSNKALPAPIEKTISKAKGQPREPQVYTLPPSRDELTKNQVSLTCLVKGFYPSDIAVEWESNGQPENNYKTTPPVLDSDGSFFLYSKLTVDKSRWQQGNVFSCSVMHEALHNHYTQKSLSLSPGGGGSGSAHPIPDSSPLLQFGGQVRQRYLYTDDACQTEAHLEIREDGTVGGAADQSPESLLQLKALKPGVIQILGVKTSRFLCQRPDGALYGSLHFDPEACSFRELLLEDGYNVYQSEAHGLPLHLCGNKSPHRDPAPRGPARFLPLPGLPPAPPEPPGILAPQPPDVGSSDPLSMVGSQGRSPSYAS

SEQ ID NO: 3804 - protein, 472 aa, Artificial Sequence
  Fusion Protein
HGEGTFTSDLSKQLEKELVRLFYEWLIKGGHSSQKPPPKGGGGGGGSGGGGSGGGGSADKTHTCPPCPAPEAAGGPSVFLFPPKPKDTLMISRTPEVTCVVVDVSHEDPEVKFNWYVDGVEVHNAKTKPREEQYNSTYRVVSVLTVLHQDWLNGKEYKCKVSNKALPAPIEKTISKAKGQPREPQVYTLPPSRDELTKNQVSLTCLVKGFYPSDIAVEWESNGQPENNYKTTPPVLDSDGSFFLYSKLTVDKSRWQQGNVFSCSVMHEALHNHYTQKSLSLSPGGGGSGSAHPIPDSSPLLQFGGQVRQRYLYTDDACQTEAHLEIREDGTVGGAADQSPESLLQLKALKPGVIQILGVKTSRFLCQRPDGALYGSLHFDPEACSFRELLLEDGYNVYQSEAHGLPLHLCGNKSPHRDPAPRGPARFLPLPGLPPAPPEPPGILAPQPPDVGSSDPLSMVYPSQGRSPSYAS

SEQ ID NO: 3805 - protein, 471 aa, Artificial Sequence
  Fusion Protein
HGEGTFTSDLSKQLEKELVRLFYEWLIKGGHSSQKPPPKGGGGGGGSGGGGSGGGGSADKTHTCPPCPAPELLGGPSVFLFPPKPKDTLMISRTPEVTCVVVDVSHEDPEVKFNWYVDGVEVHNAKTKPREEQYNNASRVVSVLTVLHQDWLNGKEYKCKVSNKALPAPIEKTISKAKGQPREPQVYTLPPSRDELTKNQVSLTCLVKGFYPSDIAVEWESNGQPENNYKTTPPVLDSDGSFFLYSKLTVDKSRWQQGNVFSCSVMHEALHNHYTQKSLSLSPGGGGSGSAHPIPDSSPLLQFGGQVRQRYLYTDDACQTEAHLEIREDGTVGGAADQSPESLLQLKALKPGVIQILGVKTSRFLCQRPDGALYGSLHFDPEACSFRELLLEDGYNVYQSEAHGLPLHLPGCKSPHRDPAPRGPARFLPLPGLPPAPPEPPGILAPQPPDVGSSDPLSMVGSQGRSPSYAS

SEQ ID NO: 3806 - protein, 472 aa, Artificial Sequence
  Fusion Protein
HGEGTFTSDLSKQLEKELVRLFYEWLIKGGHSSQKPPPKGGGGGGGSGGGGSGGGGSADKTHTCPPCPAPELLGGPSVFLFPPKPKDTLMISRTPEVTCVVVDVSHEDPEVKFNWYVDGVEVHNAKTKPREEQYNNASRVVSVLTVLHQDWLNGKEYKCKVSNKALPAPIEKTISKAKGQPREPQVYTLPPSRDELTKNQVSLTCLVKGFYPSDIAVEWESNGQPENNYKTTPPVLDSDGSFFLYSKLTVDKSRWQQGNVFSCSVMHEALHNHYTQKSLSLSPGGGGSGSAHPIPDSSPLLQFGGQVRQRYLYTDDACQTEAHLEIREDGTVGGAADQSPESLLQLKALKPGVIQILGVKTSRFLCQRPDGALYGSLHFDPEACSFRELLLEDGYNVYQSEAHGLPLHLPGCKSPHRDPAPRGPARFLPLPGLPPAPPEPPGILAPQPPDVGSSDPLSMVYPSQGRSPSYAS

SEQ ID NO: 3807 - protein, 471 aa, Artificial Sequence
  Fusion Protein
HGEGTFTSDLSKQLEKELVRLFYEWLIKGGHSSQKPPPKGGGGGGGSGGGGSGGGGSADKTHTCPPCPAPELLGGPSVFLFPPKPKDTLMISRTPEVTCVVVDVSHEDPEVKFNWYVDGVEVHNAKTKPREEQYNNASRVVSVLTVLHQDWLNGKEYKCKVSNKALPAPIEKTISKAKGQPREPQVYTLPPSRDELTKNQVSLTCLVKGFYPSDIAVEWESNGQPENNYKTTPPVLDSDGSFFLYSKLTVDKSRWQQGNVFSCSVMHEALHNHYTQKSLSLSPGGGGSGSAHPIPDSSPLLQFGGQVRQRYLYTDDACQTEAHLEIREDGTVGGAADQSPESLLQLKALKPGVIQILGVKTSRFLCQRPDGALYGSLHFDPEACSFRELLLEDGYNVYQSEAHGLPLHLCGNKSPHRDPAPRGPARFLPLPGLPPAPPEPPGILAPQPPDVGSSDPLSMVGSQGRSPSYAS

SEQ ID NO: 3808 - protein, 472 aa, Artificial Sequence
  Fusion Protein
HGEGTFTSDLSKQLEKELVRLFYEWLIKGGHSSQKPPPKGGGGGGGSGGGGSGGGGSADKTHTCPPCPAPELLGGPSVFLFPPKPKDTLMISRTPEVTCVVVDVSHEDPEVKFNWYVDGVEVHNAKTKPREEQYNNASRVVSVLTVLHQDWLNGKEYKCKVSNKALPAPIEKTISKAKGQPREPQVYTLPPSRDELTKNQVSLTCLVKGFYPSDIAVEWESNGQPENNYKTTPPVLDSDGSFFLYSKLTVDKSRWQQGNVFSCSVMHEALHNHYTQKSLSLSPGGGGSGSAHPIPDSSPLLQFGGQVRQRYLYTDDACQTEAHLEIREDGTVGGAADQSPESLLQLKALKPGVIQILGVKTSRFLCQRPDGALYGSLHFDPEACSFRELLLEDGYNVYQSEAHGLPLHLCGNKSPHRDPAPRGPARFLPLPGLPPAPPEPPGILAPQPPDVGSSDPLSMVYPSQGRSPSYAS

SEQ ID NO: 3809 - protein, 474 aa, Artificial Sequence
  Fusion Protein
HGEGTFTSDLSKQLEKELVRLFYEWLIKGGHSSQKPPPKGGGGGGGSGGGGSGGGGSAESKYGPPCPPCPAPEFEGGPSVFLFPPKPKDTLMISRTPEVTCVVVDVSQEDPEVQFNWYVDGVEVHNAKTKPREEQFNSTYRVVSVLTVLHQDWLNGKEYKCKVSNKGLPSSIEKTISKAKGQPREPQVYTLPPSQEEMTKNQVSLTCLVKGFYPSDIAVEWESNGQPENNYKTTPPVLDSDGSFFLYSRLTVDKSRWQEGNVFSCSVMHEALHNHYTQKSLSLSLGGGGSGSAHPIPDSSPLLQFGGQVRQRYLYTDDACQTEAHLEIREDGTVGGAADQSPESLLQLKALKPGVIQILGVKTSRFLCQRPDGALYGSLHFDPEACSFRELLLEDGYNVYQSEAHGLPLHLPGCKSPHRDPAPRGPARFLPLPGLPPAPPEPPGILAPQPPDVGSSDPLSMVYPSQGRSPSYAS

SEQ ID NO: 3810 - protein, 473 aa, Artificial Sequence
  Fusion Protein
HGEGTFTSDLSKQLEKELVRLFYEWLIKGGHSSQKPPPKGGGGGGGSGGGGSGGGGSAESKYGPPCPPCPAPEFEGGPSVFLFPPKPKDTLMISRTPEVTCVVVDVSQEDPEVQFNWYVDGVEVHNAKTKPREEQFNSTYRVVSVLTVLHQDWLNGKEYKCKVSNKGLPSSIEKTISKAKGQPREPQVYTLPPSQEEMTKNQVSLTCLVKGFYPSDIAVEWESNGQPENNYKTTPPVLDSDGSFFLYSRLTVDKSRWQEGNVFSCSVMHEALHNHYTQKSLSLSLGGGGSGSAHPIPDSSPLLQFGGQVRQRYLYTDDACQTEAHLEIREDGTVGGAADQSPESLLQLKALKPGVIQILGVKTSRFLCQRPDGALYGSLHFDPEACSFRELLLEDGYNVYQSEAHGLPLHLCGNKSPHRDPAPRGPARFLPLPGLPPAPPEPPGILAPQPPDVGSSDPLSMVGSQGRSPSYAS

SEQ ID NO: 3811 - protein, 474 aa, Artificial Sequence
  Fusion Protein
HGEGTFTSDLSKQLEKELVRLFYEWLIKGGHSSQKPPPKGGGGGGGSGGGGSGGGGSAESKYGPPCPPCPAPEFEGGPSVFLFPPKPKDTLMISRTPEVTCVVVDVSQEDPEVQFNWYVDGVEVHNAKTKPREEQFNSTYRVVSVLTVLHQDWLNGKEYKCKVSNKGLPSSIEKTISKAKGQPREPQVYTLPPSQEEMTKNQVSLTCLVKGFYPSDIAVEWESNGQPENNYKTTPPVLDSDGSFFLYSRLTVDKSRWQEGNVFSCSVMHEALHNHYTQKSLSLSLGGGGSGSAHPIPDSSPLLQFGGQVRQRYLYTDDACQTEAHLEIREDGTVGGAADQSPESLLQLKALKPGVIQILGVKTSRFLCQRPDGALYGSLHFDPEACSFRELLLEDGYNVYQSEAHGLPLHLCGNKSPHRDPAPRGPARFLPLPGLPPAPPEPPGILAPQPPDVGSSDPLSMVYPSQGRSPSYAS

SEQ ID NO: 3812 - protein, 471 aa, Artificial Sequence
  Fusion Protein
HGEGTFTSDLSKQLEKELVRLFYEWLIKGGHSSIKPPPKGGGGGGGSGGGGSGGGGSADKTHTCPPCPAPEAAGGPSVFLFPPKPKDTLMISRTPEVTCVVVDVSHEDPEVKFNWYVDGVEVHNAKTKPREEQYNSTYRVVSVLTVLHQDWLNGKEYKCKVSNKALPAPIEKTISKAKGQPREPQVYTLPPSRDELTKNQVSLTCLVKGFYPSDIAVEWESNGQPENNYKTTPPVLDSDGSFFLYSKLTVDKSRWQQGNVFSCSVMHEALHNHYTQKSLSLSPGGGGSGSAHPIPDSSPLLQFGGQVRQRYLYTDDACQTEAHLEIREDGTVGGAADQSPESLLQLKALKPGVIQILGVKTSRFLCQRPDGALYGSLHFDPEACSFRELLLEDGYNVYQSEAHGLPLHLPGCKSPHRDPAPRGPARFLPLPGLPPAPPEPPGILAPQPPDVGSSDPLSMVGSQGRSPSYAS

SEQ ID NO: 3813 - protein, 472 aa, Artificial Sequence
  Fusion Protein
HGEGTFTSDLSKQLEKELVRLFYEWLIKGGHSSIKPPPKGGGGGGGSGGGGSGGGGSADKTHTCPPCPAPEAAGGPSVFLFPPKPKDTLMISRTPEVTCVVVDVSHEDPEVKFNWYVDGVEVHNAKTKPREEQYNSTYRVVSVLTVLHQDWLNGKEYKCKVSNKALPAPIEKTISKAKGQPREPQVYTLPPSRDELTKNQVSLTCLVKGFYPSDIAVEWESNGQPENNYKTTPPVLDSDGSFFLYSKLTVDKSRWQQGNVFSCSVMHEALHNHYTQKSLSLSPGGGGSGSAHPIPDSSPLLQFGGQVRQRYLYTDDACQTEAHLEIREDGTVGGAADQSPESLLQLKALKPGVIQILGVKTSRFLCQRPDGALYGSLHFDPEACSFRELLLEDGYNVYQSEAHGLPLHLPGCKSPHRDPAPRGPARFLPLPGLPPAPPEPPGILAPQPPDVGSSDPLSMVYPSQGRSPSYAS

SEQ ID NO: 3814 - protein, 471 aa, Artificial Sequence
  Fusion Protein
HGEGTFTSDLSKQLEKELVRLFYEWLIKGGHSSIKPPPKGGGGGGGSGGGGSGGGGSADKTHTCPPCPAPEAAGGPSVFLFPPKPKDTLMISRTPEVTCVVVDVSHEDPEVKFNWYVDGVEVHNAKTKPREEQYNSTYRVVSVLTVLHQDWLNGKEYKCKVSNKALPAPIEKTISKAKGQPREPQVYTLPPSRDELTKNQVSLTCLVKGFYPSDIAVEWESNGQPENNYKTTPPVLDSDGSFFLYSKLTVDKSRWQQGNVFSCSVMHEALHNHYTQKSLSLSPGGGGSGSAHPIPDSSPLLQFGGQVRQRYLYTDDACQTEAHLEIREDGTVGGAADQSPESLLQLKALKPGVIQILGVKTSRFLCQRPDGALYGSLHFDPEACSFRELLLEDGYNVYQSEAHGLPLHLCGNKSPHRDPAPRGPARFLPLPGLPPAPPEPPGILAPQPPDVGSSDPLSMVGSQGRSPSYAS

SEQ ID NO: 3815 - protein, 472 aa, Artificial Sequence
  Fusion Protein
HGEGTFTSDLSKQLEKELVRLFYEWLIKGGHSSIKPPPKGGGGGGGSGGGGSGGGGSADKTHTCPPCPAPEAAGGPSVFLFPPKPKDTLMISRTPEVTCVVVDVSHEDPEVKFNWYVDGVEVHNAKTKPREEQYNSTYRVVSVLTVLHQDWLNGKEYKCKVSNKALPAPIEKTISKAKGQPREPQVYTLPPSRDELTKNQVSLTCLVKGFYPSDIAVEWESNGQPENNYKTTPPVLDSDGSFFLYSKLTVDKSRWQQGNVFSCSVMHEALHNHYTQKSLSLSPGGGGSGSAHPIPDSSPLLQFGGQVRQRYLYTDDACQTEAHLEIREDGTVGGAADQSPESLLQLKALKPGVIQILGVKTSRFLCQRPDGALYGSLHFDPEACSFRELLLEDGYNVYQSEAHGLPLHLCGNKSPHRDPAPRGPARFLPLPGLPPAPPEPPGILAPQPPDVGSSDPLSMVYPSQGRSPSYAS

SEQ ID NO: 3816 - protein, 471 aa, Artificial Sequence
  Fusion Protein
HGEGTFTSDLSKQLEKELVRLFYEWLIKGGHSSIKPPPKGGGGGGGSGGGGSGGGGSADKTHTCPPCPAPELLGGPSVFLFPPKPKDTLMISRTPEVTCVVVDVSHEDPEVKFNWYVDGVEVHNAKTKPREEQYNNASRVVSVLTVLHQDWLNGKEYKCKVSNKALPAPIEKTISKAKGQPREPQVYTLPPSRDELTKNQVSLTCLVKGFYPSDIAVEWESNGQPENNYKTTPPVLDSDGSFFLYSKLTVDKSRWQQGNVFSCSVMHEALHNHYTQKSLSLSPGGGGSGSAHPIPDSSPLLQFGGQVRQRYLYTDDACQTEAHLEIREDGTVGGAADQSPESLLQLKALKPGVIQILGVKTSRFLCQRPDGALYGSLHFDPEACSFRELLLEDGYNVYQSEAHGLPLHLPGCKSPHRDPAPRGPARFLPLPGLPPAPPEPPGILAPQPPDVGSSDPLSMVGSQGRSPSYAS

SEQ ID NO: 3817 - protein, 472 aa, Artificial Sequence
  Fusion Protein
HGEGTFTSDLSKQLEKELVRLFYEWLIKGGHSSIKPPPKGGGGGGGSGGGGSGGGGSADKTHTCPPCPAPELLGGPSVFLFPPKPKDTLMISRTPEVTCVVVDVSHEDPEVKFNWYVDGVEVHNAKTKPREEQYNNASRVVSVLTVLHQDWLNGKEYKCKVSNKALPAPIEKTISKAKGQPREPQVYTLPPSRDELTKNQVSLTCLVKGFYPSDIAVEWESNGQPENNYKTTPPVLDSDGSFFLYSKLTVDKSRWQQGNVFSCSVMHEALHNHYTQKSLSLSPGGGGSGSAHPIPDSSPLLQFGGQVRQRYLYTDDACQTEAHLEIREDGTVGGAADQSPESLLQLKALKPGVIQILGVKTSRFLCQRPDGALYGSLHFDPEACSFRELLLEDGYNVYQSEAHGLPLHLPGCKSPHRDPAPRGPARFLPLPGLPPAPPEPPGILAPQPPDVGSSDPLSMVYPSQGRSPSYAS

SEQ ID NO: 3818 - protein, 471 aa, Artificial Sequence
  Fusion Protein
HGEGTFTSDLSKQLEKELVRLFYEWLIKGGHSSIKPPPKGGGGGGGSGGGGSGGGGSADKTHTCPPCPAPELLGGPSVFLFPPKPKDTLMISRTPEVTCVVVDVSHEDPEVKFNWYVDGVEVHNAKTKPREEQYNNASRVVSVLTVLHQDWLNGKEYKCKVSNKALPAPIEKTISKAKGQPREPQVYTLPPSRDELTKNQVSLTCLVKGFYPSDIAVEWESNGQPENNYKTTPPVLDSDGSFFLYSKLTVDKSRWQQGNVFSCSVMHEALHNHYTQKSLSLSPGGGGSGSAHPIPDSSPLLQFGGQVRQRYLYTDDACQTEAHLEIREDGTVGGAADQSPESLLQLKALKPGVIQILGVKTSRFLCQRPDGALYGSLHFDPEACSFRELLLEDGYNVYQSEAHGLPLHLCGNKSPHRDPAPRGPARFLPLPGLPPAPPEPPGILAPQPPDVGSSDPLSMVGSQGRSPSYAS

SEQ ID NO: 3819 - protein, 472 aa, Artificial Sequence
  Fusion Protein
HGEGTFTSDLSKQLEKELVRLFYEWLIKGGHSSIKPPPKGGGGGGGSGGGGSGGGGSADKTHTCPPCPAPELLGGPSVFLFPPKPKDTLMISRTPEVTCVVVDVSHEDPEVKFNWYVDGVEVHNAKTKPREEQYNNASRVVSVLTVLHQDWLNGKEYKCKVSNKALPAPIEKTISKAKGQPREPQVYTLPPSRDELTKNQVSLTCLVKGFYPSDIAVEWESNGQPENNYKTTPPVLDSDGSFFLYSKLTVDKSRWQQGNVFSCSVMHEALHNHYTQKSLSLSPGGGGSGSAHPIPDSSPLLQFGGQVRQRYLYTDDACQTEAHLEIREDGTVGGAADQSPESLLQLKALKPGVIQILGVKTSRFLCQRPDGALYGSLHFDPEACSFRELLLEDGYNVYQSEAHGLPLHLCGNKSPHRDPAPRGPARFLPLPGLPPAPPEPPGILAPQPPDVGSSDPLSMVYPSQGRSPSYAS

SEQ ID NO: 3820 - protein, 474 aa, Artificial Sequence
  Fusion Protein
HGEGTFTSDLSKQLEKELVRLFYEWLIKGGHSSIKPPPKGGGGGGGSGGGGSGGGGSAESKYGPPCPPCPAPEFEGGPSVFLFPPKPKDTLMISRTPEVTCVVVDVSQEDPEVQFNWYVDGVEVHNAKTKPREEQFNSTYRVVSVLTVLHQDWLNGKEYKCKVSNKGLPSSIEKTISKAKGQPREPQVYTLPPSQEEMTKNQVSLTCLVKGFYPSDIAVEWESNGQPENNYKTTPPVLDSDGSFFLYSRLTVDKSRWQEGNVFSCSVMHEALHNHYTQKSLSLSLGGGGSGSAHPIPDSSPLLQFGGQVRQRYLYTDDACQTEAHLEIREDGTVGGAADQSPESLLQLKALKPGVIQILGVKTSRFLCQRPDGALYGSLHFDPEACSFRELLLEDGYNVYQSEAHGLPLHLPGCKSPHRDPAPRGPARFLPLPGLPPAPPEPPGILAPQPPDVGSSDPLSMVYPSQGRSPSYAS

SEQ ID NO: 3821 - protein, 473 aa, Artificial Sequence
  Fusion Protein
HGEGTFTSDLSKQLEKELVRLFYEWLIKGGHSSIKPPPKGGGGGGGSGGGGSGGGGSAESKYGPPCPPCPAPEFEGGPSVFLFPPKPKDTLMISRTPEVTCVVVDVSQEDPEVQFNWYVDGVEVHNAKTKPREEQFNSTYRVVSVLTVLHQDWLNGKEYKCKVSNKGLPSSIEKTISKAKGQPREPQVYTLPPSQEEMTKNQVSLTCLVKGFYPSDIAVEWESNGQPENNYKTTPPVLDSDGSFFLYSRLTVDKSRWQEGNVFSCSVMHEALHNHYTQKSLSLSLGGGGSGSAHPIPDSSPLLQFGGQVRQRYLYTDDACQTEAHLEIREDGTVGGAADQSPESLLQLKALKPGVIQILGVKTSRFLCQRPDGALYGSLHFDPEACSFRELLLEDGYNVYQSEAHGLPLHLCGNKSPHRDPAPRGPARFLPLPGLPPAPPEPPGILAPQPPDVGSSDPLSMVGSQGRSPSYAS

SEQ ID NO: 3822 - protein, 474 aa, Artificial Sequence
  Fusion Protein
HGEGTFTSDLSKQLEKELVRLFYEWLIKGGHSSIKPPPKGGGGGGGSGGGGSGGGGSAESKYGPPCPPCPAPEFEGGPSVFLFPPKPKDTLMISRTPEVTCVVVDVSQEDPEVQFNWYVDGVEVHNAKTKPREEQFNSTYRVVSVLTVLHQDWLNGKEYKCKVSNKGLPSSIEKTISKAKGQPREPQVYTLPPSQEEMTKNQVSLTCLVKGFYPSDIAVEWESNGQPENNYKTTPPVLDSDGSFFLYSRLTVDKSRWQEGNVFSCSVMHEALHNHYTQKSLSLSLGGGGSGSAHPIPDSSPLLQFGGQVRQRYLYTDDACQTEAHLEIREDGTVGGAADQSPESLLQLKALKPGVIQILGVKTSRFLCQRPDGALYGSLHFDPEACSFRELLLEDGYNVYQSEAHGLPLHLCGNKSPHRDPAPRGPARFLPLPGLPPAPPEPPGILAPQPPDVGSSDPLSMVYPSQGRSPSYAS

SEQ ID NO: 3823 - protein, 471 aa, Artificial Sequence
  Fusion Protein
HGEGTFTSDLSKQLEKELVRLFYEWLIKGGHKSGKPPPKGGGGGGGSGGGGSGGGGSADKTHTCPPCPAPEAAGGPSVFLFPPKPKDTLMISRTPEVTCVVVDVSHEDPEVKFNWYVDGVEVHNAKTKPREEQYNSTYRVVSVLTVLHQDWLNGKEYKCKVSNKALPAPIEKTISKAKGQPREPQVYTLPPSRDELTKNQVSLTCLVKGFYPSDIAVEWESNGQPENNYKTTPPVLDSDGSFFLYSKLTVDKSRWQQGNVFSCSVMHEALHNHYTQKSLSLSPGGGGSGSAHPIPDSSPLLQFGGQVRQRYLYTDDACQTEAHLEIREDGTVGGAADQSPESLLQLKALKPGVIQILGVKTSRFLCQRPDGALYGSLHFDPEACSFRELLLEDGYNVYQSEAHGLPLHLPGCKSPHRDPAPRGPARFLPLPGLPPAPPEPPGILAPQPPDVGSSDPLSMVGSQGRSPSYAS

SEQ ID NO: 3824 - protein, 472 aa, Artificial Sequence
  Fusion Protein
HGEGTFTSDLSKQLEKELVRLFYEWLIKGGHKSGKPPPKGGGGGGGSGGGGSGGGGSADKTHTCPPCPAPEAAGGPSVFLFPPKPKDTLMISRTPEVTCVVVDVSHEDPEVKFNWYVDGVEVHNAKTKPREEQYNSTYRVVSVLTVLHQDWLNGKEYKCKVSNKALPAPIEKTISKAKGQPREPQVYTLPPSRDELTKNQVSLTCLVKGFYPSDIAVEWESNGQPENNYKTTPPVLDSDGSFFLYSKLTVDKSRWQQGNVFSCSVMHEALHNHYTQKSLSLSPGGGGSGSAHPIPDSSPLLQFGGQVRQRYLYTDDACQTEAHLEIREDGTVGGAADQSPESLLQLKALKPGVIQILGVKTSRFLCQRPDGALYGSLHFDPEACSFRELLLEDGYNVYQSEAHGLPLHLPGCKSPHRDPAPRGPARFLPLPGLPPAPPEPPGILAPQPPDVGSSDPLSMVYPSQGRSPSYAS

SEQ ID NO: 3825 - protein, 471 aa, Artificial Sequence
  Fusion Protein
HGEGTFTSDLSKQLEKELVRLFYEWLIKGGHKSGKPPPKGGGGGGGSGGGGSGGGGSADKTHTCPPCPAPEAAGGPSVFLFPPKPKDTLMISRTPEVTCVVVDVSHEDPEVKFNWYVDGVEVHNAKTKPREEQYNSTYRVVSVLTVLHQDWLNGKEYKCKVSNKALPAPIEKTISKAKGQPREPQVYTLPPSRDELTKNQVSLTCLVKGFYPSDIAVEWESNGQPENNYKTTPPVLDSDGSFFLYSKLTVDKSRWQQGNVFSCSVMHEALHNHYTQKSLSLSPGGGGSGSAHPIPDSSPLLQFGGQVRQRYLYTDDACQTEAHLEIREDGTVGGAADQSPESLLQLKALKPGVIQILGVKTSRFLCQRPDGALYGSLHFDPEACSFRELLLEDGYNVYQSEAHGLPLHLCGNKSPHRDPAPRGPARFLPLPGLPPAPPEPPGILAPQPPDVGSSDPLSMVGSQGRSPSYAS

SEQ ID NO: 3826 - protein, 472 aa, Artificial Sequence
  Fusion Protein
HGEGTFTSDLSKQLEKELVRLFYEWLIKGGHKSGKPPPKGGGGGGGSGGGGSGGGGSADKTHTCPPCPAPEAAGGPSVFLFPPKPKDTLMISRTPEVTCVVVDVSHEDPEVKFNWYVDGVEVHNAKTKPREEQYNSTYRVVSVLTVLHQDWLNGKEYKCKVSNKALPAPIEKTISKAKGQPREPQVYTLPPSRDELTKNQVSLTCLVKGFYPSDIAVEWESNGQPENNYKTTPPVLDSDGSFFLYSKLTVDKSRWQQGNVFSCSVMHEALHNHYTQKSLSLSPGGGGSGSAHPIPDSSPLLQFGGQVRQRYLYTDDACQTEAHLEIREDGTVGGAADQSPESLLQLKALKPGVIQILGVKTSRFLCQRPDGALYGSLHFDPEACSFRELLLEDGYNVYQSEAHGLPLHLCGNKSPHRDPAPRGPARFLPLPGLPPAPPEPPGILAPQPPDVGSSDPLSMVYPSQGRSPSYAS

SEQ ID NO: 3827 - protein, 471 aa, Artificial Sequence
  Fusion Protein
HGEGTFTSDLSKQLEKELVRLFYEWLIKGGHKSGKPPPKGGGGGGGSGGGGSGGGGSADKTHTCPPCPAPELLGGPSVFLFPPKPKDTLMISRTPEVTCVVVDVSHEDPEVKFNWYVDGVEVHNAKTKPREEQYNNASRVVSVLTVLHQDWLNGKEYKCKVSNKALPAPIEKTISKAKGQPREPQVYTLPPSRDELTKNQVSLTCLVKGFYPSDIAVEWESNGQPENNYKTTPPVLDSDGSFFLYSKLTVDKSRWQQGNVFSCSVMHEALHNHYTQKSLSLSPGGGGSGSAHPIPDSSPLLQFGGQVRQRYLYTDDACQTEAHLEIREDGTVGGAADQSPESLLQLKALKPGVIQILGVKTSRFLCQRPDGALYGSLHFDPEACSFRELLLEDGYNVYQSEAHGLPLHLPGCKSPHRDPAPRGPARFLPLPGLPPAPPEPPGILAPQPPDVGSSDPLSMVGSQGRSPSYAS

SEQ ID NO: 3828 - protein, 472 aa, Artificial Sequence
  Fusion Protein
HGEGTFTSDLSKQLEKELVRLFYEWLIKGGHKSGKPPPKGGGGGGGSGGGGSGGGGSADKTHTCPPCPAPELLGGPSVFLFPPKPKDTLMISRTPEVTCVVVDVSHEDPEVKFNWYVDGVEVHNAKTKPREEQYNNASRVVSVLTVLHQDWLNGKEYKCKVSNKALPAPIEKTISKAKGQPREPQVYTLPPSRDELTKNQVSLTCLVKGFYPSDIAVEWESNGQPENNYKTTPPVLDSDGSFFLYSKLTVDKSRWQQGNVFSCSVMHEALHNHYTQKSLSLSPGGGGSGSAHPIPDSSPLLQFGGQVRQRYLYTDDACQTEAHLEIREDGTVGGAADQSPESLLQLKALKPGVIQILGVKTSRFLCQRPDGALYGSLHFDPEACSFRELLLEDGYNVYQSEAHGLPLHLPGCKSPHRDPAPRGPARFLPLPGLPPAPPEPPGILAPQPPDVGSSDPLSMVYPSQGRSPSYAS

SEQ ID NO: 3829 - protein, 471 aa, Artificial Sequence
  Fusion Protein
HGEGTFTSDLSKQLEKELVRLFYEWLIKGGHKSGKPPPKGGGGGGGSGGGGSGGGGSADKTHTCPPCPAPELLGGPSVFLFPPKPKDTLMISRTPEVTCVVVDVSHEDPEVKFNWYVDGVEVHNAKTKPREEQYNNASRVVSVLTVLHQDWLNGKEYKCKVSNKALPAPIEKTISKAKGQPREPQVYTLPPSRDELTKNQVSLTCLVKGFYPSDIAVEWESNGQPENNYKTTPPVLDSDGSFFLYSKLTVDKSRWQQGNVFSCSVMHEALHNHYTQKSLSLSPGGGGSGSAHPIPDSSPLLQFGGQVRQRYLYTDDACQTEAHLEIREDGTVGGAADQSPESLLQLKALKPGVIQILGVKTSRFLCQRPDGALYGSLHFDPEACSFRELLLEDGYNVYQSEAHGLPLHLCGNKSPHRDPAPRGPARFLPLPGLPPAPPEPPGILAPQPPDVGSSDPLSMVGSQGRSPSYAS

SEQ ID NO: 3830 - protein, 472 aa, Artificial Sequence
  Fusion Protein
HGEGTFTSDLSKQLEKELVRLFYEWLIKGGHKSGKPPPKGGGGGGGSGGGGSGGGGSADKTHTCPPCPAPELLGGPSVFLFPPKPKDTLMISRTPEVTCVVVDVSHEDPEVKFNWYVDGVEVHNAKTKPREEQYNNASRVVSVLTVLHQDWLNGKEYKCKVSNKALPAPIEKTISKAKGQPREPQVYTLPPSRDELTKNQVSLTCLVKGFYPSDIAVEWESNGQPENNYKTTPPVLDSDGSFFLYSKLTVDKSRWQQGNVFSCSVMHEALHNHYTQKSLSLSPGGGGSGSAHPIPDSSPLLQFGGQVRQRYLYTDDACQTEAHLEIREDGTVGGAADQSPESLLQLKALKPGVIQILGVKTSRFLCQRPDGALYGSLHFDPEACSFRELLLEDGYNVYQSEAHGLPLHLCGNKSPHRDPAPRGPARFLPLPGLPPAPPEPPGILAPQPPDVGSSDPLSMVYPSQGRSPSYAS

SEQ ID NO: 3831 - protein, 474 aa, Artificial Sequence
  Fusion Protein
HGEGTFTSDLSKQLEKELVRLFYEWLIKGGHKSGKPPPKGGGGGGGSGGGGSGGGGSAESKYGPPCPPCPAPEFEGGPSVFLFPPKPKDTLMISRTPEVTCVVVDVSQEDPEVQFNWYVDGVEVHNAKTKPREEQFNSTYRVVSVLTVLHQDWLNGKEYKCKVSNKGLPSSIEKTISKAKGQPREPQVYTLPPSQEEMTKNQVSLTCLVKGFYPSDIAVEWESNGQPENNYKTTPPVLDSDGSFFLYSRLTVDKSRWQEGNVFSCSVMHEALHNHYTQKSLSLSLGGGGSGSAHPIPDSSPLLQFGGQVRQRYLYTDDACQTEAHLEIREDGTVGGAADQSPESLLQLKALKPGVIQILGVKTSRFLCQRPDGALYGSLHFDPEACSFRELLLEDGYNVYQSEAHGLPLHLPGCKSPHRDPAPRGPARFLPLPGLPPAPPEPPGILAPQPPDVGSSDPLSMVYPSQGRSPSYAS

SEQ ID NO: 3832 - protein, 473 aa, Artificial Sequence
  Fusion Protein
HGEGTFTSDLSKQLEKELVRLFYEWLIKGGHKSGKPPPKGGGGGGGSGGGGSGGGGSAESKYGPPCPPCPAPEFEGGPSVFLFPPKPKDTLMISRTPEVTCVVVDVSQEDPEVQFNWYVDGVEVHNAKTKPREEQFNSTYRVVSVLTVLHQDWLNGKEYKCKVSNKGLPSSIEKTISKAKGQPREPQVYTLPPSQEEMTKNQVSLTCLVKGFYPSDIAVEWESNGQPENNYKTTPPVLDSDGSFFLYSRLTVDKSRWQEGNVFSCSVMHEALHNHYTQKSLSLSLGGGGSGSAHPIPDSSPLLQFGGQVRQRYLYTDDACQTEAHLEIREDGTVGGAADQSPESLLQLKALKPGVIQILGVKTSRFLCQRPDGALYGSLHFDPEACSFRELLLEDGYNVYQSEAHGLPLHLCGNKSPHRDPAPRGPARFLPLPGLPPAPPEPPGILAPQPPDVGSSDPLSMVGSQGRSPSYAS

SEQ ID NO: 3833 - protein, 474 aa, Artificial Sequence
  Fusion Protein
HGEGTFTSDLSKQLEKELVRLFYEWLIKGGHKSGKPPPKGGGGGGGSGGGGSGGGGSAESKYGPPCPPCPAPEFEGGPSVFLFPPKPKDTLMISRTPEVTCVVVDVSQEDPEVQFNWYVDGVEVHNAKTKPREEQFNSTYRVVSVLTVLHQDWLNGKEYKCKVSNKGLPSSIEKTISKAKGQPREPQVYTLPPSQEEMTKNQVSLTCLVKGFYPSDIAVEWESNGQPENNYKTTPPVLDSDGSFFLYSRLTVDKSRWQEGNVFSCSVMHEALHNHYTQKSLSLSLGGGGSGSAHPIPDSSPLLQFGGQVRQRYLYTDDACQTEAHLEIREDGTVGGAADQSPESLLQLKALKPGVIQILGVKTSRFLCQRPDGALYGSLHFDPEACSFRELLLEDGYNVYQSEAHGLPLHLCGNKSPHRDPAPRGPARFLPLPGLPPAPPEPPGILAPQPPDVGSSDPLSMVYPSQGRSPSYAS

SEQ ID NO: 3834 - protein, 471 aa, Artificial Sequence
  Fusion Protein
HGEGTFTSDLSKQLEKELVRLFYEWLIKGGHSKGKPPPKGGGGGGGSGGGGSGGGGSADKTHTCPPCPAPEAAGGPSVFLFPPKPKDTLMISRTPEVTCVVVDVSHEDPEVKFNWYVDGVEVHNAKTKPREEQYNSTYRVVSVLTVLHQDWLNGKEYKCKVSNKALPAPIEKTISKAKGQPREPQVYTLPPSRDELTKNQVSLTCLVKGFYPSDIAVEWESNGQPENNYKTTPPVLDSDGSFFLYSKLTVDKSRWQQGNVFSCSVMHEALHNHYTQKSLSLSPGGGGSGSAHPIPDSSPLLQFGGQVRQRYLYTDDACQTEAHLEIREDGTVGGAADQSPESLLQLKALKPGVIQILGVKTSRFLCQRPDGALYGSLHFDPEACSFRELLLEDGYNVYQSEAHGLPLHLPGCKSPHRDPAPRGPARFLPLPGLPPAPPEPPGILAPQPPDVGSSDPLSMVGSQGRSPSYAS

SEQ ID NO: 3835 - protein, 472 aa, Artificial Sequence
  Fusion Protein
HGEGTFTSDLSKQLEKELVRLFYEWLIKGGHSKGKPPPKGGGGGGGSGGGGSGGGGSADKTHTCPPCPAPEAAGGPSVFLFPPKPKDTLMISRTPEVTCVVVDVSHEDPEVKFNWYVDGVEVHNAKTKPREEQYNSTYRVVSVLTVLHQDWLNGKEYKCKVSNKALPAPIEKTISKAKGQPREPQVYTLPPSRDELTKNQVSLTCLVKGFYPSDIAVEWESNGQPENNYKTTPPVLDSDGSFFLYSKLTVDKSRWQQGNVFSCSVMHEALHNHYTQKSLSLSPGGGGSGSAHPIPDSSPLLQFGGQVRQRYLYTDDACQTEAHLEIREDGTVGGAADQSPESLLQLKALKPGVIQILGVKTSRFLCQRPDGALYGSLHFDPEACSFRELLLEDGYNVYQSEAHGLPLHLPGCKSPHRDPAPRGPARFLPLPGLPPAPPEPPGILAPQPPDVGSSDPLSMVYPSQGRSPSYAS

SEQ ID NO: 3836 - protein, 471 aa, Artificial Sequence
  Fusion Protein
HGEGTFTSDLSKQLEKELVRLFYEWLIKGGHSKGKPPPKGGGGGGGSGGGGSGGGGSADKTHTCPPCPAPEAAGGPSVFLFPPKPKDTLMISRTPEVTCVVVDVSHEDPEVKFNWYVDGVEVHNAKTKPREEQYNSTYRVVSVLTVLHQDWLNGKEYKCKVSNKALPAPIEKTISKAKGQPREPQVYTLPPSRDELTKNQVSLTCLVKGFYPSDIAVEWESNGQPENNYKTTPPVLDSDGSFFLYSKLTVDKSRWQQGNVFSCSVMHEALHNHYTQKSLSLSPGGGGSGSAHPIPDSSPLLQFGGQVRQRYLYTDDACQTEAHLEIREDGTVGGAADQSPESLLQLKALKPGVIQILGVKTSRFLCQRPDGALYGSLHFDPEACSFRELLLEDGYNVYQSEAHGLPLHLCGNKSPHRDPAPRGPARFLPLPGLPPAPPEPPGILAPQPPDVGSSDPLSMVGSQGRSPSYAS

SEQ ID NO: 3837 - protein, 472 aa, Artificial Sequence
  Fusion Protein
HGEGTFTSDLSKQLEKELVRLFYEWLIKGGHSKGKPPPKGGGGGGGSGGGGSGGGGSADKTHTCPPCPAPEAAGGPSVFLFPPKPKDTLMISRTPEVTCVVVDVSHEDPEVKFNWYVDGVEVHNAKTKPREEQYNSTYRVVSVLTVLHQDWLNGKEYKCKVSNKALPAPIEKTISKAKGQPREPQVYTLPPSRDELTKNQVSLTCLVKGFYPSDIAVEWESNGQPENNYKTTPPVLDSDGSFFLYSKLTVDKSRWQQGNVFSCSVMHEALHNHYTQKSLSLSPGGGGSGSAHPIPDSSPLLQFGGQVRQRYLYTDDACQTEAHLEIREDGTVGGAADQSPESLLQLKALKPGVIQILGVKTSRFLCQRPDGALYGSLHFDPEACSFRELLLEDGYNVYQSEAHGLPLHLCGNKSPHRDPAPRGPARFLPLPGLPPAPPEPPGILAPQPPDVGSSDPLSMVYPSQGRSPSYAS

SEQ ID NO: 3838 - protein, 471 aa, Artificial Sequence
  Fusion Protein
HGEGTFTSDLSKQLEKELVRLFYEWLIKGGHSKGKPPPKGGGGGGGSGGGGSGGGGSADKTHTCPPCPAPELLGGPSVFLFPPKPKDTLMISRTPEVTCVVVDVSHEDPEVKFNWYVDGVEVHNAKTKPREEQYNNASRVVSVLTVLHQDWLNGKEYKCKVSNKALPAPIEKTISKAKGQPREPQVYTLPPSRDELTKNQVSLTCLVKGFYPSDIAVEWESNGQPENNYKTTPPVLDSDGSFFLYSKLTVDKSRWQQGNVFSCSVMHEALHNHYTQKSLSLSPGGGGSGSAHPIPDSSPLLQFGGQVRQRYLYTDDACQTEAHLEIREDGTVGGAADQSPESLLQLKALKPGVIQILGVKTSRFLCQRPDGALYGSLHFDPEACSFRELLLEDGYNVYQSEAHGLPLHLPGCKSPHRDPAPRGPARFLPLPGLPPAPPEPPGILAPQPPDVGSSDPLSMVGSQGRSPSYAS

SEQ ID NO: 3839 - protein, 472 aa, Artificial Sequence
  Fusion Protein
HGEGTFTSDLSKQLEKELVRLFYEWLIKGGHSKGKPPPKGGGGGGGSGGGGSGGGGSADKTHTCPPCPAPELLGGPSVFLFPPKPKDTLMISRTPEVTCVVVDVSHEDPEVKFNWYVDGVEVHNAKTKPREEQYNNASRVVSVLTVLHQDWLNGKEYKCKVSNKALPAPIEKTISKAKGQPREPQVYTLPPSRDELTKNQVSLTCLVKGFYPSDIAVEWESNGQPENNYKTTPPVLDSDGSFFLYSKLTVDKSRWQQGNVFSCSVMHEALHNHYTQKSLSLSPGGGGSGSAHPIPDSSPLLQFGGQVRQRYLYTDDACQTEAHLEIREDGTVGGAADQSPESLLQLKALKPGVIQILGVKTSRFLCQRPDGALYGSLHFDPEACSFRELLLEDGYNVYQSEAHGLPLHLPGCKSPHRDPAPRGPARFLPLPGLPPAPPEPPGILAPQPPDVGSSDPLSMVYPSQGRSPSYAS

SEQ ID NO: 3840 - protein, 471 aa, Artificial Sequence
  Fusion Protein
HGEGTFTSDLSKQLEKELVRLFYEWLIKGGHSKGKPPPKGGGGGGGSGGGGSGGGGSADKTHTCPPCPAPELLGGPSVFLFPPKPKDTLMISRTPEVTCVVVDVSHEDPEVKFNWYVDGVEVHNAKTKPREEQYNNASRVVSVLTVLHQDWLNGKEYKCKVSNKALPAPIEKTISKAKGQPREPQVYTLPPSRDELTKNQVSLTCLVKGFYPSDIAVEWESNGQPENNYKTTPPVLDSDGSFFLYSKLTVDKSRWQQGNVFSCSVMHEALHNHYTQKSLSLSPGGGGSGSAHPIPDSSPLLQFGGQVRQRYLYTDDACQTEAHLEIREDGTVGGAADQSPESLLQLKALKPGVIQILGVKTSRFLCQRPDGALYGSLHFDPEACSFRELLLEDGYNVYQSEAHGLPLHLCGNKSPHRDPAPRGPARFLPLPGLPPAPPEPPGILAPQPPDVGSSDPLSMVGSQGRSPSYAS

SEQ ID NO: 3841 - protein, 472 aa, Artificial Sequence
  Fusion Protein
HGEGTFTSDLSKQLEKELVRLFYEWLIKGGHSKGKPPPKGGGGGGGSGGGGSGGGGSADKTHTCPPCPAPELLGGPSVFLFPPKPKDTLMISRTPEVTCVVVDVSHEDPEVKFNWYVDGVEVHNAKTKPREEQYNNASRVVSVLTVLHQDWLNGKEYKCKVSNKALPAPIEKTISKAKGQPREPQVYTLPPSRDELTKNQVSLTCLVKGFYPSDIAVEWESNGQPENNYKTTPPVLDSDGSFFLYSKLTVDKSRWQQGNVFSCSVMHEALHNHYTQKSLSLSPGGGGSGSAHPIPDSSPLLQFGGQVRQRYLYTDDACQTEAHLEIREDGTVGGAADQSPESLLQLKALKPGVIQILGVKTSRFLCQRPDGALYGSLHFDPEACSFRELLLEDGYNVYQSEAHGLPLHLCGNKSPHRDPAPRGPARFLPLPGLPPAPPEPPGILAPQPPDVGSSDPLSMVYPSQGRSPSYAS

SEQ ID NO: 3842 - protein, 474 aa, Artificial Sequence
  Fusion Protein
HGEGTFTSDLSKQLEKELVRLFYEWLIKGGHSKGKPPPKGGGGGGGSGGGGSGGGGSAESKYGPPCPPCPAPEFEGGPSVFLFPPKPKDTLMISRTPEVTCVVVDVSQEDPEVQFNWYVDGVEVHNAKTKPREEQFNSTYRVVSVLTVLHQDWLNGKEYKCKVSNKGLPSSIEKTISKAKGQPREPQVYTLPPSQEEMTKNQVSLTCLVKGFYPSDIAVEWESNGQPENNYKTTPPVLDSDGSFFLYSRLTVDKSRWQEGNVFSCSVMHEALHNHYTQKSLSLSLGGGGSGSAHPIPDSSPLLQFGGQVRQRYLYTDDACQTEAHLEIREDGTVGGAADQSPESLLQLKALKPGVIQILGVKTSRFLCQRPDGALYGSLHFDPEACSFRELLLEDGYNVYQSEAHGLPLHLPGCKSPHRDPAPRGPARFLPLPGLPPAPPEPPGILAPQPPDVGSSDPLSMVYPSQGRSPSYAS

SEQ ID NO: 3843 - protein, 473 aa, Artificial Sequence
  Fusion Protein
HGEGTFTSDLSKQLEKELVRLFYEWLIKGGHSKGKPPPKGGGGGGGSGGGGSGGGGSAESKYGPPCPPCPAPEFEGGPSVFLFPPKPKDTLMISRTPEVTCVVVDVSQEDPEVQFNWYVDGVEVHNAKTKPREEQFNSTYRVVSVLTVLHQDWLNGKEYKCKVSNKGLPSSIEKTISKAKGQPREPQVYTLPPSQEEMTKNQVSLTCLVKGFYPSDIAVEWESNGQPENNYKTTPPVLDSDGSFFLYSRLTVDKSRWQEGNVFSCSVMHEALHNHYTQKSLSLSLGGGGSGSAHPIPDSSPLLQFGGQVRQRYLYTDDACQTEAHLEIREDGTVGGAADQSPESLLQLKALKPGVIQILGVKTSRFLCQRPDGALYGSLHFDPEACSFRELLLEDGYNVYQSEAHGLPLHLCGNKSPHRDPAPRGPARFLPLPGLPPAPPEPPGILAPQPPDVGSSDPLSMVGSQGRSPSYAS

SEQ ID NO: 3844 - protein, 474 aa, Artificial Sequence
  Fusion Protein
HGEGTFTSDLSKQLEKELVRLFYEWLIKGGHSKGKPPPKGGGGGGGSGGGGSGGGGSAESKYGPPCPPCPAPEFEGGPSVFLFPPKPKDTLMISRTPEVTCVVVDVSQEDPEVQFNWYVDGVEVHNAKTKPREEQFNSTYRVVSVLTVLHQDWLNGKEYKCKVSNKGLPSSIEKTISKAKGQPREPQVYTLPPSQEEMTKNQVSLTCLVKGFYPSDIAVEWESNGQPENNYKTTPPVLDSDGSFFLYSRLTVDKSRWQEGNVFSCSVMHEALHNHYTQKSLSLSLGGGGSGSAHPIPDSSPLLQFGGQVRQRYLYTDDACQTEAHLEIREDGTVGGAADQSPESLLQLKALKPGVIQILGVKTSRFLCQRPDGALYGSLHFDPEACSFRELLLEDGYNVYQSEAHGLPLHLCGNKSPHRDPAPRGPARFLPLPGLPPAPPEPPGILAPQPPDVGSSDPLSMVYPSQGRSPSYAS

SEQ ID NO: 3845 - protein, 471 aa, Artificial Sequence
  Fusion Protein
HGEGTFTSDLSKQLEKELVRLFYEWLIAGGHKSQKPPPKGGGGGGGSGGGGSGGGGSADKTHTCPPCPAPEAAGGPSVFLFPPKPKDTLMISRTPEVTCVVVDVSHEDPEVKFNWYVDGVEVHNAKTKPREEQYNSTYRVVSVLTVLHQDWLNGKEYKCKVSNKALPAPIEKTISKAKGQPREPQVYTLPPSRDELTKNQVSLTCLVKGFYPSDIAVEWESNGQPENNYKTTPPVLDSDGSFFLYSKLTVDKSRWQQGNVFSCSVMHEALHNHYTQKSLSLSPGGGGSGSAHPIPDSSPLLQFGGQVRQRYLYTDDACQTEAHLEIREDGTVGGAADQSPESLLQLKALKPGVIQILGVKTSRFLCQRPDGALYGSLHFDPEACSFRELLLEDGYNVYQSEAHGLPLHLPGCKSPHRDPAPRGPARFLPLPGLPPAPPEPPGILAPQPPDVGSSDPLSMVGSQGRSPSYAS

SEQ ID NO: 3846 - protein, 472 aa, Artificial Sequence
  Fusion Protein
HGEGTFTSDLSKQLEKELVRLFYEWLIAGGHKSQKPPPKGGGGGGGSGGGGSGGGGSADKTHTCPPCPAPEAAGGPSVFLFPPKPKDTLMISRTPEVTCVVVDVSHEDPEVKFNWYVDGVEVHNAKTKPREEQYNSTYRVVSVLTVLHQDWLNGKEYKCKVSNKALPAPIEKTISKAKGQPREPQVYTLPPSRDELTKNQVSLTCLVKGFYPSDIAVEWESNGQPENNYKTTPPVLDSDGSFFLYSKLTVDKSRWQQGNVFSCSVMHEALHNHYTQKSLSLSPGGGGSGSAHPIPDSSPLLQFGGQVRQRYLYTDDACQTEAHLEIREDGTVGGAADQSPESLLQLKALKPGVIQILGVKTSRFLCQRPDGALYGSLHFDPEACSFRELLLEDGYNVYQSEAHGLPLHLPGCKSPHRDPAPRGPARFLPLPGLPPAPPEPPGILAPQPPDVGSSDPLSMVYPSQGRSPSYAS

SEQ ID NO: 3847 - protein, 471 aa, Artificial Sequence
  Fusion Protein
HGEGTFTSDLSKQLEKELVRLFYEWLIAGGHKSQKPPPKGGGGGGGSGGGGSGGGGSADKTHTCPPCPAPEAAGGPSVFLFPPKPKDTLMISRTPEVTCVVVDVSHEDPEVKFNWYVDGVEVHNAKTKPREEQYNSTYRVVSVLTVLHQDWLNGKEYKCKVSNKALPAPIEKTISKAKGQPREPQVYTLPPSRDELTKNQVSLTCLVKGFYPSDIAVEWESNGQPENNYKTTPPVLDSDGSFFLYSKLTVDKSRWQQGNVFSCSVMHEALHNHYTQKSLSLSPGGGGSGSAHPIPDSSPLLQFGGQVRQRYLYTDDACQTEAHLEIREDGTVGGAADQSPESLLQLKALKPGVIQILGVKTSRFLCQRPDGALYGSLHFDPEACSFRELLLEDGYNVYQSEAHGLPLHLCGNKSPHRDPAPRGPARFLPLPGLPPAPPEPPGILAPQPPDVGSSDPLSMVGSQGRSPSYAS

SEQ ID NO: 3848 - protein, 472 aa, Artificial Sequence
  Fusion Protein
HGEGTFTSDLSKQLEKELVRLFYEWLIAGGHKSQKPPPKGGGGGGGSGGGGSGGGGSADKTHTCPPCPAPEAAGGPSVFLFPPKPKDTLMISRTPEVTCVVVDVSHEDPEVKFNWYVDGVEVHNAKTKPREEQYNSTYRVVSVLTVLHQDWLNGKEYKCKVSNKALPAPIEKTISKAKGQPREPQVYTLPPSRDELTKNQVSLTCLVKGFYPSDIAVEWESNGQPENNYKTTPPVLDSDGSFFLYSKLTVDKSRWQQGNVFSCSVMHEALHNHYTQKSLSLSPGGGGSGSAHPIPDSSPLLQFGGQVRQRYLYTDDACQTEAHLEIREDGTVGGAADQSPESLLQLKALKPGVIQILGVKTSRFLCQRPDGALYGSLHFDPEACSFRELLLEDGYNVYQSEAHGLPLHLCGNKSPHRDPAPRGPARFLPLPGLPPAPPEPPGILAPQPPDVGSSDPLSMVYPSQGRSPSYAS

SEQ ID NO: 3849 - protein, 471 aa, Artificial Sequence
  Fusion Protein
HGEGTFTSDLSKQLEKELVRLFYEWLIAGGHKSQKPPPKGGGGGGGSGGGGSGGGGSADKTHTCPPCPAPELLGGPSVFLFPPKPKDTLMISRTPEVTCVVVDVSHEDPEVKFNWYVDGVEVHNAKTKPREEQYNNASRVVSVLTVLHQDWLNGKEYKCKVSNKALPAPIEKTISKAKGQPREPQVYTLPPSRDELTKNQVSLTCLVKGFYPSDIAVEWESNGQPENNYKTTPPVLDSDGSFFLYSKLTVDKSRWQQGNVFSCSVMHEALHNHYTQKSLSLSPGGGGSGSAHPIPDSSPLLQFGGQVRQRYLYTDDACQTEAHLEIREDGTVGGAADQSPESLLQLKALKPGVIQILGVKTSRFLCQRPDGALYGSLHFDPEACSFRELLLEDGYNVYQSEAHGLPLHLPGCKSPHRDPAPRGPARFLPLPGLPPAPPEPPGILAPQPPDVGSSDPLSMVGSQGRSPSYAS

SEQ ID NO: 3850 - protein, 472 aa, Artificial Sequence
  Fusion Protein
HGEGTFTSDLSKQLEKELVRLFYEWLIAGGHKSQKPPPKGGGGGGGSGGGGSGGGGSADKTHTCPPCPAPELLGGPSVFLFPPKPKDTLMISRTPEVTCVVVDVSHEDPEVKFNWYVDGVEVHNAKTKPREEQYNNASRVVSVLTVLHQDWLNGKEYKCKVSNKALPAPIEKTISKAKGQPREPQVYTLPPSRDELTKNQVSLTCLVKGFYPSDIAVEWESNGQPENNYKTTPPVLDSDGSFFLYSKLTVDKSRWQQGNVFSCSVMHEALHNHYTQKSLSLSPGGGGSGSAHPIPDSSPLLQFGGQVRQRYLYTDDACQTEAHLEIREDGTVGGAADQSPESLLQLKALKPGVIQILGVKTSRFLCQRPDGALYGSLHFDPEACSFRELLLEDGYNVYQSEAHGLPLHLPGCKSPHRDPAPRGPARFLPLPGLPPAPPEPPGILAPQPPDVGSSDPLSMVYPSQGRSPSYAS

SEQ ID NO: 3851 - protein, 471 aa, Artificial Sequence
  Fusion Protein
HGEGTFTSDLSKQLEKELVRLFYEWLIAGGHKSQKPPPKGGGGGGGSGGGGSGGGGSADKTHTCPPCPAPELLGGPSVFLFPPKPKDTLMISRTPEVTCVVVDVSHEDPEVKFNWYVDGVEVHNAKTKPREEQYNNASRVVSVLTVLHQDWLNGKEYKCKVSNKALPAPIEKTISKAKGQPREPQVYTLPPSRDELTKNQVSLTCLVKGFYPSDIAVEWESNGQPENNYKTTPPVLDSDGSFFLYSKLTVDKSRWQQGNVFSCSVMHEALHNHYTQKSLSLSPGGGGSGSAHPIPDSSPLLQFGGQVRQRYLYTDDACQTEAHLEIREDGTVGGAADQSPESLLQLKALKPGVIQILGVKTSRFLCQRPDGALYGSLHFDPEACSFRELLLEDGYNVYQSEAHGLPLHLCGNKSPHRDPAPRGPARFLPLPGLPPAPPEPPGILAPQPPDVGSSDPLSMVGSQGRSPSYAS

SEQ ID NO: 3852 - protein, 472 aa, Artificial Sequence
  Fusion Protein
HGEGTFTSDLSKQLEKELVRLFYEWLIAGGHKSQKPPPKGGGGGGGSGGGGSGGGGSADKTHTCPPCPAPELLGGPSVFLFPPKPKDTLMISRTPEVTCVVVDVSHEDPEVKFNWYVDGVEVHNAKTKPREEQYNNASRVVSVLTVLHQDWLNGKEYKCKVSNKALPAPIEKTISKAKGQPREPQVYTLPPSRDELTKNQVSLTCLVKGFYPSDIAVEWESNGQPENNYKTTPPVLDSDGSFFLYSKLTVDKSRWQQGNVFSCSVMHEALHNHYTQKSLSLSPGGGGSGSAHPIPDSSPLLQFGGQVRQRYLYTDDACQTEAHLEIREDGTVGGAADQSPESLLQLKALKPGVIQILGVKTSRFLCQRPDGALYGSLHFDPEACSFRELLLEDGYNVYQSEAHGLPLHLCGNKSPHRDPAPRGPARFLPLPGLPPAPPEPPGILAPQPPDVGSSDPLSMVYPSQGRSPSYAS

SEQ ID NO: 3853 - protein, 474 aa, Artificial Sequence
  Fusion Protein
HGEGTFTSDLSKQLEKELVRLFYEWLIAGGHKSQKPPPKGGGGGGGSGGGGSGGGGSAESKYGPPCPPCPAPEFEGGPSVFLFPPKPKDTLMISRTPEVTCVVVDVSQEDPEVQFNWYVDGVEVHNAKTKPREEQFNSTYRVVSVLTVLHQDWLNGKEYKCKVSNKGLPSSIEKTISKAKGQPREPQVYTLPPSQEEMTKNQVSLTCLVKGFYPSDIAVEWESNGQPENNYKTTPPVLDSDGSFFLYSRLTVDKSRWQEGNVFSCSVMHEALHNHYTQKSLSLSLGGGGSGSAHPIPDSSPLLQFGGQVRQRYLYTDDACQTEAHLEIREDGTVGGAADQSPESLLQLKALKPGVIQILGVKTSRFLCQRPDGALYGSLHFDPEACSFRELLLEDGYNVYQSEAHGLPLHLPGCKSPHRDPAPRGPARFLPLPGLPPAPPEPPGILAPQPPDVGSSDPLSMVYPSQGRSPSYAS

SEQ ID NO: 3854 - protein, 473 aa, Artificial Sequence
  Fusion Protein
HGEGTFTSDLSKQLEKELVRLFYEWLIAGGHKSQKPPPKGGGGGGGSGGGGSGGGGSAESKYGPPCPPCPAPEFEGGPSVFLFPPKPKDTLMISRTPEVTCVVVDVSQEDPEVQFNWYVDGVEVHNAKTKPREEQFNSTYRVVSVLTVLHQDWLNGKEYKCKVSNKGLPSSIEKTISKAKGQPREPQVYTLPPSQEEMTKNQVSLTCLVKGFYPSDIAVEWESNGQPENNYKTTPPVLDSDGSFFLYSRLTVDKSRWQEGNVFSCSVMHEALHNHYTQKSLSLSLGGGGSGSAHPIPDSSPLLQFGGQVRQRYLYTDDACQTEAHLEIREDGTVGGAADQSPESLLQLKALKPGVIQILGVKTSRFLCQRPDGALYGSLHFDPEACSFRELLLEDGYNVYQSEAHGLPLHLCGNKSPHRDPAPRGPARFLPLPGLPPAPPEPPGILAPQPPDVGSSDPLSMVGSQGRSPSYAS

SEQ ID NO: 3855 - protein, 474 aa, Artificial Sequence
  Fusion Protein
HGEGTFTSDLSKQLEKELVRLFYEWLIAGGHKSQKPPPKGGGGGGGSGGGGSGGGGSAESKYGPPCPPCPAPEFEGGPSVFLFPPKPKDTLMISRTPEVTCVVVDVSQEDPEVQFNWYVDGVEVHNAKTKPREEQFNSTYRVVSVLTVLHQDWLNGKEYKCKVSNKGLPSSIEKTISKAKGQPREPQVYTLPPSQEEMTKNQVSLTCLVKGFYPSDIAVEWESNGQPENNYKTTPPVLDSDGSFFLYSRLTVDKSRWQEGNVFSCSVMHEALHNHYTQKSLSLSLGGGGSGSAHPIPDSSPLLQFGGQVRQRYLYTDDACQTEAHLEIREDGTVGGAADQSPESLLQLKALKPGVIQILGVKTSRFLCQRPDGALYGSLHFDPEACSFRELLLEDGYNVYQSEAHGLPLHLCGNKSPHRDPAPRGPARFLPLPGLPPAPPEPPGILAPQPPDVGSSDPLSMVYPSQGRSPSYAS

SEQ ID NO: 3856 - protein, 471 aa, Artificial Sequence
  Fusion Protein
HGEGTFTSDLSKQLEKRLVRLFYEWLLNGGHSSQKPPPKGGGGGGGSGGGGSGGGGSADKTHTCPPCPAPEAAGGPSVFLFPPKPKDTLMISRTPEVTCVVVDVSHEDPEVKFNWYVDGVEVHNAKTKPREEQYNSTYRVVSVLTVLHQDWLNGKEYKCKVSNKALPAPIEKTISKAKGQPREPQVYTLPPSRDELTKNQVSLTCLVKGFYPSDIAVEWESNGQPENNYKTTPPVLDSDGSFFLYSKLTVDKSRWQQGNVFSCSVMHEALHNHYTQKSLSLSPGGGGSGSAHPIPDSSPLLQFGGQVRQRYLYTDDACQTEAHLEIREDGTVGGAADQSPESLLQLKALKPGVIQILGVKTSRFLCQRPDGALYGSLHFDPEACSFRELLLEDGYNVYQSEAHGLPLHLPGCKSPHRDPAPRGPARFLPLPGLPPAPPEPPGILAPQPPDVGSSDPLSMVGSQGRSPSYAS

SEQ ID NO: 3857 - protein, 472 aa, Artificial Sequence
  Fusion Protein
HGEGTFTSDLSKQLEKRLVRLFYEWLLNGGHSSQKPPPKGGGGGGGSGGGGSGGGGSADKTHTCPPCPAPEAAGGPSVFLFPPKPKDTLMISRTPEVTCVVVDVSHEDPEVKFNWYVDGVEVHNAKTKPREEQYNSTYRVVSVLTVLHQDWLNGKEYKCKVSNKALPAPIEKTISKAKGQPREPQVYTLPPSRDELTKNQVSLTCLVKGFYPSDIAVEWESNGQPENNYKTTPPVLDSDGSFFLYSKLTVDKSRWQQGNVFSCSVMHEALHNHYTQKSLSLSPGGGGSGSAHPIPDSSPLLQFGGQVRQRYLYTDDACQTEAHLEIREDGTVGGAADQSPESLLQLKALKPGVIQILGVKTSRFLCQRPDGALYGSLHFDPEACSFRELLLEDGYNVYQSEAHGLPLHLPGCKSPHRDPAPRGPARFLPLPGLPPAPPEPPGILAPQPPDVGSSDPLSMVYPSQGRSPSYAS

SEQ ID NO: 3858 - protein, 471 aa, Artificial Sequence
  Fusion Protein
HGEGTFTSDLSKQLEKRLVRLFYEWLLNGGHSSQKPPPKGGGGGGGSGGGGSGGGGSADKTHTCPPCPAPEAAGGPSVFLFPPKPKDTLMISRTPEVTCVVVDVSHEDPEVKFNWYVDGVEVHNAKTKPREEQYNSTYRVVSVLTVLHQDWLNGKEYKCKVSNKALPAPIEKTISKAKGQPREPQVYTLPPSRDELTKNQVSLTCLVKGFYPSDIAVEWESNGQPENNYKTTPPVLDSDGSFFLYSKLTVDKSRWQQGNVFSCSVMHEALHNHYTQKSLSLSPGGGGSGSAHPIPDSSPLLQFGGQVRQRYLYTDDACQTEAHLEIREDGTVGGAADQSPESLLQLKALKPGVIQILGVKTSRFLCQRPDGALYGSLHFDPEACSFRELLLEDGYNVYQSEAHGLPLHLCGNKSPHRDPAPRGPARFLPLPGLPPAPPEPPGILAPQPPDVGSSDPLSMVGSQGRSPSYAS

SEQ ID NO: 3859 - protein, 472 aa, Artificial Sequence
  Fusion Protein
HGEGTFTSDLSKQLEKRLVRLFYEWLLNGGHSSQKPPPKGGGGGGGSGGGGSGGGGSADKTHTCPPCPAPEAAGGPSVFLFPPKPKDTLMISRTPEVTCVVVDVSHEDPEVKFNWYVDGVEVHNAKTKPREEQYNSTYRVVSVLTVLHQDWLNGKEYKCKVSNKALPAPIEKTISKAKGQPREPQVYTLPPSRDELTKNQVSLTCLVKGFYPSDIAVEWESNGQPENNYKTTPPVLDSDGSFFLYSKLTVDKSRWQQGNVFSCSVMHEALHNHYTQKSLSLSPGGGGSGSAHPIPDSSPLLQFGGQVRQRYLYTDDACQTEAHLEIREDGTVGGAADQSPESLLQLKALKPGVIQILGVKTSRFLCQRPDGALYGSLHFDPEACSFRELLLEDGYNVYQSEAHGLPLHLCGNKSPHRDPAPRGPARFLPLPGLPPAPPEPPGILAPQPPDVGSSDPLSMVYPSQGRSPSYAS

SEQ ID NO: 3860 - protein, 471 aa, Artificial Sequence
  Fusion Protein
HGEGTFTSDLSKQLEKRLVRLFYEWLLNGGHSSQKPPPKGGGGGGGSGGGGSGGGGSADKTHTCPPCPAPELLGGPSVFLFPPKPKDTLMISRTPEVTCVVVDVSHEDPEVKFNWYVDGVEVHNAKTKPREEQYNNASRVVSVLTVLHQDWLNGKEYKCKVSNKALPAPIEKTISKAKGQPREPQVYTLPPSRDELTKNQVSLTCLVKGFYPSDIAVEWESNGQPENNYKTTPPVLDSDGSFFLYSKLTVDKSRWQQGNVFSCSVMHEALHNHYTQKSLSLSPGGGGSGSAHPIPDSSPLLQFGGQVRQRYLYTDDACQTEAHLEIREDGTVGGAADQSPESLLQLKALKPGVIQILGVKTSRFLCQRPDGALYGSLHFDPEACSFRELLLEDGYNVYQSEAHGLPLHLPGCKSPHRDPAPRGPARFLPLPGLPPAPPEPPGILAPQPPDVGSSDPLSMVGSQGRSPSYAS

SEQ ID NO: 3861 - protein, 472 aa, Artificial Sequence
  Fusion Protein
HGEGTFTSDLSKQLEKRLVRLFYEWLLNGGHSSQKPPPKGGGGGGGSGGGGSGGGGSADKTHTCPPCPAPELLGGPSVFLFPPKPKDTLMISRTPEVTCVVVDVSHEDPEVKFNWYVDGVEVHNAKTKPREEQYNNASRVVSVLTVLHQDWLNGKEYKCKVSNKALPAPIEKTISKAKGQPREPQVYTLPPSRDELTKNQVSLTCLVKGFYPSDIAVEWESNGQPENNYKTTPPVLDSDGSFFLYSKLTVDKSRWQQGNVFSCSVMHEALHNHYTQKSLSLSPGGGGSGSAHPIPDSSPLLQFGGQVRQRYLYTDDACQTEAHLEIREDGTVGGAADQSPESLLQLKALKPGVIQILGVKTSRFLCQRPDGALYGSLHFDPEACSFRELLLEDGYNVYQSEAHGLPLHLPGCKSPHRDPAPRGPARFLPLPGLPPAPPEPPGILAPQPPDVGSSDPLSMVYPSQGRSPSYAS

SEQ ID NO: 3862 - protein, 471 aa, Artificial Sequence
  Fusion Protein
HGEGTFTSDLSKQLEKRLVRLFYEWLLNGGHSSQKPPPKGGGGGGGSGGGGSGGGGSADKTHTCPPCPAPELLGGPSVFLFPPKPKDTLMISRTPEVTCVVVDVSHEDPEVKFNWYVDGVEVHNAKTKPREEQYNNASRVVSVLTVLHQDWLNGKEYKCKVSNKALPAPIEKTISKAKGQPREPQVYTLPPSRDELTKNQVSLTCLVKGFYPSDIAVEWESNGQPENNYKTTPPVLDSDGSFFLYSKLTVDKSRWQQGNVFSCSVMHEALHNHYTQKSLSLSPGGGGSGSAHPIPDSSPLLQFGGQVRQRYLYTDDACQTEAHLEIREDGTVGGAADQSPESLLQLKALKPGVIQILGVKTSRFLCQRPDGALYGSLHFDPEACSFRELLLEDGYNVYQSEAHGLPLHLCGNKSPHRDPAPRGPARFLPLPGLPPAPPEPPGILAPQPPDVGSSDPLSMVGSQGRSPSYAS

SEQ ID NO: 3863 - protein, 472 aa, Artificial Sequence
  Fusion Protein
HGEGTFTSDLSKQLEKRLVRLFYEWLLNGGHSSQKPPPKGGGGGGGSGGGGSGGGGSADKTHTCPPCPAPELLGGPSVFLFPPKPKDTLMISRTPEVTCVVVDVSHEDPEVKFNWYVDGVEVHNAKTKPREEQYNNASRVVSVLTVLHQDWLNGKEYKCKVSNKALPAPIEKTISKAKGQPREPQVYTLPPSRDELTKNQVSLTCLVKGFYPSDIAVEWESNGQPENNYKTTPPVLDSDGSFFLYSKLTVDKSRWQQGNVFSCSVMHEALHNHYTQKSLSLSPGGGGSGSAHPIPDSSPLLQFGGQVRQRYLYTDDACQTEAHLEIREDGTVGGAADQSPESLLQLKALKPGVIQILGVKTSRFLCQRPDGALYGSLHFDPEACSFRELLLEDGYNVYQSEAHGLPLHLCGNKSPHRDPAPRGPARFLPLPGLPPAPPEPPGILAPQPPDVGSSDPLSMVYPSQGRSPSYAS

SEQ ID NO: 3864 - protein, 474 aa, Artificial Sequence
  Fusion Protein
HGEGTFTSDLSKQLEKRLVRLFYEWLLNGGHSSQKPPPKGGGGGGGSGGGGSGGGGSAESKYGPPCPPCPAPEFEGGPSVFLFPPKPKDTLMISRTPEVTCVVVDVSQEDPEVQFNWYVDGVEVHNAKTKPREEQFNSTYRVVSVLTVLHQDWLNGKEYKCKVSNKGLPSSIEKTISKAKGQPREPQVYTLPPSQEEMTKNQVSLTCLVKGFYPSDIAVEWESNGQPENNYKTTPPVLDSDGSFFLYSRLTVDKSRWQEGNVFSCSVMHEALHNHYTQKSLSLSLGGGGSGSAHPIPDSSPLLQFGGQVRQRYLYTDDACQTEAHLEIREDGTVGGAADQSPESLLQLKALKPGVIQILGVKTSRFLCQRPDGALYGSLHFDPEACSFRELLLEDGYNVYQSEAHGLPLHLPGCKSPHRDPAPRGPARFLPLPGLPPAPPEPPGILAPQPPDVGSSDPLSMVYPSQGRSPSYAS

SEQ ID NO: 3865 - protein, 473 aa, Artificial Sequence
  Fusion Protein
HGEGTFTSDLSKQLEKRLVRLFYEWLLNGGHSSQKPPPKGGGGGGGSGGGGSGGGGSAESKYGPPCPPCPAPEFEGGPSVFLFPPKPKDTLMISRTPEVTCVVVDVSQEDPEVQFNWYVDGVEVHNAKTKPREEQFNSTYRVVSVLTVLHQDWLNGKEYKCKVSNKGLPSSIEKTISKAKGQPREPQVYTLPPSQEEMTKNQVSLTCLVKGFYPSDIAVEWESNGQPENNYKTTPPVLDSDGSFFLYSRLTVDKSRWQEGNVFSCSVMHEALHNHYTQKSLSLSLGGGGSGSAHPIPDSSPLLQFGGQVRQRYLYTDDACQTEAHLEIREDGTVGGAADQSPESLLQLKALKPGVIQILGVKTSRFLCQRPDGALYGSLHFDPEACSFRELLLEDGYNVYQSEAHGLPLHLCGNKSPHRDPAPRGPARFLPLPGLPPAPPEPPGILAPQPPDVGSSDPLSMVGSQGRSPSYAS

SEQ ID NO: 3866 - protein, 474 aa, Artificial Sequence
  Fusion Protein
HGEGTFTSDLSKQLEKRLVRLFYEWLLNGGHSSQKPPPKGGGGGGGSGGGGSGGGGSAESKYGPPCPPCPAPEFEGGPSVFLFPPKPKDTLMISRTPEVTCVVVDVSQEDPEVQFNWYVDGVEVHNAKTKPREEQFNSTYRVVSVLTVLHQDWLNGKEYKCKVSNKGLPSSIEKTISKAKGQPREPQVYTLPPSQEEMTKNQVSLTCLVKGFYPSDIAVEWESNGQPENNYKTTPPVLDSDGSFFLYSRLTVDKSRWQEGNVFSCSVMHEALHNHYTQKSLSLSLGGGGSGSAHPIPDSSPLLQFGGQVRQRYLYTDDACQTEAHLEIREDGTVGGAADQSPESLLQLKALKPGVIQILGVKTSRFLCQRPDGALYGSLHFDPEACSFRELLLEDGYNVYQSEAHGLPLHLCGNKSPHRDPAPRGPARFLPLPGLPPAPPEPPGILAPQPPDVGSSDPLSMVYPSQGRSPSYAS

SEQ ID NO: 3867 - protein, 471 aa, Artificial Sequence
  Fusion Protein
HGEGTFTSDLSKQLEKRLVRLFYEWLKNGGHSSGKPPPKGGGGGGGSGGGGSGGGGSADKTHTCPPCPAPEAAGGPSVFLFPPKPKDTLMISRTPEVTCVVVDVSHEDPEVKFNWYVDGVEVHNAKTKPREEQYNSTYRVVSVLTVLHQDWLNGKEYKCKVSNKALPAPIEKTISKAKGQPREPQVYTLPPSRDELTKNQVSLTCLVKGFYPSDIAVEWESNGQPENNYKTTPPVLDSDGSFFLYSKLTVDKSRWQQGNVFSCSVMHEALHNHYTQKSLSLSPGGGGSGSAHPIPDSSPLLQFGGQVRQRYLYTDDACQTEAHLEIREDGTVGGAADQSPESLLQLKALKPGVIQILGVKTSRFLCQRPDGALYGSLHFDPEACSFRELLLEDGYNVYQSEAHGLPLHLPGCKSPHRDPAPRGPARFLPLPGLPPAPPEPPGILAPQPPDVGSSDPLSMVGSQGRSPSYAS

SEQ ID NO: 3868 - protein, 472 aa, Artificial Sequence
  Fusion Protein
HGEGTFTSDLSKQLEKRLVRLFYEWLKNGGHSSGKPPPKGGGGGGGSGGGGSGGGGSADKTHTCPPCPAPEAAGGPSVFLFPPKPKDTLMISRTPEVTCVVVDVSHEDPEVKFNWYVDGVEVHNAKTKPREEQYNSTYRVVSVLTVLHQDWLNGKEYKCKVSNKALPAPIEKTISKAKGQPREPQVYTLPPSRDELTKNQVSLTCLVKGFYPSDIAVEWESNGQPENNYKTTPPVLDSDGSFFLYSKLTVDKSRWQQGNVFSCSVMHEALHNHYTQKSLSLSPGGGGSGSAHPIPDSSPLLQFGGQVRQRYLYTDDACQTEAHLEIREDGTVGGAADQSPESLLQLKALKPGVIQILGVKTSRFLCQRPDGALYGSLHFDPEACSFRELLLEDGYNVYQSEAHGLPLHLPGCKSPHRDPAPRGPARFLPLPGLPPAPPEPPGILAPQPPDVGSSDPLSMVYPSQGRSPSYAS

SEQ ID NO: 3869 - protein, 471 aa, Artificial Sequence
  Fusion Protein
HGEGTFTSDLSKQLEKRLVRLFYEWLKNGGHSSGKPPPKGGGGGGGSGGGGSGGGGSADKTHTCPPCPAPEAAGGPSVFLFPPKPKDTLMISRTPEVTCVVVDVSHEDPEVKFNWYVDGVEVHNAKTKPREEQYNSTYRVVSVLTVLHQDWLNGKEYKCKVSNKALPAPIEKTISKAKGQPREPQVYTLPPSRDELTKNQVSLTCLVKGFYPSDIAVEWESNGQPENNYKTTPPVLDSDGSFFLYSKLTVDKSRWQQGNVFSCSVMHEALHNHYTQKSLSLSPGGGGSGSAHPIPDSSPLLQFGGQVRQRYLYTDDACQTEAHLEIREDGTVGGAADQSPESLLQLKALKPGVIQILGVKTSRFLCQRPDGALYGSLHFDPEACSFRELLLEDGYNVYQSEAHGLPLHLCGNKSPHRDPAPRGPARFLPLPGLPPAPPEPPGILAPQPPDVGSSDPLSMVGSQGRSPSYAS

SEQ ID NO: 3870 - protein, 472 aa, Artificial Sequence
  Fusion Protein
HGEGTFTSDLSKQLEKRLVRLFYEWLKNGGHSSGKPPPKGGGGGGGSGGGGSGGGGSADKTHTCPPCPAPEAAGGPSVFLFPPKPKDTLMISRTPEVTCVVVDVSHEDPEVKFNWYVDGVEVHNAKTKPREEQYNSTYRVVSVLTVLHQDWLNGKEYKCKVSNKALPAPIEKTISKAKGQPREPQVYTLPPSRDELTKNQVSLTCLVKGFYPSDIAVEWESNGQPENNYKTTPPVLDSDGSFFLYSKLTVDKSRWQQGNVFSCSVMHEALHNHYTQKSLSLSPGGGGSGSAHPIPDSSPLLQFGGQVRQRYLYTDDACQTEAHLEIREDGTVGGAADQSPESLLQLKALKPGVIQILGVKTSRFLCQRPDGALYGSLHFDPEACSFRELLLEDGYNVYQSEAHGLPLHLCGNKSPHRDPAPRGPARFLPLPGLPPAPPEPPGILAPQPPDVGSSDPLSMVYPSQGRSPSYAS

SEQ ID NO: 3871 - protein, 471 aa, Artificial Sequence
  Fusion Protein
HGEGTFTSDLSKQLEKRLVRLFYEWLKNGGHSSGKPPPKGGGGGGGSGGGGSGGGGSADKTHTCPPCPAPELLGGPSVFLFPPKPKDTLMISRTPEVTCVVVDVSHEDPEVKFNWYVDGVEVHNAKTKPREEQYNNASRVVSVLTVLHQDWLNGKEYKCKVSNKALPAPIEKTISKAKGQPREPQVYTLPPSRDELTKNQVSLTCLVKGFYPSDIAVEWESNGQPENNYKTTPPVLDSDGSFFLYSKLTVDKSRWQQGNVFSCSVMHEALHNHYTQKSLSLSPGGGGSGSAHPIPDSSPLLQFGGQVRQRYLYTDDACQTEAHLEIREDGTVGGAADQSPESLLQLKALKPGVIQILGVKTSRFLCQRPDGALYGSLHFDPEACSFRELLLEDGYNVYQSEAHGLPLHLPGCKSPHRDPAPRGPARFLPLPGLPPAPPEPPGILAPQPPDVGSSDPLSMVGSQGRSPSYAS

SEQ ID NO: 3872 - protein, 472 aa, Artificial Sequence
  Fusion Protein
HGEGTFTSDLSKQLEKRLVRLFYEWLKNGGHSSGKPPPKGGGGGGGSGGGGSGGGGSADKTHTCPPCPAPELLGGPSVFLFPPKPKDTLMISRTPEVTCVVVDVSHEDPEVKFNWYVDGVEVHNAKTKPREEQYNNASRVVSVLTVLHQDWLNGKEYKCKVSNKALPAPIEKTISKAKGQPREPQVYTLPPSRDELTKNQVSLTCLVKGFYPSDIAVEWESNGQPENNYKTTPPVLDSDGSFFLYSKLTVDKSRWQQGNVFSCSVMHEALHNHYTQKSLSLSPGGGGSGSAHPIPDSSPLLQFGGQVRQRYLYTDDACQTEAHLEIREDGTVGGAADQSPESLLQLKALKPGVIQILGVKTSRFLCQRPDGALYGSLHFDPEACSFRELLLEDGYNVYQSEAHGLPLHLPGCKSPHRDPAPRGPARFLPLPGLPPAPPEPPGILAPQPPDVGSSDPLSMVYPSQGRSPSYAS

SEQ ID NO: 3873 - protein, 471 aa, Artificial Sequence
  Fusion Protein
HGEGTFTSDLSKQLEKRLVRLFYEWLKNGGHSSGKPPPKGGGGGGGSGGGGSGGGGSADKTHTCPPCPAPELLGGPSVFLFPPKPKDTLMISRTPEVTCVVVDVSHEDPEVKFNWYVDGVEVHNAKTKPREEQYNNASRVVSVLTVLHQDWLNGKEYKCKVSNKALPAPIEKTISKAKGQPREPQVYTLPPSRDELTKNQVSLTCLVKGFYPSDIAVEWESNGQPENNYKTTPPVLDSDGSFFLYSKLTVDKSRWQQGNVFSCSVMHEALHNHYTQKSLSLSPGGGGSGSAHPIPDSSPLLQFGGQVRQRYLYTDDACQTEAHLEIREDGTVGGAADQSPESLLQLKALKPGVIQILGVKTSRFLCQRPDGALYGSLHFDPEACSFRELLLEDGYNVYQSEAHGLPLHLCGNKSPHRDPAPRGPARFLPLPGLPPAPPEPPGILAPQPPDVGSSDPLSMVGSQGRSPSYAS

SEQ ID NO: 3874 - protein, 472 aa, Artificial Sequence
  Fusion Protein
HGEGTFTSDLSKQLEKRLVRLFYEWLKNGGHSSGKPPPKGGGGGGGSGGGGSGGGGSADKTHTCPPCPAPELLGGPSVFLFPPKPKDTLMISRTPEVTCVVVDVSHEDPEVKFNWYVDGVEVHNAKTKPREEQYNNASRVVSVLTVLHQDWLNGKEYKCKVSNKALPAPIEKTISKAKGQPREPQVYTLPPSRDELTKNQVSLTCLVKGFYPSDIAVEWESNGQPENNYKTTPPVLDSDGSFFLYSKLTVDKSRWQQGNVFSCSVMHEALHNHYTQKSLSLSPGGGGSGSAHPIPDSSPLLQFGGQVRQRYLYTDDACQTEAHLEIREDGTVGGAADQSPESLLQLKALKPGVIQILGVKTSRFLCQRPDGALYGSLHFDPEACSFRELLLEDGYNVYQSEAHGLPLHLCGNKSPHRDPAPRGPARFLPLPGLPPAPPEPPGILAPQPPDVGSSDPLSMVYPSQGRSPSYAS

SEQ ID NO: 3875 - protein, 474 aa, Artificial Sequence
  Fusion Protein
HGEGTFTSDLSKQLEKRLVRLFYEWLKNGGHSSGKPPPKGGGGGGGSGGGGSGGGGSAESKYGPPCPPCPAPEFEGGPSVFLFPPKPKDTLMISRTPEVTCVVVDVSQEDPEVQFNWYVDGVEVHNAKTKPREEQFNSTYRVVSVLTVLHQDWLNGKEYKCKVSNKGLPSSIEKTISKAKGQPREPQVYTLPPSQEEMTKNQVSLTCLVKGFYPSDIAVEWESNGQPENNYKTTPPVLDSDGSFFLYSRLTVDKSRWQEGNVFSCSVMHEALHNHYTQKSLSLSLGGGGSGSAHPIPDSSPLLQFGGQVRQRYLYTDDACQTEAHLEIREDGTVGGAADQSPESLLQLKALKPGVIQILGVKTSRFLCQRPDGALYGSLHFDPEACSFRELLLEDGYNVYQSEAHGLPLHLPGCKSPHRDPAPRGPARFLPLPGLPPAPPEPPGILAPQPPDVGSSDPLSMVYPSQGRSPSYAS

SEQ ID NO: 3876 - protein, 473 aa, Artificial Sequence
  Fusion Protein
HGEGTFTSDLSKQLEKRLVRLFYEWLKNGGHSSGKPPPKGGGGGGGSGGGGSGGGGSAESKYGPPCPPCPAPEFEGGPSVFLFPPKPKDTLMISRTPEVTCVVVDVSQEDPEVQFNWYVDGVEVHNAKTKPREEQFNSTYRVVSVLTVLHQDWLNGKEYKCKVSNKGLPSSIEKTISKAKGQPREPQVYTLPPSQEEMTKNQVSLTCLVKGFYPSDIAVEWESNGQPENNYKTTPPVLDSDGSFFLYSRLTVDKSRWQEGNVFSCSVMHEALHNHYTQKSLSLSLGGGGSGSAHPIPDSSPLLQFGGQVRQRYLYTDDACQTEAHLEIREDGTVGGAADQSPESLLQLKALKPGVIQILGVKTSRFLCQRPDGALYGSLHFDPEACSFRELLLEDGYNVYQSEAHGLPLHLCGNKSPHRDPAPRGPARFLPLPGLPPAPPEPPGILAPQPPDVGSSDPLSMVGSQGRSPSYAS

SEQ ID NO: 3877 - protein, 474 aa, Artificial Sequence
  Fusion Protein
HGEGTFTSDLSKQLEKRLVRLFYEWLKNGGHSSGKPPPKGGGGGGGSGGGGSGGGGSAESKYGPPCPPCPAPEFEGGPSVFLFPPKPKDTLMISRTPEVTCVVVDVSQEDPEVQFNWYVDGVEVHNAKTKPREEQFNSTYRVVSVLTVLHQDWLNGKEYKCKVSNKGLPSSIEKTISKAKGQPREPQVYTLPPSQEEMTKNQVSLTCLVKGFYPSDIAVEWESNGQPENNYKTTPPVLDSDGSFFLYSRLTVDKSRWQEGNVFSCSVMHEALHNHYTQKSLSLSLGGGGSGSAHPIPDSSPLLQFGGQVRQRYLYTDDACQTEAHLEIREDGTVGGAADQSPESLLQLKALKPGVIQILGVKTSRFLCQRPDGALYGSLHFDPEACSFRELLLEDGYNVYQSEAHGLPLHLCGNKSPHRDPAPRGPARFLPLPGLPPAPPEPPGILAPQPPDVGSSDPLSMVYPSQGRSPSYAS

SEQ ID NO: 3878 - protein, 471 aa, Artificial Sequence
  Fusion Protein
YGEGTFTSDKSKLLEKRLVRLFIEWLIAGGHSSGKPPPKGGGGGGGSGGGGSGGGGSADKTHTCPPCPAPEAAGGPSVFLFPPKPKDTLMISRTPEVTCVVVDVSHEDPEVKFNWYVDGVEVHNAKTKPREEQYNSTYRVVSVLTVLHQDWLNGKEYKCKVSNKALPAPIEKTISKAKGQPREPQVYTLPPSRDELTKNQVSLTCLVKGFYPSDIAVEWESNGQPENNYKTTPPVLDSDGSFFLYSKLTVDKSRWQQGNVFSCSVMHEALHNHYTQKSLSLSPGGGGSGSAHPIPDSSPLLQFGGQVRQRYLYTDDACQTEAHLEIREDGTVGGAADQSPESLLQLKALKPGVIQILGVKTSRFLCQRPDGALYGSLHFDPEACSFRELLLEDGYNVYQSEAHGLPLHLPGCKSPHRDPAPRGPARFLPLPGLPPAPPEPPGILAPQPPDVGSSDPLSMVGSQGRSPSYAS

SEQ ID NO: 3879 - protein, 472 aa, Artificial Sequence
  Fusion Protein
YGEGTFTSDKSKLLEKRLVRLFIEWLIAGGHSSGKPPPKGGGGGGGSGGGGSGGGGSADKTHTCPPCPAPEAAGGPSVFLFPPKPKDTLMISRTPEVTCVVVDVSHEDPEVKFNWYVDGVEVHNAKTKPREEQYNSTYRVVSVLTVLHQDWLNGKEYKCKVSNKALPAPIEKTISKAKGQPREPQVYTLPPSRDELTKNQVSLTCLVKGFYPSDIAVEWESNGQPENNYKTTPPVLDSDGSFFLYSKLTVDKSRWQQGNVFSCSVMHEALHNHYTQKSLSLSPGGGGSGSAHPIPDSSPLLQFGGQVRQRYLYTDDACQTEAHLEIREDGTVGGAADQSPESLLQLKALKPGVIQILGVKTSRFLCQRPDGALYGSLHFDPEACSFRELLLEDGYNVYQSEAHGLPLHLPGCKSPHRDPAPRGPARFLPLPGLPPAPPEPPGILAPQPPDVGSSDPLSMVYPSQGRSPSYAS

SEQ ID NO: 3880 - protein, 471 aa, Artificial Sequence
  Fusion Protein
YGEGTFTSDKSKLLEKRLVRLFIEWLIAGGHSSGKPPPKGGGGGGGSGGGGSGGGGSADKTHTCPPCPAPEAAGGPSVFLFPPKPKDTLMISRTPEVTCVVVDVSHEDPEVKFNWYVDGVEVHNAKTKPREEQYNSTYRVVSVLTVLHQDWLNGKEYKCKVSNKALPAPIEKTISKAKGQPREPQVYTLPPSRDELTKNQVSLTCLVKGFYPSDIAVEWESNGQPENNYKTTPPVLDSDGSFFLYSKLTVDKSRWQQGNVFSCSVMHEALHNHYTQKSLSLSPGGGGSGSAHPIPDSSPLLQFGGQVRQRYLYTDDACQTEAHLEIREDGTVGGAADQSPESLLQLKALKPGVIQILGVKTSRFLCQRPDGALYGSLHFDPEACSFRELLLEDGYNVYQSEAHGLPLHLCGNKSPHRDPAPRGPARFLPLPGLPPAPPEPPGILAPQPPDVGSSDPLSMVGSQGRSPSYAS

SEQ ID NO: 3881 - protein, 472 aa, Artificial Sequence
  Fusion Protein
YGEGTFTSDKSKLLEKRLVRLFIEWLIAGGHSSGKPPPKGGGGGGGSGGGGSGGGGSADKTHTCPPCPAPEAAGGPSVFLFPPKPKDTLMISRTPEVTCVVVDVSHEDPEVKFNWYVDGVEVHNAKTKPREEQYNSTYRVVSVLTVLHQDWLNGKEYKCKVSNKALPAPIEKTISKAKGQPREPQVYTLPPSRDELTKNQVSLTCLVKGFYPSDIAVEWESNGQPENNYKTTPPVLDSDGSFFLYSKLTVDKSRWQQGNVFSCSVMHEALHNHYTQKSLSLSPGGGGSGSAHPIPDSSPLLQFGGQVRQRYLYTDDACQTEAHLEIREDGTVGGAADQSPESLLQLKALKPGVIQILGVKTSRFLCQRPDGALYGSLHFDPEACSFRELLLEDGYNVYQSEAHGLPLHLCGNKSPHRDPAPRGPARFLPLPGLPPAPPEPPGILAPQPPDVGSSDPLSMVYPSQGRSPSYAS

SEQ ID NO: 3882 - protein, 471 aa, Artificial Sequence
  Fusion Protein
YGEGTFTSDKSKLLEKRLVRLFIEWLIAGGHSSGKPPPKGGGGGGGSGGGGSGGGGSADKTHTCPPCPAPELLGGPSVFLFPPKPKDTLMISRTPEVTCVVVDVSHEDPEVKFNWYVDGVEVHNAKTKPREEQYNNASRVVSVLTVLHQDWLNGKEYKCKVSNKALPAPIEKTISKAKGQPREPQVYTLPPSRDELTKNQVSLTCLVKGFYPSDIAVEWESNGQPENNYKTTPPVLDSDGSFFLYSKLTVDKSRWQQGNVFSCSVMHEALHNHYTQKSLSLSPGGGGSGSAHPIPDSSPLLQFGGQVRQRYLYTDDACQTEAHLEIREDGTVGGAADQSPESLLQLKALKPGVIQILGVKTSRFLCQRPDGALYGSLHFDPEACSFRELLLEDGYNVYQSEAHGLPLHLPGCKSPHRDPAPRGPARFLPLPGLPPAPPEPPGILAPQPPDVGSSDPLSMVGSQGRSPSYAS

SEQ ID NO: 3883 - protein, 472 aa, Artificial Sequence
  Fusion Protein
YGEGTFTSDKSKLLEKRLVRLFIEWLIAGGHSSGKPPPKGGGGGGGSGGGGSGGGGSADKTHTCPPCPAPELLGGPSVFLFPPKPKDTLMISRTPEVTCVVVDVSHEDPEVKFNWYVDGVEVHNAKTKPREEQYNNASRVVSVLTVLHQDWLNGKEYKCKVSNKALPAPIEKTISKAKGQPREPQVYTLPPSRDELTKNQVSLTCLVKGFYPSDIAVEWESNGQPENNYKTTPPVLDSDGSFFLYSKLTVDKSRWQQGNVFSCSVMHEALHNHYTQKSLSLSPGGGGSGSAHPIPDSSPLLQFGGQVRQRYLYTDDACQTEAHLEIREDGTVGGAADQSPESLLQLKALKPGVIQILGVKTSRFLCQRPDGALYGSLHFDPEACSFRELLLEDGYNVYQSEAHGLPLHLPGCKSPHRDPAPRGPARFLPLPGLPPAPPEPPGILAPQPPDVGSSDPLSMVYPSQGRSPSYAS

SEQ ID NO: 3884 - protein, 471 aa, Artificial Sequence
  Fusion Protein
YGEGTFTSDKSKLLEKRLVRLFIEWLIAGGHSSGKPPPKGGGGGGGSGGGGSGGGGSADKTHTCPPCPAPELLGGPSVFLFPPKPKDTLMISRTPEVTCVVVDVSHEDPEVKFNWYVDGVEVHNAKTKPREEQYNNASRVVSVLTVLHQDWLNGKEYKCKVSNKALPAPIEKTISKAKGQPREPQVYTLPPSRDELTKNQVSLTCLVKGFYPSDIAVEWESNGQPENNYKTTPPVLDSDGSFFLYSKLTVDKSRWQQGNVFSCSVMHEALHNHYTQKSLSLSPGGGGSGSAHPIPDSSPLLQFGGQVRQRYLYTDDACQTEAHLEIREDGTVGGAADQSPESLLQLKALKPGVIQILGVKTSRFLCQRPDGALYGSLHFDPEACSFRELLLEDGYNVYQSEAHGLPLHLCGNKSPHRDPAPRGPARFLPLPGLPPAPPEPPGILAPQPPDVGSSDPLSMVGSQGRSPSYAS

SEQ ID NO: 3885 - protein, 472 aa, Artificial Sequence
  Fusion Protein
YGEGTFTSDKSKLLEKRLVRLFIEWLIAGGHSSGKPPPKGGGGGGGSGGGGSGGGGSADKTHTCPPCPAPELLGGPSVFLFPPKPKDTLMISRTPEVTCVVVDVSHEDPEVKFNWYVDGVEVHNAKTKPREEQYNNASRVVSVLTVLHQDWLNGKEYKCKVSNKALPAPIEKTISKAKGQPREPQVYTLPPSRDELTKNQVSLTCLVKGFYPSDIAVEWESNGQPENNYKTTPPVLDSDGSFFLYSKLTVDKSRWQQGNVFSCSVMHEALHNHYTQKSLSLSPGGGGSGSAHPIPDSSPLLQFGGQVRQRYLYTDDACQTEAHLEIREDGTVGGAADQSPESLLQLKALKPGVIQILGVKTSRFLCQRPDGALYGSLHFDPEACSFRELLLEDGYNVYQSEAHGLPLHLCGNKSPHRDPAPRGPARFLPLPGLPPAPPEPPGILAPQPPDVGSSDPLSMVYPSQGRSPSYAS

SEQ ID NO: 3886 - protein, 474 aa, Artificial Sequence
  Fusion Protein
YGEGTFTSDKSKLLEKRLVRLFIEWLIAGGHSSGKPPPKGGGGGGGSGGGGSGGGGSAESKYGPPCPPCPAPEFEGGPSVFLFPPKPKDTLMISRTPEVTCVVVDVSQEDPEVQFNWYVDGVEVHNAKTKPREEQFNSTYRVVSVLTVLHQDWLNGKEYKCKVSNKGLPSSIEKTISKAKGQPREPQVYTLPPSQEEMTKNQVSLTCLVKGFYPSDIAVEWESNGQPENNYKTTPPVLDSDGSFFLYSRLTVDKSRWQEGNVFSCSVMHEALHNHYTQKSLSLSLGGGGSGSAHPIPDSSPLLQFGGQVRQRYLYTDDACQTEAHLEIREDGTVGGAADQSPESLLQLKALKPGVIQILGVKTSRFLCQRPDGALYGSLHFDPEACSFRELLLEDGYNVYQSEAHGLPLHLPGCKSPHRDPAPRGPARFLPLPGLPPAPPEPPGILAPQPPDVGSSDPLSMVYPSQGRSPSYAS

SEQ ID NO: 3887 - protein, 473 aa, Artificial Sequence
  Fusion Protein
YGEGTFTSDKSKLLEKRLVRLFIEWLIAGGHSSGKPPPKGGGGGGGSGGGGSGGGGSAESKYGPPCPPCPAPEFEGGPSVFLFPPKPKDTLMISRTPEVTCVVVDVSQEDPEVQFNWYVDGVEVHNAKTKPREEQFNSTYRVVSVLTVLHQDWLNGKEYKCKVSNKGLPSSIEKTISKAKGQPREPQVYTLPPSQEEMTKNQVSLTCLVKGFYPSDIAVEWESNGQPENNYKTTPPVLDSDGSFFLYSRLTVDKSRWQEGNVFSCSVMHEALHNHYTQKSLSLSLGGGGSGSAHPIPDSSPLLQFGGQVRQRYLYTDDACQTEAHLEIREDGTVGGAADQSPESLLQLKALKPGVIQILGVKTSRFLCQRPDGALYGSLHFDPEACSFRELLLEDGYNVYQSEAHGLPLHLCGNKSPHRDPAPRGPARFLPLPGLPPAPPEPPGILAPQPPDVGSSDPLSMVGSQGRSPSYAS

SEQ ID NO: 3888 - protein, 474 aa, Artificial Sequence
  Fusion Protein
YGEGTFTSDKSKLLEKRLVRLFIEWLIAGGHSSGKPPPKGGGGGGGSGGGGSGGGGSAESKYGPPCPPCPAPEFEGGPSVFLFPPKPKDTLMISRTPEVTCVVVDVSQEDPEVQFNWYVDGVEVHNAKTKPREEQFNSTYRVVSVLTVLHQDWLNGKEYKCKVSNKGLPSSIEKTISKAKGQPREPQVYTLPPSQEEMTKNQVSLTCLVKGFYPSDIAVEWESNGQPENNYKTTPPVLDSDGSFFLYSRLTVDKSRWQEGNVFSCSVMHEALHNHYTQKSLSLSLGGGGSGSAHPIPDSSPLLQFGGQVRQRYLYTDDACQTEAHLEIREDGTVGGAADQSPESLLQLKALKPGVIQILGVKTSRFLCQRPDGALYGSLHFDPEACSFRELLLEDGYNVYQSEAHGLPLHLCGNKSPHRDPAPRGPARFLPLPGLPPAPPEPPGILAPQPPDVGSSDPLSMVYPSQGRSPSYAS

SEQ ID NO: 3889 - protein, 471 aa, Artificial Sequence
  Fusion Protein
YGEGTFTSDKSKLLEKRLAHLFIEWLIAGGHSSGKPPPKGGGGGGGSGGGGSGGGGSADKTHTCPPCPAPEAAGGPSVFLFPPKPKDTLMISRTPEVTCVVVDVSHEDPEVKFNWYVDGVEVHNAKTKPREEQYNSTYRVVSVLTVLHQDWLNGKEYKCKVSNKALPAPIEKTISKAKGQPREPQVYTLPPSRDELTKNQVSLTCLVKGFYPSDIAVEWESNGQPENNYKTTPPVLDSDGSFFLYSKLTVDKSRWQQGNVFSCSVMHEALHNHYTQKSLSLSPGGGGSGSAHPIPDSSPLLQFGGQVRQRYLYTDDACQTEAHLEIREDGTVGGAADQSPESLLQLKALKPGVIQILGVKTSRFLCQRPDGALYGSLHFDPEACSFRELLLEDGYNVYQSEAHGLPLHLPGCKSPHRDPAPRGPARFLPLPGLPPAPPEPPGILAPQPPDVGSSDPLSMVGSQGRSPSYAS

SEQ ID NO: 3890 - protein, 472 aa, Artificial Sequence
  Fusion Protein
YGEGTFTSDKSKLLEKRLAHLFIEWLIAGGHSSGKPPPKGGGGGGGSGGGGSGGGGSADKTHTCPPCPAPEAAGGPSVFLFPPKPKDTLMISRTPEVTCVVVDVSHEDPEVKFNWYVDGVEVHNAKTKPREEQYNSTYRVVSVLTVLHQDWLNGKEYKCKVSNKALPAPIEKTISKAKGQPREPQVYTLPPSRDELTKNQVSLTCLVKGFYPSDIAVEWESNGQPENNYKTTPPVLDSDGSFFLYSKLTVDKSRWQQGNVFSCSVMHEALHNHYTQKSLSLSPGGGGSGSAHPIPDSSPLLQFGGQVRQRYLYTDDACQTEAHLEIREDGTVGGAADQSPESLLQLKALKPGVIQILGVKTSRFLCQRPDGALYGSLHFDPEACSFRELLLEDGYNVYQSEAHGLPLHLPGCKSPHRDPAPRGPARFLPLPGLPPAPPEPPGILAPQPPDVGSSDPLSMVYPSQGRSPSYAS

SEQ ID NO: 3891 - protein, 471 aa, Artificial Sequence
  Fusion Protein
YGEGTFTSDKSKLLEKRLAHLFIEWLIAGGHSSGKPPPKGGGGGGGSGGGGSGGGGSADKTHTCPPCPAPEAAGGPSVFLFPPKPKDTLMISRTPEVTCVVVDVSHEDPEVKFNWYVDGVEVHNAKTKPREEQYNSTYRVVSVLTVLHQDWLNGKEYKCKVSNKALPAPIEKTISKAKGQPREPQVYTLPPSRDELTKNQVSLTCLVKGFYPSDIAVEWESNGQPENNYKTTPPVLDSDGSFFLYSKLTVDKSRWQQGNVFSCSVMHEALHNHYTQKSLSLSPGGGGSGSAHPIPDSSPLLQFGGQVRQRYLYTDDACQTEAHLEIREDGTVGGAADQSPESLLQLKALKPGVIQILGVKTSRFLCQRPDGALYGSLHFDPEACSFRELLLEDGYNVYQSEAHGLPLHLCGNKSPHRDPAPRGPARFLPLPGLPPAPPEPPGILAPQPPDVGSSDPLSMVGSQGRSPSYAS

SEQ ID NO: 3892 - protein, 472 aa, Artificial Sequence
  Fusion Protein
YGEGTFTSDKSKLLEKRLAHLFIEWLIAGGHSSGKPPPKGGGGGGGSGGGGSGGGGSADKTHTCPPCPAPEAAGGPSVFLFPPKPKDTLMISRTPEVTCVVVDVSHEDPEVKFNWYVDGVEVHNAKTKPREEQYNSTYRVVSVLTVLHQDWLNGKEYKCKVSNKALPAPIEKTISKAKGQPREPQVYTLPPSRDELTKNQVSLTCLVKGFYPSDIAVEWESNGQPENNYKTTPPVLDSDGSFFLYSKLTVDKSRWQQGNVFSCSVMHEALHNHYTQKSLSLSPGGGGSGSAHPIPDSSPLLQFGGQVRQRYLYTDDACQTEAHLEIREDGTVGGAADQSPESLLQLKALKPGVIQILGVKTSRFLCQRPDGALYGSLHFDPEACSFRELLLEDGYNVYQSEAHGLPLHLCGNKSPHRDPAPRGPARFLPLPGLPPAPPEPPGILAPQPPDVGSSDPLSMVYPSQGRSPSYAS

SEQ ID NO: 3893 - protein, 471 aa, Artificial Sequence
  Fusion Protein
YGEGTFTSDKSKLLEKRLAHLFIEWLIAGGHSSGKPPPKGGGGGGGSGGGGSGGGGSADKTHTCPPCPAPELLGGPSVFLFPPKPKDTLMISRTPEVTCVVVDVSHEDPEVKFNWYVDGVEVHNAKTKPREEQYNNASRVVSVLTVLHQDWLNGKEYKCKVSNKALPAPIEKTISKAKGQPREPQVYTLPPSRDELTKNQVSLTCLVKGFYPSDIAVEWESNGQPENNYKTTPPVLDSDGSFFLYSKLTVDKSRWQQGNVFSCSVMHEALHNHYTQKSLSLSPGGGGSGSAHPIPDSSPLLQFGGQVRQRYLYTDDACQTEAHLEIREDGTVGGAADQSPESLLQLKALKPGVIQILGVKTSRFLCQRPDGALYGSLHFDPEACSFRELLLEDGYNVYQSEAHGLPLHLPGCKSPHRDPAPRGPARFLPLPGLPPAPPEPPGILAPQPPDVGSSDPLSMVGSQGRSPSYAS

SEQ ID NO: 3894 - protein, 472 aa, Artificial Sequence
  Fusion Protein
YGEGTFTSDKSKLLEKRLAHLFIEWLIAGGHSSGKPPPKGGGGGGGSGGGGSGGGGSADKTHTCPPCPAPELLGGPSVFLFPPKPKDTLMISRTPEVTCVVVDVSHEDPEVKFNWYVDGVEVHNAKTKPREEQYNNASRVVSVLTVLHQDWLNGKEYKCKVSNKALPAPIEKTISKAKGQPREPQVYTLPPSRDELTKNQVSLTCLVKGFYPSDIAVEWESNGQPENNYKTTPPVLDSDGSFFLYSKLTVDKSRWQQGNVFSCSVMHEALHNHYTQKSLSLSPGGGGSGSAHPIPDSSPLLQFGGQVRQRYLYTDDACQTEAHLEIREDGTVGGAADQSPESLLQLKALKPGVIQILGVKTSRFLCQRPDGALYGSLHFDPEACSFRELLLEDGYNVYQSEAHGLPLHLPGCKSPHRDPAPRGPARFLPLPGLPPAPPEPPGILAPQPPDVGSSDPLSMVYPSQGRSPSYAS

SEQ ID NO: 3895 - protein, 471 aa, Artificial Sequence
  Fusion Protein
YGEGTFTSDKSKLLEKRLAHLFIEWLIAGGHSSGKPPPKGGGGGGGSGGGGSGGGGSADKTHTCPPCPAPELLGGPSVFLFPPKPKDTLMISRTPEVTCVVVDVSHEDPEVKFNWYVDGVEVHNAKTKPREEQYNNASRVVSVLTVLHQDWLNGKEYKCKVSNKALPAPIEKTISKAKGQPREPQVYTLPPSRDELTKNQVSLTCLVKGFYPSDIAVEWESNGQPENNYKTTPPVLDSDGSFFLYSKLTVDKSRWQQGNVFSCSVMHEALHNHYTQKSLSLSPGGGGSGSAHPIPDSSPLLQFGGQVRQRYLYTDDACQTEAHLEIREDGTVGGAADQSPESLLQLKALKPGVIQILGVKTSRFLCQRPDGALYGSLHFDPEACSFRELLLEDGYNVYQSEAHGLPLHLCGNKSPHRDPAPRGPARFLPLPGLPPAPPEPPGILAPQPPDVGSSDPLSMVGSQGRSPSYAS

SEQ ID NO: 3896 - protein, 472 aa, Artificial Sequence
  Fusion Protein
YGEGTFTSDKSKLLEKRLAHLFIEWLIAGGHSSGKPPPKGGGGGGGSGGGGSGGGGSADKTHTCPPCPAPELLGGPSVFLFPPKPKDTLMISRTPEVTCVVVDVSHEDPEVKFNWYVDGVEVHNAKTKPREEQYNNASRVVSVLTVLHQDWLNGKEYKCKVSNKALPAPIEKTISKAKGQPREPQVYTLPPSRDELTKNQVSLTCLVKGFYPSDIAVEWESNGQPENNYKTTPPVLDSDGSFFLYSKLTVDKSRWQQGNVFSCSVMHEALHNHYTQKSLSLSPGGGGSGSAHPIPDSSPLLQFGGQVRQRYLYTDDACQTEAHLEIREDGTVGGAADQSPESLLQLKALKPGVIQILGVKTSRFLCQRPDGALYGSLHFDPEACSFRELLLEDGYNVYQSEAHGLPLHLCGNKSPHRDPAPRGPARFLPLPGLPPAPPEPPGILAPQPPDVGSSDPLSMVYPSQGRSPSYAS

SEQ ID NO: 3897 - protein, 474 aa, Artificial Sequence
  Fusion Protein
YGEGTFTSDKSKLLEKRLAHLFIEWLIAGGHSSGKPPPKGGGGGGGSGGGGSGGGGSAESKYGPPCPPCPAPEFEGGPSVFLFPPKPKDTLMISRTPEVTCVVVDVSQEDPEVQFNWYVDGVEVHNAKTKPREEQFNSTYRVVSVLTVLHQDWLNGKEYKCKVSNKGLPSSIEKTISKAKGQPREPQVYTLPPSQEEMTKNQVSLTCLVKGFYPSDIAVEWESNGQPENNYKTTPPVLDSDGSFFLYSRLTVDKSRWQEGNVFSCSVMHEALHNHYTQKSLSLSLGGGGSGSAHPIPDSSPLLQFGGQVRQRYLYTDDACQTEAHLEIREDGTVGGAADQSPESLLQLKALKPGVIQILGVKTSRFLCQRPDGALYGSLHFDPEACSFRELLLEDGYNVYQSEAHGLPLHLPGCKSPHRDPAPRGPARFLPLPGLPPAPPEPPGILAPQPPDVGSSDPLSMVYPSQGRSPSYAS

SEQ ID NO: 3898 - protein, 473 aa, Artificial Sequence
  Fusion Protein
YGEGTFTSDKSKLLEKRLAHLFIEWLIAGGHSSGKPPPKGGGGGGGSGGGGSGGGGSAESKYGPPCPPCPAPEFEGGPSVFLFPPKPKDTLMISRTPEVTCVVVDVSQEDPEVQFNWYVDGVEVHNAKTKPREEQFNSTYRVVSVLTVLHQDWLNGKEYKCKVSNKGLPSSIEKTISKAKGQPREPQVYTLPPSQEEMTKNQVSLTCLVKGFYPSDIAVEWESNGQPENNYKTTPPVLDSDGSFFLYSRLTVDKSRWQEGNVFSCSVMHEALHNHYTQKSLSLSLGGGGSGSAHPIPDSSPLLQFGGQVRQRYLYTDDACQTEAHLEIREDGTVGGAADQSPESLLQLKALKPGVIQILGVKTSRFLCQRPDGALYGSLHFDPEACSFRELLLEDGYNVYQSEAHGLPLHLCGNKSPHRDPAPRGPARFLPLPGLPPAPPEPPGILAPQPPDVGSSDPLSMVGSQGRSPSYAS

SEQ ID NO: 3899 - protein, 474 aa, Artificial Sequence
  Fusion Protein
YGEGTFTSDKSKLLEKRLAHLFIEWLIAGGHSSGKPPPKGGGGGGGSGGGGSGGGGSAESKYGPPCPPCPAPEFEGGPSVFLFPPKPKDTLMISRTPEVTCVVVDVSQEDPEVQFNWYVDGVEVHNAKTKPREEQFNSTYRVVSVLTVLHQDWLNGKEYKCKVSNKGLPSSIEKTISKAKGQPREPQVYTLPPSQEEMTKNQVSLTCLVKGFYPSDIAVEWESNGQPENNYKTTPPVLDSDGSFFLYSRLTVDKSRWQEGNVFSCSVMHEALHNHYTQKSLSLSLGGGGSGSAHPIPDSSPLLQFGGQVRQRYLYTDDACQTEAHLEIREDGTVGGAADQSPESLLQLKALKPGVIQILGVKTSRFLCQRPDGALYGSLHFDPEACSFRELLLEDGYNVYQSEAHGLPLHLCGNKSPHRDPAPRGPARFLPLPGLPPAPPEPPGILAPQPPDVGSSDPLSMVYPSQGRSPSYAS

SEQ ID NO: 3900 - protein, 471 aa, Artificial Sequence
  Fusion Protein
HGEGTFTSDKSKQLEKRLVRLFYEWLKAGGHSKIKYPPKGGGGGGGSGGGGSGGGGSADKTHTCPPCPAPEAAGGPSVFLFPPKPKDTLMISRTPEVTCVVVDVSHEDPEVKFNWYVDGVEVHNAKTKPREEQYNSTYRVVSVLTVLHQDWLNGKEYKCKVSNKALPAPIEKTISKAKGQPREPQVYTLPPSRDELTKNQVSLTCLVKGFYPSDIAVEWESNGQPENNYKTTPPVLDSDGSFFLYSKLTVDKSRWQQGNVFSCSVMHEALHNHYTQKSLSLSPGGGGSGSAHPIPDSSPLLQFGGQVRQRYLYTDDACQTEAHLEIREDGTVGGAADQSPESLLQLKALKPGVIQILGVKTSRFLCQRPDGALYGSLHFDPEACSFRELLLEDGYNVYQSEAHGLPLHLPGCKSPHRDPAPRGPARFLPLPGLPPAPPEPPGILAPQPPDVGSSDPLSMVGSQGRSPSYAS

SEQ ID NO: 3901 - protein, 472 aa, Artificial Sequence
  Fusion Protein
HGEGTFTSDKSKQLEKRLVRLFYEWLKAGGHSKIKYPPKGGGGGGGSGGGGSGGGGSADKTHTCPPCPAPEAAGGPSVFLFPPKPKDTLMISRTPEVTCVVVDVSHEDPEVKFNWYVDGVEVHNAKTKPREEQYNSTYRVVSVLTVLHQDWLNGKEYKCKVSNKALPAPIEKTISKAKGQPREPQVYTLPPSRDELTKNQVSLTCLVKGFYPSDIAVEWESNGQPENNYKTTPPVLDSDGSFFLYSKLTVDKSRWQQGNVFSCSVMHEALHNHYTQKSLSLSPGGGGSGSAHPIPDSSPLLQFGGQVRQRYLYTDDACQTEAHLEIREDGTVGGAADQSPESLLQLKALKPGVIQILGVKTSRFLCQRPDGALYGSLHFDPEACSFRELLLEDGYNVYQSEAHGLPLHLPGCKSPHRDPAPRGPARFLPLPGLPPAPPEPPGILAPQPPDVGSSDPLSMVYPSQGRSPSYAS

SEQ ID NO: 3902 - protein, 471 aa, Artificial Sequence
  Fusion Protein
HGEGTFTSDKSKQLEKRLVRLFYEWLKAGGHSKIKYPPKGGGGGGGSGGGGSGGGGSADKTHTCPPCPAPEAAGGPSVFLFPPKPKDTLMISRTPEVTCVVVDVSHEDPEVKFNWYVDGVEVHNAKTKPREEQYNSTYRVVSVLTVLHQDWLNGKEYKCKVSNKALPAPIEKTISKAKGQPREPQVYTLPPSRDELTKNQVSLTCLVKGFYPSDIAVEWESNGQPENNYKTTPPVLDSDGSFFLYSKLTVDKSRWQQGNVFSCSVMHEALHNHYTQKSLSLSPGGGGSGSAHPIPDSSPLLQFGGQVRQRYLYTDDACQTEAHLEIREDGTVGGAADQSPESLLQLKALKPGVIQILGVKTSRFLCQRPDGALYGSLHFDPEACSFRELLLEDGYNVYQSEAHGLPLHLCGNKSPHRDPAPRGPARFLPLPGLPPAPPEPPGILAPQPPDVGSSDPLSMVGSQGRSPSYAS

SEQ ID NO: 3903 - protein, 472 aa, Artificial Sequence
  Fusion Protein
HGEGTFTSDKSKQLEKRLVRLFYEWLKAGGHSKIKYPPKGGGGGGGSGGGGSGGGGSADKTHTCPPCPAPEAAGGPSVFLFPPKPKDTLMISRTPEVTCVVVDVSHEDPEVKFNWYVDGVEVHNAKTKPREEQYNSTYRVVSVLTVLHQDWLNGKEYKCKVSNKALPAPIEKTISKAKGQPREPQVYTLPPSRDELTKNQVSLTCLVKGFYPSDIAVEWESNGQPENNYKTTPPVLDSDGSFFLYSKLTVDKSRWQQGNVFSCSVMHEALHNHYTQKSLSLSPGGGGSGSAHPIPDSSPLLQFGGQVRQRYLYTDDACQTEAHLEIREDGTVGGAADQSPESLLQLKALKPGVIQILGVKTSRFLCQRPDGALYGSLHFDPEACSFRELLLEDGYNVYQSEAHGLPLHLCGNKSPHRDPAPRGPARFLPLPGLPPAPPEPPGILAPQPPDVGSSDPLSMVYPSQGRSPSYAS

SEQ ID NO: 3904 - protein, 471 aa, Artificial Sequence
  Fusion Protein
HGEGTFTSDKSKQLEKRLVRLFYEWLKAGGHSKIKYPPKGGGGGGGSGGGGSGGGGSADKTHTCPPCPAPELLGGPSVFLFPPKPKDTLMISRTPEVTCVVVDVSHEDPEVKFNWYVDGVEVHNAKTKPREEQYNNASRVVSVLTVLHQDWLNGKEYKCKVSNKALPAPIEKTISKAKGQPREPQVYTLPPSRDELTKNQVSLTCLVKGFYPSDIAVEWESNGQPENNYKTTPPVLDSDGSFFLYSKLTVDKSRWQQGNVFSCSVMHEALHNHYTQKSLSLSPGGGGSGSAHPIPDSSPLLQFGGQVRQRYLYTDDACQTEAHLEIREDGTVGGAADQSPESLLQLKALKPGVIQILGVKTSRFLCQRPDGALYGSLHFDPEACSFRELLLEDGYNVYQSEAHGLPLHLPGCKSPHRDPAPRGPARFLPLPGLPPAPPEPPGILAPQPPDVGSSDPLSMVGSQGRSPSYAS

SEQ ID NO: 3905 - protein, 472 aa, Artificial Sequence
  Fusion Protein
HGEGTFTSDKSKQLEKRLVRLFYEWLKAGGHSKIKYPPKGGGGGGGSGGGGSGGGGSADKTHTCPPCPAPELLGGPSVFLFPPKPKDTLMISRTPEVTCVVVDVSHEDPEVKFNWYVDGVEVHNAKTKPREEQYNNASRVVSVLTVLHQDWLNGKEYKCKVSNKALPAPIEKTISKAKGQPREPQVYTLPPSRDELTKNQVSLTCLVKGFYPSDIAVEWESNGQPENNYKTTPPVLDSDGSFFLYSKLTVDKSRWQQGNVFSCSVMHEALHNHYTQKSLSLSPGGGGSGSAHPIPDSSPLLQFGGQVRQRYLYTDDACQTEAHLEIREDGTVGGAADQSPESLLQLKALKPGVIQILGVKTSRFLCQRPDGALYGSLHFDPEACSFRELLLEDGYNVYQSEAHGLPLHLPGCKSPHRDPAPRGPARFLPLPGLPPAPPEPPGILAPQPPDVGSSDPLSMVYPSQGRSPSYAS

SEQ ID NO: 3906 - protein, 471 aa, Artificial Sequence
  Fusion Protein
HGEGTFTSDKSKQLEKRLVRLFYEWLKAGGHSKIKYPPKGGGGGGGSGGGGSGGGGSADKTHTCPPCPAPELLGGPSVFLFPPKPKDTLMISRTPEVTCVVVDVSHEDPEVKFNWYVDGVEVHNAKTKPREEQYNNASRVVSVLTVLHQDWLNGKEYKCKVSNKALPAPIEKTISKAKGQPREPQVYTLPPSRDELTKNQVSLTCLVKGFYPSDIAVEWESNGQPENNYKTTPPVLDSDGSFFLYSKLTVDKSRWQQGNVFSCSVMHEALHNHYTQKSLSLSPGGGGSGSAHPIPDSSPLLQFGGQVRQRYLYTDDACQTEAHLEIREDGTVGGAADQSPESLLQLKALKPGVIQILGVKTSRFLCQRPDGALYGSLHFDPEACSFRELLLEDGYNVYQSEAHGLPLHLCGNKSPHRDPAPRGPARFLPLPGLPPAPPEPPGILAPQPPDVGSSDPLSMVGSQGRSPSYAS

SEQ ID NO: 3907 - protein, 472 aa, Artificial Sequence
  Fusion Protein
HGEGTFTSDKSKQLEKRLVRLFYEWLKAGGHSKIKYPPKGGGGGGGSGGGGSGGGGSADKTHTCPPCPAPELLGGPSVFLFPPKPKDTLMISRTPEVTCVVVDVSHEDPEVKFNWYVDGVEVHNAKTKPREEQYNNASRVVSVLTVLHQDWLNGKEYKCKVSNKALPAPIEKTISKAKGQPREPQVYTLPPSRDELTKNQVSLTCLVKGFYPSDIAVEWESNGQPENNYKTTPPVLDSDGSFFLYSKLTVDKSRWQQGNVFSCSVMHEALHNHYTQKSLSLSPGGGGSGSAHPIPDSSPLLQFGGQVRQRYLYTDDACQTEAHLEIREDGTVGGAADQSPESLLQLKALKPGVIQILGVKTSRFLCQRPDGALYGSLHFDPEACSFRELLLEDGYNVYQSEAHGLPLHLCGNKSPHRDPAPRGPARFLPLPGLPPAPPEPPGILAPQPPDVGSSDPLSMVYPSQGRSPSYAS

SEQ ID NO: 3908 - protein, 473 aa, Artificial Sequence
  Fusion Protein
HGEGTFTSDKSKQLEKRLVRLFYEWLKAGGHSKIKYPPKGGGGGGGSGGGGSGGGGSAESKYGPPCPPCPAPEFEGGPSVFLFPPKPKDTLMISRTPEVTCVVVDVSQEDPEVQFNWYVDGVEVHNAKTKPREEQFNSTYRVVSVLTVLHQDWLNGKEYKCKVSNKGLPSSIEKTISKAKGQPREPQVYTLPPSQEEMTKNQVSLTCLVKGFYPSDIAVEWESNGQPENNYKTTPPVLDSDGSFFLYSRLTVDKSRWQEGNVFSCSVMHEALHNHYTQKSLSLSLGGGGSGSAHPIPDSSPLLQFGGQVRQRYLYTDDACQTEAHLEIREDGTVGGAADQSPESLLQLKALKPGVIQILGVKTSRFLCQRPDGALYGSLHFDPEACSFRELLLEDGYNVYQSEAHGLPLHLPGCKSPHRDPAPRGPARFLPLPGLPPAPPEPPGILAPQPPDVGSSDPLSMVGSQGRSPSYAS

SEQ ID NO: 3909 - protein, 474 aa, Artificial Sequence
  Fusion Protein
HGEGTFTSDKSKQLEKRLVRLFYEWLKAGGHSKIKYPPKGGGGGGGSGGGGSGGGGSAESKYGPPCPPCPAPEFEGGPSVFLFPPKPKDTLMISRTPEVTCVVVDVSQEDPEVQFNWYVDGVEVHNAKTKPREEQFNSTYRVVSVLTVLHQDWLNGKEYKCKVSNKGLPSSIEKTISKAKGQPREPQVYTLPPSQEEMTKNQVSLTCLVKGFYPSDIAVEWESNGQPENNYKTTPPVLDSDGSFFLYSRLTVDKSRWQEGNVFSCSVMHEALHNHYTQKSLSLSLGGGGSGSAHPIPDSSPLLQFGGQVRQRYLYTDDACQTEAHLEIREDGTVGGAADQSPESLLQLKALKPGVIQILGVKTSRFLCQRPDGALYGSLHFDPEACSFRELLLEDGYNVYQSEAHGLPLHLPGCKSPHRDPAPRGPARFLPLPGLPPAPPEPPGILAPQPPDVGSSDPLSMVYPSQGRSPSYAS

SEQ ID NO: 3910 - protein, 473 aa, Artificial Sequence
  Fusion Protein
HGEGTFTSDKSKQLEKRLVRLFYEWLKAGGHSKIKYPPKGGGGGGGSGGGGSGGGGSAESKYGPPCPPCPAPEFEGGPSVFLFPPKPKDTLMISRTPEVTCVVVDVSQEDPEVQFNWYVDGVEVHNAKTKPREEQFNSTYRVVSVLTVLHQDWLNGKEYKCKVSNKGLPSSIEKTISKAKGQPREPQVYTLPPSQEEMTKNQVSLTCLVKGFYPSDIAVEWESNGQPENNYKTTPPVLDSDGSFFLYSRLTVDKSRWQEGNVFSCSVMHEALHNHYTQKSLSLSLGGGGSGSAHPIPDSSPLLQFGGQVRQRYLYTDDACQTEAHLEIREDGTVGGAADQSPESLLQLKALKPGVIQILGVKTSRFLCQRPDGALYGSLHFDPEACSFRELLLEDGYNVYQSEAHGLPLHLCGNKSPHRDPAPRGPARFLPLPGLPPAPPEPPGILAPQPPDVGSSDPLSMVGSQGRSPSYAS

SEQ ID NO: 3911 - protein, 474 aa, Artificial Sequence
  Fusion Protein
HGEGTFTSDKSKQLEKRLVRLFYEWLKAGGHSKIKYPPKGGGGGGGSGGGGSGGGGSAESKYGPPCPPCPAPEFEGGPSVFLFPPKPKDTLMISRTPEVTCVVVDVSQEDPEVQFNWYVDGVEVHNAKTKPREEQFNSTYRVVSVLTVLHQDWLNGKEYKCKVSNKGLPSSIEKTISKAKGQPREPQVYTLPPSQEEMTKNQVSLTCLVKGFYPSDIAVEWESNGQPENNYKTTPPVLDSDGSFFLYSRLTVDKSRWQEGNVFSCSVMHEALHNHYTQKSLSLSLGGGGSGSAHPIPDSSPLLQFGGQVRQRYLYTDDACQTEAHLEIREDGTVGGAADQSPESLLQLKALKPGVIQILGVKTSRFLCQRPDGALYGSLHFDPEACSFRELLLEDGYNVYQSEAHGLPLHLCGNKSPHRDPAPRGPARFLPLPGLPPAPPEPPGILAPQPPDVGSSDPLSMVYPSQGRSPSYAS

SEQ ID NO: 3912 - protein, 471 aa, Artificial Sequence
  Fusion Protein
HGEGTFTSDKSKQLEKRLVRLFYEWLIKGGHSKIRPPPKGGGGGGGSGGGGSGGGGSADKTHTCPPCPAPEAAGGPSVFLFPPKPKDTLMISRTPEVTCVVVDVSHEDPEVKFNWYVDGVEVHNAKTKPREEQYNSTYRVVSVLTVLHQDWLNGKEYKCKVSNKALPAPIEKTISKAKGQPREPQVYTLPPSRDELTKNQVSLTCLVKGFYPSDIAVEWESNGQPENNYKTTPPVLDSDGSFFLYSKLTVDKSRWQQGNVFSCSVMHEALHNHYTQKSLSLSPGGGGSGSAHPIPDSSPLLQFGGQVRQRYLYTDDACQTEAHLEIREDGTVGGAADQSPESLLQLKALKPGVIQILGVKTSRFLCQRPDGALYGSLHFDPEACSFRELLLEDGYNVYQSEAHGLPLHLPGCKSPHRDPAPRGPARFLPLPGLPPAPPEPPGILAPQPPDVGSSDPLSMVGSQGRSPSYAS

SEQ ID NO: 3913 - protein, 472 aa, Artificial Sequence
  Fusion Protein
HGEGTFTSDKSKQLEKRLVRLFYEWLIKGGHSKIRPPPKGGGGGGGSGGGGSGGGGSADKTHTCPPCPAPEAAGGPSVFLFPPKPKDTLMISRTPEVTCVVVDVSHEDPEVKFNWYVDGVEVHNAKTKPREEQYNSTYRVVSVLTVLHQDWLNGKEYKCKVSNKALPAPIEKTISKAKGQPREPQVYTLPPSRDELTKNQVSLTCLVKGFYPSDIAVEWESNGQPENNYKTTPPVLDSDGSFFLYSKLTVDKSRWQQGNVFSCSVMHEALHNHYTQKSLSLSPGGGGSGSAHPIPDSSPLLQFGGQVRQRYLYTDDACQTEAHLEIREDGTVGGAADQSPESLLQLKALKPGVIQILGVKTSRFLCQRPDGALYGSLHFDPEACSFRELLLEDGYNVYQSEAHGLPLHLPGCKSPHRDPAPRGPARFLPLPGLPPAPPEPPGILAPQPPDVGSSDPLSMVYPSQGRSPSYAS

SEQ ID NO: 3914 - protein, 471 aa, Artificial Sequence
  Fusion Protein
HGEGTFTSDKSKQLEKRLVRLFYEWLIKGGHSKIRPPPKGGGGGGGSGGGGSGGGGSADKTHTCPPCPAPEAAGGPSVFLFPPKPKDTLMISRTPEVTCVVVDVSHEDPEVKFNWYVDGVEVHNAKTKPREEQYNSTYRVVSVLTVLHQDWLNGKEYKCKVSNKALPAPIEKTISKAKGQPREPQVYTLPPSRDELTKNQVSLTCLVKGFYPSDIAVEWESNGQPENNYKTTPPVLDSDGSFFLYSKLTVDKSRWQQGNVFSCSVMHEALHNHYTQKSLSLSPGGGGSGSAHPIPDSSPLLQFGGQVRQRYLYTDDACQTEAHLEIREDGTVGGAADQSPESLLQLKALKPGVIQILGVKTSRFLCQRPDGALYGSLHFDPEACSFRELLLEDGYNVYQSEAHGLPLHLCGNKSPHRDPAPRGPARFLPLPGLPPAPPEPPGILAPQPPDVGSSDPLSMVGSQGRSPSYAS

SEQ ID NO: 3915 - protein, 472 aa, Artificial Sequence
  Fusion Protein
HGEGTFTSDKSKQLEKRLVRLFYEWLIKGGHSKIRPPPKGGGGGGGSGGGGSGGGGSADKTHTCPPCPAPEAAGGPSVFLFPPKPKDTLMISRTPEVTCVVVDVSHEDPEVKFNWYVDGVEVHNAKTKPREEQYNSTYRVVSVLTVLHQDWLNGKEYKCKVSNKALPAPIEKTISKAKGQPREPQVYTLPPSRDELTKNQVSLTCLVKGFYPSDIAVEWESNGQPENNYKTTPPVLDSDGSFFLYSKLTVDKSRWQQGNVFSCSVMHEALHNHYTQKSLSLSPGGGGSGSAHPIPDSSPLLQFGGQVRQRYLYTDDACQTEAHLEIREDGTVGGAADQSPESLLQLKALKPGVIQILGVKTSRFLCQRPDGALYGSLHFDPEACSFRELLLEDGYNVYQSEAHGLPLHLCGNKSPHRDPAPRGPARFLPLPGLPPAPPEPPGILAPQPPDVGSSDPLSMVYPSQGRSPSYAS

SEQ ID NO: 3916 - protein, 471 aa, Artificial Sequence
  Fusion Protein
HGEGTFTSDKSKQLEKRLVRLFYEWLIKGGHSKIRPPPKGGGGGGGSGGGGSGGGGSADKTHTCPPCPAPELLGGPSVFLFPPKPKDTLMISRTPEVTCVVVDVSHEDPEVKFNWYVDGVEVHNAKTKPREEQYNNASRVVSVLTVLHQDWLNGKEYKCKVSNKALPAPIEKTISKAKGQPREPQVYTLPPSRDELTKNQVSLTCLVKGFYPSDIAVEWESNGQPENNYKTTPPVLDSDGSFFLYSKLTVDKSRWQQGNVFSCSVMHEALHNHYTQKSLSLSPGGGGSGSAHPIPDSSPLLQFGGQVRQRYLYTDDACQTEAHLEIREDGTVGGAADQSPESLLQLKALKPGVIQILGVKTSRFLCQRPDGALYGSLHFDPEACSFRELLLEDGYNVYQSEAHGLPLHLPGCKSPHRDPAPRGPARFLPLPGLPPAPPEPPGILAPQPPDVGSSDPLSMVGSQGRSPSYAS

SEQ ID NO: 3917 - protein, 472 aa, Artificial Sequence
  Fusion Protein
HGEGTFTSDKSKQLEKRLVRLFYEWLIKGGHSKIRPPPKGGGGGGGSGGGGSGGGGSADKTHTCPPCPAPELLGGPSVFLFPPKPKDTLMISRTPEVTCVVVDVSHEDPEVKFNWYVDGVEVHNAKTKPREEQYNNASRVVSVLTVLHQDWLNGKEYKCKVSNKALPAPIEKTISKAKGQPREPQVYTLPPSRDELTKNQVSLTCLVKGFYPSDIAVEWESNGQPENNYKTTPPVLDSDGSFFLYSKLTVDKSRWQQGNVFSCSVMHEALHNHYTQKSLSLSPGGGGSGSAHPIPDSSPLLQFGGQVRQRYLYTDDACQTEAHLEIREDGTVGGAADQSPESLLQLKALKPGVIQILGVKTSRFLCQRPDGALYGSLHFDPEACSFRELLLEDGYNVYQSEAHGLPLHLPGCKSPHRDPAPRGPARFLPLPGLPPAPPEPPGILAPQPPDVGSSDPLSMVYPSQGRSPSYAS

SEQ ID NO: 3918 - protein, 471 aa, Artificial Sequence
  Fusion Protein
HGEGTFTSDKSKQLEKRLVRLFYEWLIKGGHSKIRPPPKGGGGGGGSGGGGSGGGGSADKTHTCPPCPAPELLGGPSVFLFPPKPKDTLMISRTPEVTCVVVDVSHEDPEVKFNWYVDGVEVHNAKTKPREEQYNNASRVVSVLTVLHQDWLNGKEYKCKVSNKALPAPIEKTISKAKGQPREPQVYTLPPSRDELTKNQVSLTCLVKGFYPSDIAVEWESNGQPENNYKTTPPVLDSDGSFFLYSKLTVDKSRWQQGNVFSCSVMHEALHNHYTQKSLSLSPGGGGSGSAHPIPDSSPLLQFGGQVRQRYLYTDDACQTEAHLEIREDGTVGGAADQSPESLLQLKALKPGVIQILGVKTSRFLCQRPDGALYGSLHFDPEACSFRELLLEDGYNVYQSEAHGLPLHLCGNKSPHRDPAPRGPARFLPLPGLPPAPPEPPGILAPQPPDVGSSDPLSMVGSQGRSPSYAS

SEQ ID NO: 3919 - protein, 472 aa, Artificial Sequence
  Fusion Protein
HGEGTFTSDKSKQLEKRLVRLFYEWLIKGGHSKIRPPPKGGGGGGGSGGGGSGGGGSADKTHTCPPCPAPELLGGPSVFLFPPKPKDTLMISRTPEVTCVVVDVSHEDPEVKFNWYVDGVEVHNAKTKPREEQYNNASRVVSVLTVLHQDWLNGKEYKCKVSNKALPAPIEKTISKAKGQPREPQVYTLPPSRDELTKNQVSLTCLVKGFYPSDIAVEWESNGQPENNYKTTPPVLDSDGSFFLYSKLTVDKSRWQQGNVFSCSVMHEALHNHYTQKSLSLSPGGGGSGSAHPIPDSSPLLQFGGQVRQRYLYTDDACQTEAHLEIREDGTVGGAADQSPESLLQLKALKPGVIQILGVKTSRFLCQRPDGALYGSLHFDPEACSFRELLLEDGYNVYQSEAHGLPLHLCGNKSPHRDPAPRGPARFLPLPGLPPAPPEPPGILAPQPPDVGSSDPLSMVYPSQGRSPSYAS

SEQ ID NO: 3920 - protein, 473 aa, Artificial Sequence
  Fusion Protein
HGEGTFTSDKSKQLEKRLVRLFYEWLIKGGHSKIRPPPKGGGGGGGSGGGGSGGGGSAESKYGPPCPPCPAPEFEGGPSVFLFPPKPKDTLMISRTPEVTCVVVDVSQEDPEVQFNWYVDGVEVHNAKTKPREEQFNSTYRVVSVLTVLHQDWLNGKEYKCKVSNKGLPSSIEKTISKAKGQPREPQVYTLPPSQEEMTKNQVSLTCLVKGFYPSDIAVEWESNGQPENNYKTTPPVLDSDGSFFLYSRLTVDKSRWQEGNVFSCSVMHEALHNHYTQKSLSLSLGGGGSGSAHPIPDSSPLLQFGGQVRQRYLYTDDACQTEAHLEIREDGTVGGAADQSPESLLQLKALKPGVIQILGVKTSRFLCQRPDGALYGSLHFDPEACSFRELLLEDGYNVYQSEAHGLPLHLPGCKSPHRDPAPRGPARFLPLPGLPPAPPEPPGILAPQPPDVGSSDPLSMVGSQGRSPSYAS

SEQ ID NO: 3921 - protein, 474 aa, Artificial Sequence
  Fusion Protein
HGEGTFTSDKSKQLEKRLVRLFYEWLIKGGHSKIRPPPKGGGGGGGSGGGGSGGGGSAESKYGPPCPPCPAPEFEGGPSVFLFPPKPKDTLMISRTPEVTCVVVDVSQEDPEVQFNWYVDGVEVHNAKTKPREEQFNSTYRVVSVLTVLHQDWLNGKEYKCKVSNKGLPSSIEKTISKAKGQPREPQVYTLPPSQEEMTKNQVSLTCLVKGFYPSDIAVEWESNGQPENNYKTTPPVLDSDGSFFLYSRLTVDKSRWQEGNVFSCSVMHEALHNHYTQKSLSLSLGGGGSGSAHPIPDSSPLLQFGGQVRQRYLYTDDACQTEAHLEIREDGTVGGAADQSPESLLQLKALKPGVIQILGVKTSRFLCQRPDGALYGSLHFDPEACSFRELLLEDGYNVYQSEAHGLPLHLPGCKSPHRDPAPRGPARFLPLPGLPPAPPEPPGILAPQPPDVGSSDPLSMVYPSQGRSPSYAS

SEQ ID NO: 3922 - protein, 473 aa, Artificial Sequence
  Fusion Protein
HGEGTFTSDKSKQLEKRLVRLFYEWLIKGGHSKIRPPPKGGGGGGGSGGGGSGGGGSAESKYGPPCPPCPAPEFEGGPSVFLFPPKPKDTLMISRTPEVTCVVVDVSQEDPEVQFNWYVDGVEVHNAKTKPREEQFNSTYRVVSVLTVLHQDWLNGKEYKCKVSNKGLPSSIEKTISKAKGQPREPQVYTLPPSQEEMTKNQVSLTCLVKGFYPSDIAVEWESNGQPENNYKTTPPVLDSDGSFFLYSRLTVDKSRWQEGNVFSCSVMHEALHNHYTQKSLSLSLGGGGSGSAHPIPDSSPLLQFGGQVRQRYLYTDDACQTEAHLEIREDGTVGGAADQSPESLLQLKALKPGVIQILGVKTSRFLCQRPDGALYGSLHFDPEACSFRELLLEDGYNVYQSEAHGLPLHLCGNKSPHRDPAPRGPARFLPLPGLPPAPPEPPGILAPQPPDVGSSDPLSMVGSQGRSPSYAS

SEQ ID NO: 3923 - protein, 474 aa, Artificial Sequence
  Fusion Protein
HGEGTFTSDKSKQLEKRLVRLFYEWLIKGGHSKIRPPPKGGGGGGGSGGGGSGGGGSAESKYGPPCPPCPAPEFEGGPSVFLFPPKPKDTLMISRTPEVTCVVVDVSQEDPEVQFNWYVDGVEVHNAKTKPREEQFNSTYRVVSVLTVLHQDWLNGKEYKCKVSNKGLPSSIEKTISKAKGQPREPQVYTLPPSQEEMTKNQVSLTCLVKGFYPSDIAVEWESNGQPENNYKTTPPVLDSDGSFFLYSRLTVDKSRWQEGNVFSCSVMHEALHNHYTQKSLSLSLGGGGSGSAHPIPDSSPLLQFGGQVRQRYLYTDDACQTEAHLEIREDGTVGGAADQSPESLLQLKALKPGVIQILGVKTSRFLCQRPDGALYGSLHFDPEACSFRELLLEDGYNVYQSEAHGLPLHLCGNKSPHRDPAPRGPARFLPLPGLPPAPPEPPGILAPQPPDVGSSDPLSMVYPSQGRSPSYAS

SEQ ID NO: 3924 - protein, 471 aa, Artificial Sequence
  Fusion Protein
HGEGTFTSDKSKQLEKRLVRLFYEWLIKGGHSKIKPPPKGGGGGGGSGGGGSGGGGSADKTHTCPPCPAPEAAGGPSVFLFPPKPKDTLMISRTPEVTCVVVDVSHEDPEVKFNWYVDGVEVHNAKTKPREEQYNSTYRVVSVLTVLHQDWLNGKEYKCKVSNKALPAPIEKTISKAKGQPREPQVYTLPPSRDELTKNQVSLTCLVKGFYPSDIAVEWESNGQPENNYKTTPPVLDSDGSFFLYSKLTVDKSRWQQGNVFSCSVMHEALHNHYTQKSLSLSPGGGGSGSAHPIPDSSPLLQFGGQVRQRYLYTDDACQTEAHLEIREDGTVGGAADQSPESLLQLKALKPGVIQILGVKTSRFLCQRPDGALYGSLHFDPEACSFRELLLEDGYNVYQSEAHGLPLHLPGCKSPHRDPAPRGPARFLPLPGLPPAPPEPPGILAPQPPDVGSSDPLSMVGSQGRSPSYAS

SEQ ID NO: 3925 - protein, 472 aa, Artificial Sequence
  Fusion Protein
HGEGTFTSDKSKQLEKRLVRLFYEWLIKGGHSKIKPPPKGGGGGGGSGGGGSGGGGSADKTHTCPPCPAPEAAGGPSVFLFPPKPKDTLMISRTPEVTCVVVDVSHEDPEVKFNWYVDGVEVHNAKTKPREEQYNSTYRVVSVLTVLHQDWLNGKEYKCKVSNKALPAPIEKTISKAKGQPREPQVYTLPPSRDELTKNQVSLTCLVKGFYPSDIAVEWESNGQPENNYKTTPPVLDSDGSFFLYSKLTVDKSRWQQGNVFSCSVMHEALHNHYTQKSLSLSPGGGGSGSAHPIPDSSPLLQFGGQVRQRYLYTDDACQTEAHLEIREDGTVGGAADQSPESLLQLKALKPGVIQILGVKTSRFLCQRPDGALYGSLHFDPEACSFRELLLEDGYNVYQSEAHGLPLHLPGCKSPHRDPAPRGPARFLPLPGLPPAPPEPPGILAPQPPDVGSSDPLSMVYPSQGRSPSYAS

SEQ ID NO: 3926 - protein, 471 aa, Artificial Sequence
  Fusion Protein
HGEGTFTSDKSKQLEKRLVRLFYEWLIKGGHSKIKPPPKGGGGGGGSGGGGSGGGGSADKTHTCPPCPAPEAAGGPSVFLFPPKPKDTLMISRTPEVTCVVVDVSHEDPEVKFNWYVDGVEVHNAKTKPREEQYNSTYRVVSVLTVLHQDWLNGKEYKCKVSNKALPAPIEKTISKAKGQPREPQVYTLPPSRDELTKNQVSLTCLVKGFYPSDIAVEWESNGQPENNYKTTPPVLDSDGSFFLYSKLTVDKSRWQQGNVFSCSVMHEALHNHYTQKSLSLSPGGGGSGSAHPIPDSSPLLQFGGQVRQRYLYTDDACQTEAHLEIREDGTVGGAADQSPESLLQLKALKPGVIQILGVKTSRFLCQRPDGALYGSLHFDPEACSFRELLLEDGYNVYQSEAHGLPLHLCGNKSPHRDPAPRGPARFLPLPGLPPAPPEPPGILAPQPPDVGSSDPLSMVGSQGRSPSYAS

SEQ ID NO: 3927 - protein, 472 aa, Artificial Sequence
  Fusion Protein
HGEGTFTSDKSKQLEKRLVRLFYEWLIKGGHSKIKPPPKGGGGGGGSGGGGSGGGGSADKTHTCPPCPAPEAAGGPSVFLFPPKPKDTLMISRTPEVTCVVVDVSHEDPEVKFNWYVDGVEVHNAKTKPREEQYNSTYRVVSVLTVLHQDWLNGKEYKCKVSNKALPAPIEKTISKAKGQPREPQVYTLPPSRDELTKNQVSLTCLVKGFYPSDIAVEWESNGQPENNYKTTPPVLDSDGSFFLYSKLTVDKSRWQQGNVFSCSVMHEALHNHYTQKSLSLSPGGGGSGSAHPIPDSSPLLQFGGQVRQRYLYTDDACQTEAHLEIREDGTVGGAADQSPESLLQLKALKPGVIQILGVKTSRFLCQRPDGALYGSLHFDPEACSFRELLLEDGYNVYQSEAHGLPLHLCGNKSPHRDPAPRGPARFLPLPGLPPAPPEPPGILAPQPPDVGSSDPLSMVYPSQGRSPSYAS

SEQ ID NO: 3928 - protein, 471 aa, Artificial Sequence
  Fusion Protein
HGEGTFTSDKSKQLEKRLVRLFYEWLIKGGHSKIKPPPKGGGGGGGSGGGGSGGGGSADKTHTCPPCPAPELLGGPSVFLFPPKPKDTLMISRTPEVTCVVVDVSHEDPEVKFNWYVDGVEVHNAKTKPREEQYNNASRVVSVLTVLHQDWLNGKEYKCKVSNKALPAPIEKTISKAKGQPREPQVYTLPPSRDELTKNQVSLTCLVKGFYPSDIAVEWESNGQPENNYKTTPPVLDSDGSFFLYSKLTVDKSRWQQGNVFSCSVMHEALHNHYTQKSLSLSPGGGGSGSAHPIPDSSPLLQFGGQVRQRYLYTDDACQTEAHLEIREDGTVGGAADQSPESLLQLKALKPGVIQILGVKTSRFLCQRPDGALYGSLHFDPEACSFRELLLEDGYNVYQSEAHGLPLHLPGCKSPHRDPAPRGPARFLPLPGLPPAPPEPPGILAPQPPDVGSSDPLSMVGSQGRSPSYAS

SEQ ID NO: 3929 - protein, 472 aa, Artificial Sequence
  Fusion Protein
HGEGTFTSDKSKQLEKRLVRLFYEWLIKGGHSKIKPPPKGGGGGGGSGGGGSGGGGSADKTHTCPPCPAPELLGGPSVFLFPPKPKDTLMISRTPEVTCVVVDVSHEDPEVKFNWYVDGVEVHNAKTKPREEQYNNASRVVSVLTVLHQDWLNGKEYKCKVSNKALPAPIEKTISKAKGQPREPQVYTLPPSRDELTKNQVSLTCLVKGFYPSDIAVEWESNGQPENNYKTTPPVLDSDGSFFLYSKLTVDKSRWQQGNVFSCSVMHEALHNHYTQKSLSLSPGGGGSGSAHPIPDSSPLLQFGGQVRQRYLYTDDACQTEAHLEIREDGTVGGAADQSPESLLQLKALKPGVIQILGVKTSRFLCQRPDGALYGSLHFDPEACSFRELLLEDGYNVYQSEAHGLPLHLPGCKSPHRDPAPRGPARFLPLPGLPPAPPEPPGILAPQPPDVGSSDPLSMVYPSQGRSPSYAS

SEQ ID NO: 3930 - protein, 471 aa, Artificial Sequence
  Fusion Protein
HGEGTFTSDKSKQLEKRLVRLFYEWLIKGGHSKIKPPPKGGGGGGGSGGGGSGGGGSADKTHTCPPCPAPELLGGPSVFLFPPKPKDTLMISRTPEVTCVVVDVSHEDPEVKFNWYVDGVEVHNAKTKPREEQYNNASRVVSVLTVLHQDWLNGKEYKCKVSNKALPAPIEKTISKAKGQPREPQVYTLPPSRDELTKNQVSLTCLVKGFYPSDIAVEWESNGQPENNYKTTPPVLDSDGSFFLYSKLTVDKSRWQQGNVFSCSVMHEALHNHYTQKSLSLSPGGGGSGSAHPIPDSSPLLQFGGQVRQRYLYTDDACQTEAHLEIREDGTVGGAADQSPESLLQLKALKPGVIQILGVKTSRFLCQRPDGALYGSLHFDPEACSFRELLLEDGYNVYQSEAHGLPLHLCGNKSPHRDPAPRGPARFLPLPGLPPAPPEPPGILAPQPPDVGSSDPLSMVGSQGRSPSYAS

SEQ ID NO: 3931 - protein, 472 aa, Artificial Sequence
  Fusion Protein
HGEGTFTSDKSKQLEKRLVRLFYEWLIKGGHSKIKPPPKGGGGGGGSGGGGSGGGGSADKTHTCPPCPAPELLGGPSVFLFPPKPKDTLMISRTPEVTCVVVDVSHEDPEVKFNWYVDGVEVHNAKTKPREEQYNNASRVVSVLTVLHQDWLNGKEYKCKVSNKALPAPIEKTISKAKGQPREPQVYTLPPSRDELTKNQVSLTCLVKGFYPSDIAVEWESNGQPENNYKTTPPVLDSDGSFFLYSKLTVDKSRWQQGNVFSCSVMHEALHNHYTQKSLSLSPGGGGSGSAHPIPDSSPLLQFGGQVRQRYLYTDDACQTEAHLEIREDGTVGGAADQSPESLLQLKALKPGVIQILGVKTSRFLCQRPDGALYGSLHFDPEACSFRELLLEDGYNVYQSEAHGLPLHLCGNKSPHRDPAPRGPARFLPLPGLPPAPPEPPGILAPQPPDVGSSDPLSMVYPSQGRSPSYAS

SEQ ID NO: 3932 - protein, 473 aa, Artificial Sequence
  Fusion Protein
HGEGTFTSDKSKQLEKRLVRLFYEWLIKGGHSKIKPPPKGGGGGGGSGGGGSGGGGSAESKYGPPCPPCPAPEFEGGPSVFLFPPKPKDTLMISRTPEVTCVVVDVSQEDPEVQFNWYVDGVEVHNAKTKPREEQFNSTYRVVSVLTVLHQDWLNGKEYKCKVSNKGLPSSIEKTISKAKGQPREPQVYTLPPSQEEMTKNQVSLTCLVKGFYPSDIAVEWESNGQPENNYKTTPPVLDSDGSFFLYSRLTVDKSRWQEGNVFSCSVMHEALHNHYTQKSLSLSLGGGGSGSAHPIPDSSPLLQFGGQVRQRYLYTDDACQTEAHLEIREDGTVGGAADQSPESLLQLKALKPGVIQILGVKTSRFLCQRPDGALYGSLHFDPEACSFRELLLEDGYNVYQSEAHGLPLHLPGCKSPHRDPAPRGPARFLPLPGLPPAPPEPPGILAPQPPDVGSSDPLSMVGSQGRSPSYAS

SEQ ID NO: 3933 - protein, 474 aa, Artificial Sequence
  Fusion Protein
HGEGTFTSDKSKQLEKRLVRLFYEWLIKGGHSKIKPPPKGGGGGGGSGGGGSGGGGSAESKYGPPCPPCPAPEFEGGPSVFLFPPKPKDTLMISRTPEVTCVVVDVSQEDPEVQFNWYVDGVEVHNAKTKPREEQFNSTYRVVSVLTVLHQDWLNGKEYKCKVSNKGLPSSIEKTISKAKGQPREPQVYTLPPSQEEMTKNQVSLTCLVKGFYPSDIAVEWESNGQPENNYKTTPPVLDSDGSFFLYSRLTVDKSRWQEGNVFSCSVMHEALHNHYTQKSLSLSLGGGGSGSAHPIPDSSPLLQFGGQVRQRYLYTDDACQTEAHLEIREDGTVGGAADQSPESLLQLKALKPGVIQILGVKTSRFLCQRPDGALYGSLHFDPEACSFRELLLEDGYNVYQSEAHGLPLHLPGCKSPHRDPAPRGPARFLPLPGLPPAPPEPPGILAPQPPDVGSSDPLSMVYPSQGRSPSYAS

SEQ ID NO: 3934 - protein, 473 aa, Artificial Sequence
  Fusion Protein
HGEGTFTSDKSKQLEKRLVRLFYEWLIKGGHSKIKPPPKGGGGGGGSGGGGSGGGGSAESKYGPPCPPCPAPEFEGGPSVFLFPPKPKDTLMISRTPEVTCVVVDVSQEDPEVQFNWYVDGVEVHNAKTKPREEQFNSTYRVVSVLTVLHQDWLNGKEYKCKVSNKGLPSSIEKTISKAKGQPREPQVYTLPPSQEEMTKNQVSLTCLVKGFYPSDIAVEWESNGQPENNYKTTPPVLDSDGSFFLYSRLTVDKSRWQEGNVFSCSVMHEALHNHYTQKSLSLSLGGGGSGSAHPIPDSSPLLQFGGQVRQRYLYTDDACQTEAHLEIREDGTVGGAADQSPESLLQLKALKPGVIQILGVKTSRFLCQRPDGALYGSLHFDPEACSFRELLLEDGYNVYQSEAHGLPLHLCGNKSPHRDPAPRGPARFLPLPGLPPAPPEPPGILAPQPPDVGSSDPLSMVGSQGRSPSYAS

SEQ ID NO: 3935 - protein, 474 aa, Artificial Sequence
  Fusion Protein
HGEGTFTSDKSKQLEKRLVRLFYEWLIKGGHSKIKPPPKGGGGGGGSGGGGSGGGGSAESKYGPPCPPCPAPEFEGGPSVFLFPPKPKDTLMISRTPEVTCVVVDVSQEDPEVQFNWYVDGVEVHNAKTKPREEQFNSTYRVVSVLTVLHQDWLNGKEYKCKVSNKGLPSSIEKTISKAKGQPREPQVYTLPPSQEEMTKNQVSLTCLVKGFYPSDIAVEWESNGQPENNYKTTPPVLDSDGSFFLYSRLTVDKSRWQEGNVFSCSVMHEALHNHYTQKSLSLSLGGGGSGSAHPIPDSSPLLQFGGQVRQRYLYTDDACQTEAHLEIREDGTVGGAADQSPESLLQLKALKPGVIQILGVKTSRFLCQRPDGALYGSLHFDPEACSFRELLLEDGYNVYQSEAHGLPLHLCGNKSPHRDPAPRGPARFLPLPGLPPAPPEPPGILAPQPPDVGSSDPLSMVYPSQGRSPSYAS

SEQ ID NO: 3936 - protein, 471 aa, Artificial Sequence
  Fusion Protein
HGEGTFTSDKSKQLEKRLVRLFFEWLINGGHSKIKPPPKGGGGGGGSGGGGSGGGGSADKTHTCPPCPAPEAAGGPSVFLFPPKPKDTLMISRTPEVTCVVVDVSHEDPEVKFNWYVDGVEVHNAKTKPREEQYNSTYRVVSVLTVLHQDWLNGKEYKCKVSNKALPAPIEKTISKAKGQPREPQVYTLPPSRDELTKNQVSLTCLVKGFYPSDIAVEWESNGQPENNYKTTPPVLDSDGSFFLYSKLTVDKSRWQQGNVFSCSVMHEALHNHYTQKSLSLSPGGGGSGSAHPIPDSSPLLQFGGQVRQRYLYTDDACQTEAHLEIREDGTVGGAADQSPESLLQLKALKPGVIQILGVKTSRFLCQRPDGALYGSLHFDPEACSFRELLLEDGYNVYQSEAHGLPLHLPGCKSPHRDPAPRGPARFLPLPGLPPAPPEPPGILAPQPPDVGSSDPLSMVGSQGRSPSYAS

SEQ ID NO: 3937 - protein, 472 aa, Artificial Sequence
  Fusion Protein
HGEGTFTSDKSKQLEKRLVRLFFEWLINGGHSKIKPPPKGGGGGGGSGGGGSGGGGSADKTHTCPPCPAPEAAGGPSVFLFPPKPKDTLMISRTPEVTCVVVDVSHEDPEVKFNWYVDGVEVHNAKTKPREEQYNSTYRVVSVLTVLHQDWLNGKEYKCKVSNKALPAPIEKTISKAKGQPREPQVYTLPPSRDELTKNQVSLTCLVKGFYPSDIAVEWESNGQPENNYKTTPPVLDSDGSFFLYSKLTVDKSRWQQGNVFSCSVMHEALHNHYTQKSLSLSPGGGGSGSAHPIPDSSPLLQFGGQVRQRYLYTDDACQTEAHLEIREDGTVGGAADQSPESLLQLKALKPGVIQILGVKTSRFLCQRPDGALYGSLHFDPEACSFRELLLEDGYNVYQSEAHGLPLHLPGCKSPHRDPAPRGPARFLPLPGLPPAPPEPPGILAPQPPDVGSSDPLSMVYPSQGRSPSYAS

SEQ ID NO: 3938 - protein, 471 aa, Artificial Sequence
  Fusion Protein
HGEGTFTSDKSKQLEKRLVRLFFEWLINGGHSKIKPPPKGGGGGGGSGGGGSGGGGSADKTHTCPPCPAPEAAGGPSVFLFPPKPKDTLMISRTPEVTCVVVDVSHEDPEVKFNWYVDGVEVHNAKTKPREEQYNSTYRVVSVLTVLHQDWLNGKEYKCKVSNKALPAPIEKTISKAKGQPREPQVYTLPPSRDELTKNQVSLTCLVKGFYPSDIAVEWESNGQPENNYKTTPPVLDSDGSFFLYSKLTVDKSRWQQGNVFSCSVMHEALHNHYTQKSLSLSPGGGGSGSAHPIPDSSPLLQFGGQVRQRYLYTDDACQTEAHLEIREDGTVGGAADQSPESLLQLKALKPGVIQILGVKTSRFLCQRPDGALYGSLHFDPEACSFRELLLEDGYNVYQSEAHGLPLHLCGNKSPHRDPAPRGPARFLPLPGLPPAPPEPPGILAPQPPDVGSSDPLSMVGSQGRSPSYAS

SEQ ID NO: 3939 - protein, 472 aa, Artificial Sequence
  Fusion Protein
HGEGTFTSDKSKQLEKRLVRLFFEWLINGGHSKIKPPPKGGGGGGGSGGGGSGGGGSADKTHTCPPCPAPEAAGGPSVFLFPPKPKDTLMISRTPEVTCVVVDVSHEDPEVKFNWYVDGVEVHNAKTKPREEQYNSTYRVVSVLTVLHQDWLNGKEYKCKVSNKALPAPIEKTISKAKGQPREPQVYTLPPSRDELTKNQVSLTCLVKGFYPSDIAVEWESNGQPENNYKTTPPVLDSDGSFFLYSKLTVDKSRWQQGNVFSCSVMHEALHNHYTQKSLSLSPGGGGSGSAHPIPDSSPLLQFGGQVRQRYLYTDDACQTEAHLEIREDGTVGGAADQSPESLLQLKALKPGVIQILGVKTSRFLCQRPDGALYGSLHFDPEACSFRELLLEDGYNVYQSEAHGLPLHLCGNKSPHRDPAPRGPARFLPLPGLPPAPPEPPGILAPQPPDVGSSDPLSMVYPSQGRSPSYAS

SEQ ID NO: 3940 - protein, 471 aa, Artificial Sequence
  Fusion Protein
HGEGTFTSDKSKQLEKRLVRLFFEWLINGGHSKIKPPPKGGGGGGGSGGGGSGGGGSADKTHTCPPCPAPELLGGPSVFLFPPKPKDTLMISRTPEVTCVVVDVSHEDPEVKFNWYVDGVEVHNAKTKPREEQYNNASRVVSVLTVLHQDWLNGKEYKCKVSNKALPAPIEKTISKAKGQPREPQVYTLPPSRDELTKNQVSLTCLVKGFYPSDIAVEWESNGQPENNYKTTPPVLDSDGSFFLYSKLTVDKSRWQQGNVFSCSVMHEALHNHYTQKSLSLSPGGGGSGSAHPIPDSSPLLQFGGQVRQRYLYTDDACQTEAHLEIREDGTVGGAADQSPESLLQLKALKPGVIQILGVKTSRFLCQRPDGALYGSLHFDPEACSFRELLLEDGYNVYQSEAHGLPLHLPGCKSPHRDPAPRGPARFLPLPGLPPAPPEPPGILAPQPPDVGSSDPLSMVGSQGRSPSYAS

SEQ ID NO: 3941 - protein, 472 aa, Artificial Sequence
  Fusion Protein
HGEGTFTSDKSKQLEKRLVRLFFEWLINGGHSKIKPPPKGGGGGGGSGGGGSGGGGSADKTHTCPPCPAPELLGGPSVFLFPPKPKDTLMISRTPEVTCVVVDVSHEDPEVKFNWYVDGVEVHNAKTKPREEQYNNASRVVSVLTVLHQDWLNGKEYKCKVSNKALPAPIEKTISKAKGQPREPQVYTLPPSRDELTKNQVSLTCLVKGFYPSDIAVEWESNGQPENNYKTTPPVLDSDGSFFLYSKLTVDKSRWQQGNVFSCSVMHEALHNHYTQKSLSLSPGGGGSGSAHPIPDSSPLLQFGGQVRQRYLYTDDACQTEAHLEIREDGTVGGAADQSPESLLQLKALKPGVIQILGVKTSRFLCQRPDGALYGSLHFDPEACSFRELLLEDGYNVYQSEAHGLPLHLPGCKSPHRDPAPRGPARFLPLPGLPPAPPEPPGILAPQPPDVGSSDPLSMVYPSQGRSPSYAS

SEQ ID NO: 3942 - protein, 471 aa, Artificial Sequence
  Fusion Protein
HGEGTFTSDKSKQLEKRLVRLFFEWLINGGHSKIKPPPKGGGGGGGSGGGGSGGGGSADKTHTCPPCPAPELLGGPSVFLFPPKPKDTLMISRTPEVTCVVVDVSHEDPEVKFNWYVDGVEVHNAKTKPREEQYNNASRVVSVLTVLHQDWLNGKEYKCKVSNKALPAPIEKTISKAKGQPREPQVYTLPPSRDELTKNQVSLTCLVKGFYPSDIAVEWESNGQPENNYKTTPPVLDSDGSFFLYSKLTVDKSRWQQGNVFSCSVMHEALHNHYTQKSLSLSPGGGGSGSAHPIPDSSPLLQFGGQVRQRYLYTDDACQTEAHLEIREDGTVGGAADQSPESLLQLKALKPGVIQILGVKTSRFLCQRPDGALYGSLHFDPEACSFRELLLEDGYNVYQSEAHGLPLHLCGNKSPHRDPAPRGPARFLPLPGLPPAPPEPPGILAPQPPDVGSSDPLSMVGSQGRSPSYAS

SEQ ID NO: 3943 - protein, 472 aa, Artificial Sequence
  Fusion Protein
HGEGTFTSDKSKQLEKRLVRLFFEWLINGGHSKIKPPPKGGGGGGGSGGGGSGGGGSADKTHTCPPCPAPELLGGPSVFLFPPKPKDTLMISRTPEVTCVVVDVSHEDPEVKFNWYVDGVEVHNAKTKPREEQYNNASRVVSVLTVLHQDWLNGKEYKCKVSNKALPAPIEKTISKAKGQPREPQVYTLPPSRDELTKNQVSLTCLVKGFYPSDIAVEWESNGQPENNYKTTPPVLDSDGSFFLYSKLTVDKSRWQQGNVFSCSVMHEALHNHYTQKSLSLSPGGGGSGSAHPIPDSSPLLQFGGQVRQRYLYTDDACQTEAHLEIREDGTVGGAADQSPESLLQLKALKPGVIQILGVKTSRFLCQRPDGALYGSLHFDPEACSFRELLLEDGYNVYQSEAHGLPLHLCGNKSPHRDPAPRGPARFLPLPGLPPAPPEPPGILAPQPPDVGSSDPLSMVYPSQGRSPSYAS

SEQ ID NO: 3944 - protein, 473 aa, Artificial Sequence
  Fusion Protein
HGEGTFTSDKSKQLEKRLVRLFFEWLINGGHSKIKPPPKGGGGGGGSGGGGSGGGGSAESKYGPPCPPCPAPEFEGGPSVFLFPPKPKDTLMISRTPEVTCVVVDVSQEDPEVQFNWYVDGVEVHNAKTKPREEQFNSTYRVVSVLTVLHQDWLNGKEYKCKVSNKGLPSSIEKTISKAKGQPREPQVYTLPPSQEEMTKNQVSLTCLVKGFYPSDIAVEWESNGQPENNYKTTPPVLDSDGSFFLYSRLTVDKSRWQEGNVFSCSVMHEALHNHYTQKSLSLSLGGGGSGSAHPIPDSSPLLQFGGQVRQRYLYTDDACQTEAHLEIREDGTVGGAADQSPESLLQLKALKPGVIQILGVKTSRFLCQRPDGALYGSLHFDPEACSFRELLLEDGYNVYQSEAHGLPLHLPGCKSPHRDPAPRGPARFLPLPGLPPAPPEPPGILAPQPPDVGSSDPLSMVGSQGRSPSYAS

SEQ ID NO: 3945 - protein, 474 aa, Artificial Sequence
  Fusion Protein
HGEGTFTSDKSKQLEKRLVRLFFEWLINGGHSKIKPPPKGGGGGGGSGGGGSGGGGSAESKYGPPCPPCPAPEFEGGPSVFLFPPKPKDTLMISRTPEVTCVVVDVSQEDPEVQFNWYVDGVEVHNAKTKPREEQFNSTYRVVSVLTVLHQDWLNGKEYKCKVSNKGLPSSIEKTISKAKGQPREPQVYTLPPSQEEMTKNQVSLTCLVKGFYPSDIAVEWESNGQPENNYKTTPPVLDSDGSFFLYSRLTVDKSRWQEGNVFSCSVMHEALHNHYTQKSLSLSLGGGGSGSAHPIPDSSPLLQFGGQVRQRYLYTDDACQTEAHLEIREDGTVGGAADQSPESLLQLKALKPGVIQILGVKTSRFLCQRPDGALYGSLHFDPEACSFRELLLEDGYNVYQSEAHGLPLHLPGCKSPHRDPAPRGPARFLPLPGLPPAPPEPPGILAPQPPDVGSSDPLSMVYPSQGRSPSYAS

SEQ ID NO: 3946 - protein, 473 aa, Artificial Sequence
  Fusion Protein
HGEGTFTSDKSKQLEKRLVRLFFEWLINGGHSKIKPPPKGGGGGGGSGGGGSGGGGSAESKYGPPCPPCPAPEFEGGPSVFLFPPKPKDTLMISRTPEVTCVVVDVSQEDPEVQFNWYVDGVEVHNAKTKPREEQFNSTYRVVSVLTVLHQDWLNGKEYKCKVSNKGLPSSIEKTISKAKGQPREPQVYTLPPSQEEMTKNQVSLTCLVKGFYPSDIAVEWESNGQPENNYKTTPPVLDSDGSFFLYSRLTVDKSRWQEGNVFSCSVMHEALHNHYTQKSLSLSLGGGGSGSAHPIPDSSPLLQFGGQVRQRYLYTDDACQTEAHLEIREDGTVGGAADQSPESLLQLKALKPGVIQILGVKTSRFLCQRPDGALYGSLHFDPEACSFRELLLEDGYNVYQSEAHGLPLHLCGNKSPHRDPAPRGPARFLPLPGLPPAPPEPPGILAPQPPDVGSSDPLSMVGSQGRSPSYAS

SEQ ID NO: 3947 - protein, 474 aa, Artificial Sequence
  Fusion Protein
HGEGTFTSDKSKQLEKRLVRLFFEWLINGGHSKIKPPPKGGGGGGGSGGGGSGGGGSAESKYGPPCPPCPAPEFEGGPSVFLFPPKPKDTLMISRTPEVTCVVVDVSQEDPEVQFNWYVDGVEVHNAKTKPREEQFNSTYRVVSVLTVLHQDWLNGKEYKCKVSNKGLPSSIEKTISKAKGQPREPQVYTLPPSQEEMTKNQVSLTCLVKGFYPSDIAVEWESNGQPENNYKTTPPVLDSDGSFFLYSRLTVDKSRWQEGNVFSCSVMHEALHNHYTQKSLSLSLGGGGSGSAHPIPDSSPLLQFGGQVRQRYLYTDDACQTEAHLEIREDGTVGGAADQSPESLLQLKALKPGVIQILGVKTSRFLCQRPDGALYGSLHFDPEACSFRELLLEDGYNVYQSEAHGLPLHLCGNKSPHRDPAPRGPARFLPLPGLPPAPPEPPGILAPQPPDVGSSDPLSMVYPSQGRSPSYAS

SEQ ID NO: 3948 - protein, 471 aa, Artificial Sequence
  Fusion Protein
HGEGTFTSDKSKQLEKRLVRLFFEWLKNGGHSSIKPPPKGGGGGGGSGGGGSGGGGSADKTHTCPPCPAPEAAGGPSVFLFPPKPKDTLMISRTPEVTCVVVDVSHEDPEVKFNWYVDGVEVHNAKTKPREEQYNSTYRVVSVLTVLHQDWLNGKEYKCKVSNKALPAPIEKTISKAKGQPREPQVYTLPPSRDELTKNQVSLTCLVKGFYPSDIAVEWESNGQPENNYKTTPPVLDSDGSFFLYSKLTVDKSRWQQGNVFSCSVMHEALHNHYTQKSLSLSPGGGGSGSAHPIPDSSPLLQFGGQVRQRYLYTDDACQTEAHLEIREDGTVGGAADQSPESLLQLKALKPGVIQILGVKTSRFLCQRPDGALYGSLHFDPEACSFRELLLEDGYNVYQSEAHGLPLHLPGCKSPHRDPAPRGPARFLPLPGLPPAPPEPPGILAPQPPDVGSSDPLSMVGSQGRSPSYAS

SEQ ID NO: 3949 - protein, 472 aa, Artificial Sequence
  Fusion Protein
HGEGTFTSDKSKQLEKRLVRLFFEWLKNGGHSSIKPPPKGGGGGGGSGGGGSGGGGSADKTHTCPPCPAPEAAGGPSVFLFPPKPKDTLMISRTPEVTCVVVDVSHEDPEVKFNWYVDGVEVHNAKTKPREEQYNSTYRVVSVLTVLHQDWLNGKEYKCKVSNKALPAPIEKTISKAKGQPREPQVYTLPPSRDELTKNQVSLTCLVKGFYPSDIAVEWESNGQPENNYKTTPPVLDSDGSFFLYSKLTVDKSRWQQGNVFSCSVMHEALHNHYTQKSLSLSPGGGGSGSAHPIPDSSPLLQFGGQVRQRYLYTDDACQTEAHLEIREDGTVGGAADQSPESLLQLKALKPGVIQILGVKTSRFLCQRPDGALYGSLHFDPEACSFRELLLEDGYNVYQSEAHGLPLHLPGCKSPHRDPAPRGPARFLPLPGLPPAPPEPPGILAPQPPDVGSSDPLSMVYPSQGRSPSYAS

SEQ ID NO: 3950 - protein, 471 aa, Artificial Sequence
  Fusion Protein
HGEGTFTSDKSKQLEKRLVRLFFEWLKNGGHSSIKPPPKGGGGGGGSGGGGSGGGGSADKTHTCPPCPAPEAAGGPSVFLFPPKPKDTLMISRTPEVTCVVVDVSHEDPEVKFNWYVDGVEVHNAKTKPREEQYNSTYRVVSVLTVLHQDWLNGKEYKCKVSNKALPAPIEKTISKAKGQPREPQVYTLPPSRDELTKNQVSLTCLVKGFYPSDIAVEWESNGQPENNYKTTPPVLDSDGSFFLYSKLTVDKSRWQQGNVFSCSVMHEALHNHYTQKSLSLSPGGGGSGSAHPIPDSSPLLQFGGQVRQRYLYTDDACQTEAHLEIREDGTVGGAADQSPESLLQLKALKPGVIQILGVKTSRFLCQRPDGALYGSLHFDPEACSFRELLLEDGYNVYQSEAHGLPLHLCGNKSPHRDPAPRGPARFLPLPGLPPAPPEPPGILAPQPPDVGSSDPLSMVGSQGRSPSYAS

SEQ ID NO: 3951 - protein, 472 aa, Artificial Sequence
  Fusion Protein
HGEGTFTSDKSKQLEKRLVRLFFEWLKNGGHSSIKPPPKGGGGGGGSGGGGSGGGGSADKTHTCPPCPAPEAAGGPSVFLFPPKPKDTLMISRTPEVTCVVVDVSHEDPEVKFNWYVDGVEVHNAKTKPREEQYNSTYRVVSVLTVLHQDWLNGKEYKCKVSNKALPAPIEKTISKAKGQPREPQVYTLPPSRDELTKNQVSLTCLVKGFYPSDIAVEWESNGQPENNYKTTPPVLDSDGSFFLYSKLTVDKSRWQQGNVFSCSVMHEALHNHYTQKSLSLSPGGGGSGSAHPIPDSSPLLQFGGQVRQRYLYTDDACQTEAHLEIREDGTVGGAADQSPESLLQLKALKPGVIQILGVKTSRFLCQRPDGALYGSLHFDPEACSFRELLLEDGYNVYQSEAHGLPLHLCGNKSPHRDPAPRGPARFLPLPGLPPAPPEPPGILAPQPPDVGSSDPLSMVYPSQGRSPSYAS

SEQ ID NO: 3952 - protein, 471 aa, Artificial Sequence
  Fusion Protein
HGEGTFTSDKSKQLEKRLVRLFFEWLKNGGHSSIKPPPKGGGGGGGSGGGGSGGGGSADKTHTCPPCPAPELLGGPSVFLFPPKPKDTLMISRTPEVTCVVVDVSHEDPEVKFNWYVDGVEVHNAKTKPREEQYNNASRVVSVLTVLHQDWLNGKEYKCKVSNKALPAPIEKTISKAKGQPREPQVYTLPPSRDELTKNQVSLTCLVKGFYPSDIAVEWESNGQPENNYKTTPPVLDSDGSFFLYSKLTVDKSRWQQGNVFSCSVMHEALHNHYTQKSLSLSPGGGGSGSAHPIPDSSPLLQFGGQVRQRYLYTDDACQTEAHLEIREDGTVGGAADQSPESLLQLKALKPGVIQILGVKTSRFLCQRPDGALYGSLHFDPEACSFRELLLEDGYNVYQSEAHGLPLHLPGCKSPHRDPAPRGPARFLPLPGLPPAPPEPPGILAPQPPDVGSSDPLSMVGSQGRSPSYAS

SEQ ID NO: 3953 - protein, 472 aa, Artificial Sequence
  Fusion Protein
HGEGTFTSDKSKQLEKRLVRLFFEWLKNGGHSSIKPPPKGGGGGGGSGGGGSGGGGSADKTHTCPPCPAPELLGGPSVFLFPPKPKDTLMISRTPEVTCVVVDVSHEDPEVKFNWYVDGVEVHNAKTKPREEQYNNASRVVSVLTVLHQDWLNGKEYKCKVSNKALPAPIEKTISKAKGQPREPQVYTLPPSRDELTKNQVSLTCLVKGFYPSDIAVEWESNGQPENNYKTTPPVLDSDGSFFLYSKLTVDKSRWQQGNVFSCSVMHEALHNHYTQKSLSLSPGGGGSGSAHPIPDSSPLLQFGGQVRQRYLYTDDACQTEAHLEIREDGTVGGAADQSPESLLQLKALKPGVIQILGVKTSRFLCQRPDGALYGSLHFDPEACSFRELLLEDGYNVYQSEAHGLPLHLPGCKSPHRDPAPRGPARFLPLPGLPPAPPEPPGILAPQPPDVGSSDPLSMVYPSQGRSPSYAS

SEQ ID NO: 3954 - protein, 471 aa, Artificial Sequence
  Fusion Protein
HGEGTFTSDKSKQLEKRLVRLFFEWLKNGGHSSIKPPPKGGGGGGGSGGGGSGGGGSADKTHTCPPCPAPELLGGPSVFLFPPKPKDTLMISRTPEVTCVVVDVSHEDPEVKFNWYVDGVEVHNAKTKPREEQYNNASRVVSVLTVLHQDWLNGKEYKCKVSNKALPAPIEKTISKAKGQPREPQVYTLPPSRDELTKNQVSLTCLVKGFYPSDIAVEWESNGQPENNYKTTPPVLDSDGSFFLYSKLTVDKSRWQQGNVFSCSVMHEALHNHYTQKSLSLSPGGGGSGSAHPIPDSSPLLQFGGQVRQRYLYTDDACQTEAHLEIREDGTVGGAADQSPESLLQLKALKPGVIQILGVKTSRFLCQRPDGALYGSLHFDPEACSFRELLLEDGYNVYQSEAHGLPLHLCGNKSPHRDPAPRGPARFLPLPGLPPAPPEPPGILAPQPPDVGSSDPLSMVGSQGRSPSYAS

SEQ ID NO: 3955 - protein, 472 aa, Artificial Sequence
  Fusion Protein
HGEGTFTSDKSKQLEKRLVRLFFEWLKNGGHSSIKPPPKGGGGGGGSGGGGSGGGGSADKTHTCPPCPAPELLGGPSVFLFPPKPKDTLMISRTPEVTCVVVDVSHEDPEVKFNWYVDGVEVHNAKTKPREEQYNNASRVVSVLTVLHQDWLNGKEYKCKVSNKALPAPIEKTISKAKGQPREPQVYTLPPSRDELTKNQVSLTCLVKGFYPSDIAVEWESNGQPENNYKTTPPVLDSDGSFFLYSKLTVDKSRWQQGNVFSCSVMHEALHNHYTQKSLSLSPGGGGSGSAHPIPDSSPLLQFGGQVRQRYLYTDDACQTEAHLEIREDGTVGGAADQSPESLLQLKALKPGVIQILGVKTSRFLCQRPDGALYGSLHFDPEACSFRELLLEDGYNVYQSEAHGLPLHLCGNKSPHRDPAPRGPARFLPLPGLPPAPPEPPGILAPQPPDVGSSDPLSMVYPSQGRSPSYAS

SEQ ID NO: 3956 - protein, 473 aa, Artificial Sequence
  Fusion Protein
HGEGTFTSDKSKQLEKRLVRLFFEWLKNGGHSSIKPPPKGGGGGGGSGGGGSGGGGSAESKYGPPCPPCPAPEFEGGPSVFLFPPKPKDTLMISRTPEVTCVVVDVSQEDPEVQFNWYVDGVEVHNAKTKPREEQFNSTYRVVSVLTVLHQDWLNGKEYKCKVSNKGLPSSIEKTISKAKGQPREPQVYTLPPSQEEMTKNQVSLTCLVKGFYPSDIAVEWESNGQPENNYKTTPPVLDSDGSFFLYSRLTVDKSRWQEGNVFSCSVMHEALHNHYTQKSLSLSLGGGGSGSAHPIPDSSPLLQFGGQVRQRYLYTDDACQTEAHLEIREDGTVGGAADQSPESLLQLKALKPGVIQILGVKTSRFLCQRPDGALYGSLHFDPEACSFRELLLEDGYNVYQSEAHGLPLHLPGCKSPHRDPAPRGPARFLPLPGLPPAPPEPPGILAPQPPDVGSSDPLSMVGSQGRSPSYAS

SEQ ID NO: 3957 - protein, 474 aa, Artificial Sequence
  Fusion Protein
HGEGTFTSDKSKQLEKRLVRLFFEWLKNGGHSSIKPPPKGGGGGGGSGGGGSGGGGSAESKYGPPCPPCPAPEFEGGPSVFLFPPKPKDTLMISRTPEVTCVVVDVSQEDPEVQFNWYVDGVEVHNAKTKPREEQFNSTYRVVSVLTVLHQDWLNGKEYKCKVSNKGLPSSIEKTISKAKGQPREPQVYTLPPSQEEMTKNQVSLTCLVKGFYPSDIAVEWESNGQPENNYKTTPPVLDSDGSFFLYSRLTVDKSRWQEGNVFSCSVMHEALHNHYTQKSLSLSLGGGGSGSAHPIPDSSPLLQFGGQVRQRYLYTDDACQTEAHLEIREDGTVGGAADQSPESLLQLKALKPGVIQILGVKTSRFLCQRPDGALYGSLHFDPEACSFRELLLEDGYNVYQSEAHGLPLHLPGCKSPHRDPAPRGPARFLPLPGLPPAPPEPPGILAPQPPDVGSSDPLSMVYPSQGRSPSYAS

SEQ ID NO: 3958 - protein, 473 aa, Artificial Sequence
  Fusion Protein
HGEGTFTSDKSKQLEKRLVRLFFEWLKNGGHSSIKPPPKGGGGGGGSGGGGSGGGGSAESKYGPPCPPCPAPEFEGGPSVFLFPPKPKDTLMISRTPEVTCVVVDVSQEDPEVQFNWYVDGVEVHNAKTKPREEQFNSTYRVVSVLTVLHQDWLNGKEYKCKVSNKGLPSSIEKTISKAKGQPREPQVYTLPPSQEEMTKNQVSLTCLVKGFYPSDIAVEWESNGQPENNYKTTPPVLDSDGSFFLYSRLTVDKSRWQEGNVFSCSVMHEALHNHYTQKSLSLSLGGGGSGSAHPIPDSSPLLQFGGQVRQRYLYTDDACQTEAHLEIREDGTVGGAADQSPESLLQLKALKPGVIQILGVKTSRFLCQRPDGALYGSLHFDPEACSFRELLLEDGYNVYQSEAHGLPLHLCGNKSPHRDPAPRGPARFLPLPGLPPAPPEPPGILAPQPPDVGSSDPLSMVGSQGRSPSYAS

SEQ ID NO: 3959 - protein, 474 aa, Artificial Sequence
  Fusion Protein
HGEGTFTSDKSKQLEKRLVRLFFEWLKNGGHSSIKPPPKGGGGGGGSGGGGSGGGGSAESKYGPPCPPCPAPEFEGGPSVFLFPPKPKDTLMISRTPEVTCVVVDVSQEDPEVQFNWYVDGVEVHNAKTKPREEQFNSTYRVVSVLTVLHQDWLNGKEYKCKVSNKGLPSSIEKTISKAKGQPREPQVYTLPPSQEEMTKNQVSLTCLVKGFYPSDIAVEWESNGQPENNYKTTPPVLDSDGSFFLYSRLTVDKSRWQEGNVFSCSVMHEALHNHYTQKSLSLSLGGGGSGSAHPIPDSSPLLQFGGQVRQRYLYTDDACQTEAHLEIREDGTVGGAADQSPESLLQLKALKPGVIQILGVKTSRFLCQRPDGALYGSLHFDPEACSFRELLLEDGYNVYQSEAHGLPLHLCGNKSPHRDPAPRGPARFLPLPGLPPAPPEPPGILAPQPPDVGSSDPLSMVYPSQGRSPSYAS

SEQ ID NO: 3960 - protein, 471 aa, Artificial Sequence
  Fusion Protein
HGEGTFTSDKSKQLEKRLVRLFFEWLKNGGHSKGKPPPKGGGGGGGSGGGGSGGGGSADKTHTCPPCPAPEAAGGPSVFLFPPKPKDTLMISRTPEVTCVVVDVSHEDPEVKFNWYVDGVEVHNAKTKPREEQYNSTYRVVSVLTVLHQDWLNGKEYKCKVSNKALPAPIEKTISKAKGQPREPQVYTLPPSRDELTKNQVSLTCLVKGFYPSDIAVEWESNGQPENNYKTTPPVLDSDGSFFLYSKLTVDKSRWQQGNVFSCSVMHEALHNHYTQKSLSLSPGGGGSGSAHPIPDSSPLLQFGGQVRQRYLYTDDACQTEAHLEIREDGTVGGAADQSPESLLQLKALKPGVIQILGVKTSRFLCQRPDGALYGSLHFDPEACSFRELLLEDGYNVYQSEAHGLPLHLPGCKSPHRDPAPRGPARFLPLPGLPPAPPEPPGILAPQPPDVGSSDPLSMVGSQGRSPSYAS

SEQ ID NO: 3961 - protein, 472 aa, Artificial Sequence
  Fusion Protein
HGEGTFTSDKSKQLEKRLVRLFFEWLKNGGHSKGKPPPKGGGGGGGSGGGGSGGGGSADKTHTCPPCPAPEAAGGPSVFLFPPKPKDTLMISRTPEVTCVVVDVSHEDPEVKFNWYVDGVEVHNAKTKPREEQYNSTYRVVSVLTVLHQDWLNGKEYKCKVSNKALPAPIEKTISKAKGQPREPQVYTLPPSRDELTKNQVSLTCLVKGFYPSDIAVEWESNGQPENNYKTTPPVLDSDGSFFLYSKLTVDKSRWQQGNVFSCSVMHEALHNHYTQKSLSLSPGGGGSGSAHPIPDSSPLLQFGGQVRQRYLYTDDACQTEAHLEIREDGTVGGAADQSPESLLQLKALKPGVIQILGVKTSRFLCQRPDGALYGSLHFDPEACSFRELLLEDGYNVYQSEAHGLPLHLPGCKSPHRDPAPRGPARFLPLPGLPPAPPEPPGILAPQPPDVGSSDPLSMVYPSQGRSPSYAS

SEQ ID NO: 3962 - protein, 471 aa, Artificial Sequence
  Fusion Protein
HGEGTFTSDKSKQLEKRLVRLFFEWLKNGGHSKGKPPPKGGGGGGGSGGGGSGGGGSADKTHTCPPCPAPEAAGGPSVFLFPPKPKDTLMISRTPEVTCVVVDVSHEDPEVKFNWYVDGVEVHNAKTKPREEQYNSTYRVVSVLTVLHQDWLNGKEYKCKVSNKALPAPIEKTISKAKGQPREPQVYTLPPSRDELTKNQVSLTCLVKGFYPSDIAVEWESNGQPENNYKTTPPVLDSDGSFFLYSKLTVDKSRWQQGNVFSCSVMHEALHNHYTQKSLSLSPGGGGSGSAHPIPDSSPLLQFGGQVRQRYLYTDDACQTEAHLEIREDGTVGGAADQSPESLLQLKALKPGVIQILGVKTSRFLCQRPDGALYGSLHFDPEACSFRELLLEDGYNVYQSEAHGLPLHLCGNKSPHRDPAPRGPARFLPLPGLPPAPPEPPGILAPQPPDVGSSDPLSMVGSQGRSPSYAS

SEQ ID NO: 3963 - protein, 472 aa, Artificial Sequence
  Fusion Protein
HGEGTFTSDKSKQLEKRLVRLFFEWLKNGGHSKGKPPPKGGGGGGGSGGGGSGGGGSADKTHTCPPCPAPEAAGGPSVFLFPPKPKDTLMISRTPEVTCVVVDVSHEDPEVKFNWYVDGVEVHNAKTKPREEQYNSTYRVVSVLTVLHQDWLNGKEYKCKVSNKALPAPIEKTISKAKGQPREPQVYTLPPSRDELTKNQVSLTCLVKGFYPSDIAVEWESNGQPENNYKTTPPVLDSDGSFFLYSKLTVDKSRWQQGNVFSCSVMHEALHNHYTQKSLSLSPGGGGSGSAHPIPDSSPLLQFGGQVRQRYLYTDDACQTEAHLEIREDGTVGGAADQSPESLLQLKALKPGVIQILGVKTSRFLCQRPDGALYGSLHFDPEACSFRELLLEDGYNVYQSEAHGLPLHLCGNKSPHRDPAPRGPARFLPLPGLPPAPPEPPGILAPQPPDVGSSDPLSMVYPSQGRSPSYAS

SEQ ID NO: 3964 - protein, 471 aa, Artificial Sequence
  Fusion Protein
HGEGTFTSDKSKQLEKRLVRLFFEWLKNGGHSKGKPPPKGGGGGGGSGGGGSGGGGSADKTHTCPPCPAPELLGGPSVFLFPPKPKDTLMISRTPEVTCVVVDVSHEDPEVKFNWYVDGVEVHNAKTKPREEQYNNASRVVSVLTVLHQDWLNGKEYKCKVSNKALPAPIEKTISKAKGQPREPQVYTLPPSRDELTKNQVSLTCLVKGFYPSDIAVEWESNGQPENNYKTTPPVLDSDGSFFLYSKLTVDKSRWQQGNVFSCSVMHEALHNHYTQKSLSLSPGGGGSGSAHPIPDSSPLLQFGGQVRQRYLYTDDACQTEAHLEIREDGTVGGAADQSPESLLQLKALKPGVIQILGVKTSRFLCQRPDGALYGSLHFDPEACSFRELLLEDGYNVYQSEAHGLPLHLPGCKSPHRDPAPRGPARFLPLPGLPPAPPEPPGILAPQPPDVGSSDPLSMVGSQGRSPSYAS

SEQ ID NO: 3965 - protein, 472 aa, Artificial Sequence
  Fusion Protein
HGEGTFTSDKSKQLEKRLVRLFFEWLKNGGHSKGKPPPKGGGGGGGSGGGGSGGGGSADKTHTCPPCPAPELLGGPSVFLFPPKPKDTLMISRTPEVTCVVVDVSHEDPEVKFNWYVDGVEVHNAKTKPREEQYNNASRVVSVLTVLHQDWLNGKEYKCKVSNKALPAPIEKTISKAKGQPREPQVYTLPPSRDELTKNQVSLTCLVKGFYPSDIAVEWESNGQPENNYKTTPPVLDSDGSFFLYSKLTVDKSRWQQGNVFSCSVMHEALHNHYTQKSLSLSPGGGGSGSAHPIPDSSPLLQFGGQVRQRYLYTDDACQTEAHLEIREDGTVGGAADQSPESLLQLKALKPGVIQILGVKTSRFLCQRPDGALYGSLHFDPEACSFRELLLEDGYNVYQSEAHGLPLHLPGCKSPHRDPAPRGPARFLPLPGLPPAPPEPPGILAPQPPDVGSSDPLSMVYPSQGRSPSYAS

SEQ ID NO: 3966 - protein, 471 aa, Artificial Sequence
  Fusion Protein
HGEGTFTSDKSKQLEKRLVRLFFEWLKNGGHSKGKPPPKGGGGGGGSGGGGSGGGGSADKTHTCPPCPAPELLGGPSVFLFPPKPKDTLMISRTPEVTCVVVDVSHEDPEVKFNWYVDGVEVHNAKTKPREEQYNNASRVVSVLTVLHQDWLNGKEYKCKVSNKALPAPIEKTISKAKGQPREPQVYTLPPSRDELTKNQVSLTCLVKGFYPSDIAVEWESNGQPENNYKTTPPVLDSDGSFFLYSKLTVDKSRWQQGNVFSCSVMHEALHNHYTQKSLSLSPGGGGSGSAHPIPDSSPLLQFGGQVRQRYLYTDDACQTEAHLEIREDGTVGGAADQSPESLLQLKALKPGVIQILGVKTSRFLCQRPDGALYGSLHFDPEACSFRELLLEDGYNVYQSEAHGLPLHLCGNKSPHRDPAPRGPARFLPLPGLPPAPPEPPGILAPQPPDVGSSDPLSMVGSQGRSPSYAS

SEQ ID NO: 3967 - protein, 472 aa, Artificial Sequence
  Fusion Protein
HGEGTFTSDKSKQLEKRLVRLFFEWLKNGGHSKGKPPPKGGGGGGGSGGGGSGGGGSADKTHTCPPCPAPELLGGPSVFLFPPKPKDTLMISRTPEVTCVVVDVSHEDPEVKFNWYVDGVEVHNAKTKPREEQYNNASRVVSVLTVLHQDWLNGKEYKCKVSNKALPAPIEKTISKAKGQPREPQVYTLPPSRDELTKNQVSLTCLVKGFYPSDIAVEWESNGQPENNYKTTPPVLDSDGSFFLYSKLTVDKSRWQQGNVFSCSVMHEALHNHYTQKSLSLSPGGGGSGSAHPIPDSSPLLQFGGQVRQRYLYTDDACQTEAHLEIREDGTVGGAADQSPESLLQLKALKPGVIQILGVKTSRFLCQRPDGALYGSLHFDPEACSFRELLLEDGYNVYQSEAHGLPLHLCGNKSPHRDPAPRGPARFLPLPGLPPAPPEPPGILAPQPPDVGSSDPLSMVYPSQGRSPSYAS

SEQ ID NO: 3968 - protein, 473 aa, Artificial Sequence
  Fusion Protein
HGEGTFTSDKSKQLEKRLVRLFFEWLKNGGHSKGKPPPKGGGGGGGSGGGGSGGGGSAESKYGPPCPPCPAPEFEGGPSVFLFPPKPKDTLMISRTPEVTCVVVDVSQEDPEVQFNWYVDGVEVHNAKTKPREEQFNSTYRVVSVLTVLHQDWLNGKEYKCKVSNKGLPSSIEKTISKAKGQPREPQVYTLPPSQEEMTKNQVSLTCLVKGFYPSDIAVEWESNGQPENNYKTTPPVLDSDGSFFLYSRLTVDKSRWQEGNVFSCSVMHEALHNHYTQKSLSLSLGGGGSGSAHPIPDSSPLLQFGGQVRQRYLYTDDACQTEAHLEIREDGTVGGAADQSPESLLQLKALKPGVIQILGVKTSRFLCQRPDGALYGSLHFDPEACSFRELLLEDGYNVYQSEAHGLPLHLPGCKSPHRDPAPRGPARFLPLPGLPPAPPEPPGILAPQPPDVGSSDPLSMVGSQGRSPSYAS

SEQ ID NO: 3969 - protein, 474 aa, Artificial Sequence
  Fusion Protein
HGEGTFTSDKSKQLEKRLVRLFFEWLKNGGHSKGKPPPKGGGGGGGSGGGGSGGGGSAESKYGPPCPPCPAPEFEGGPSVFLFPPKPKDTLMISRTPEVTCVVVDVSQEDPEVQFNWYVDGVEVHNAKTKPREEQFNSTYRVVSVLTVLHQDWLNGKEYKCKVSNKGLPSSIEKTISKAKGQPREPQVYTLPPSQEEMTKNQVSLTCLVKGFYPSDIAVEWESNGQPENNYKTTPPVLDSDGSFFLYSRLTVDKSRWQEGNVFSCSVMHEALHNHYTQKSLSLSLGGGGSGSAHPIPDSSPLLQFGGQVRQRYLYTDDACQTEAHLEIREDGTVGGAADQSPESLLQLKALKPGVIQILGVKTSRFLCQRPDGALYGSLHFDPEACSFRELLLEDGYNVYQSEAHGLPLHLPGCKSPHRDPAPRGPARFLPLPGLPPAPPEPPGILAPQPPDVGSSDPLSMVYPSQGRSPSYAS

SEQ ID NO: 3970 - protein, 473 aa, Artificial Sequence
  Fusion Protein
HGEGTFTSDKSKQLEKRLVRLFFEWLKNGGHSKGKPPPKGGGGGGGSGGGGSGGGGSAESKYGPPCPPCPAPEFEGGPSVFLFPPKPKDTLMISRTPEVTCVVVDVSQEDPEVQFNWYVDGVEVHNAKTKPREEQFNSTYRVVSVLTVLHQDWLNGKEYKCKVSNKGLPSSIEKTISKAKGQPREPQVYTLPPSQEEMTKNQVSLTCLVKGFYPSDIAVEWESNGQPENNYKTTPPVLDSDGSFFLYSRLTVDKSRWQEGNVFSCSVMHEALHNHYTQKSLSLSLGGGGSGSAHPIPDSSPLLQFGGQVRQRYLYTDDACQTEAHLEIREDGTVGGAADQSPESLLQLKALKPGVIQILGVKTSRFLCQRPDGALYGSLHFDPEACSFRELLLEDGYNVYQSEAHGLPLHLCGNKSPHRDPAPRGPARFLPLPGLPPAPPEPPGILAPQPPDVGSSDPLSMVGSQGRSPSYAS

SEQ ID NO: 3971 - protein, 474 aa, Artificial Sequence
  Fusion Protein
HGEGTFTSDKSKQLEKRLVRLFFEWLKNGGHSKGKPPPKGGGGGGGSGGGGSGGGGSAESKYGPPCPPCPAPEFEGGPSVFLFPPKPKDTLMISRTPEVTCVVVDVSQEDPEVQFNWYVDGVEVHNAKTKPREEQFNSTYRVVSVLTVLHQDWLNGKEYKCKVSNKGLPSSIEKTISKAKGQPREPQVYTLPPSQEEMTKNQVSLTCLVKGFYPSDIAVEWESNGQPENNYKTTPPVLDSDGSFFLYSRLTVDKSRWQEGNVFSCSVMHEALHNHYTQKSLSLSLGGGGSGSAHPIPDSSPLLQFGGQVRQRYLYTDDACQTEAHLEIREDGTVGGAADQSPESLLQLKALKPGVIQILGVKTSRFLCQRPDGALYGSLHFDPEACSFRELLLEDGYNVYQSEAHGLPLHLCGNKSPHRDPAPRGPARFLPLPGLPPAPPEPPGILAPQPPDVGSSDPLSMVYPSQGRSPSYAS

SEQ ID NO: 3972 - protein, 471 aa, Artificial Sequence
  Fusion Protein
HGEGTFTSDKSKQLEKRLVRLFFEWLKKGGHSSIKPPPKGGGGGGGSGGGGSGGGGSADKTHTCPPCPAPEAAGGPSVFLFPPKPKDTLMISRTPEVTCVVVDVSHEDPEVKFNWYVDGVEVHNAKTKPREEQYNSTYRVVSVLTVLHQDWLNGKEYKCKVSNKALPAPIEKTISKAKGQPREPQVYTLPPSRDELTKNQVSLTCLVKGFYPSDIAVEWESNGQPENNYKTTPPVLDSDGSFFLYSKLTVDKSRWQQGNVFSCSVMHEALHNHYTQKSLSLSPGGGGSGSAHPIPDSSPLLQFGGQVRQRYLYTDDACQTEAHLEIREDGTVGGAADQSPESLLQLKALKPGVIQILGVKTSRFLCQRPDGALYGSLHFDPEACSFRELLLEDGYNVYQSEAHGLPLHLPGCKSPHRDPAPRGPARFLPLPGLPPAPPEPPGILAPQPPDVGSSDPLSMVGSQGRSPSYAS

SEQ ID NO: 3973 - protein, 472 aa, Artificial Sequence
  Fusion Protein
HGEGTFTSDKSKQLEKRLVRLFFEWLKKGGHSSIKPPPKGGGGGGGSGGGGSGGGGSADKTHTCPPCPAPEAAGGPSVFLFPPKPKDTLMISRTPEVTCVVVDVSHEDPEVKFNWYVDGVEVHNAKTKPREEQYNSTYRVVSVLTVLHQDWLNGKEYKCKVSNKALPAPIEKTISKAKGQPREPQVYTLPPSRDELTKNQVSLTCLVKGFYPSDIAVEWESNGQPENNYKTTPPVLDSDGSFFLYSKLTVDKSRWQQGNVFSCSVMHEALHNHYTQKSLSLSPGGGGSGSAHPIPDSSPLLQFGGQVRQRYLYTDDACQTEAHLEIREDGTVGGAADQSPESLLQLKALKPGVIQILGVKTSRFLCQRPDGALYGSLHFDPEACSFRELLLEDGYNVYQSEAHGLPLHLPGCKSPHRDPAPRGPARFLPLPGLPPAPPEPPGILAPQPPDVGSSDPLSMVYPSQGRSPSYAS

SEQ ID NO: 3974 - protein, 471 aa, Artificial Sequence
  Fusion Protein
HGEGTFTSDKSKQLEKRLVRLFFEWLKKGGHSSIKPPPKGGGGGGGSGGGGSGGGGSADKTHTCPPCPAPEAAGGPSVFLFPPKPKDTLMISRTPEVTCVVVDVSHEDPEVKFNWYVDGVEVHNAKTKPREEQYNSTYRVVSVLTVLHQDWLNGKEYKCKVSNKALPAPIEKTISKAKGQPREPQVYTLPPSRDELTKNQVSLTCLVKGFYPSDIAVEWESNGQPENNYKTTPPVLDSDGSFFLYSKLTVDKSRWQQGNVFSCSVMHEALHNHYTQKSLSLSPGGGGSGSAHPIPDSSPLLQFGGQVRQRYLYTDDACQTEAHLEIREDGTVGGAADQSPESLLQLKALKPGVIQILGVKTSRFLCQRPDGALYGSLHFDPEACSFRELLLEDGYNVYQSEAHGLPLHLCGNKSPHRDPAPRGPARFLPLPGLPPAPPEPPGILAPQPPDVGSSDPLSMVGSQGRSPSYAS

SEQ ID NO: 3975 - protein, 472 aa, Artificial Sequence
  Fusion Protein
HGEGTFTSDKSKQLEKRLVRLFFEWLKKGGHSSIKPPPKGGGGGGGSGGGGSGGGGSADKTHTCPPCPAPEAAGGPSVFLFPPKPKDTLMISRTPEVTCVVVDVSHEDPEVKFNWYVDGVEVHNAKTKPREEQYNSTYRVVSVLTVLHQDWLNGKEYKCKVSNKALPAPIEKTISKAKGQPREPQVYTLPPSRDELTKNQVSLTCLVKGFYPSDIAVEWESNGQPENNYKTTPPVLDSDGSFFLYSKLTVDKSRWQQGNVFSCSVMHEALHNHYTQKSLSLSPGGGGSGSAHPIPDSSPLLQFGGQVRQRYLYTDDACQTEAHLEIREDGTVGGAADQSPESLLQLKALKPGVIQILGVKTSRFLCQRPDGALYGSLHFDPEACSFRELLLEDGYNVYQSEAHGLPLHLCGNKSPHRDPAPRGPARFLPLPGLPPAPPEPPGILAPQPPDVGSSDPLSMVYPSQGRSPSYAS

SEQ ID NO: 3976 - protein, 471 aa, Artificial Sequence
  Fusion Protein
HGEGTFTSDKSKQLEKRLVRLFFEWLKKGGHSSIKPPPKGGGGGGGSGGGGSGGGGSADKTHTCPPCPAPELLGGPSVFLFPPKPKDTLMISRTPEVTCVVVDVSHEDPEVKFNWYVDGVEVHNAKTKPREEQYNNASRVVSVLTVLHQDWLNGKEYKCKVSNKALPAPIEKTISKAKGQPREPQVYTLPPSRDELTKNQVSLTCLVKGFYPSDIAVEWESNGQPENNYKTTPPVLDSDGSFFLYSKLTVDKSRWQQGNVFSCSVMHEALHNHYTQKSLSLSPGGGGSGSAHPIPDSSPLLQFGGQVRQRYLYTDDACQTEAHLEIREDGTVGGAADQSPESLLQLKALKPGVIQILGVKTSRFLCQRPDGALYGSLHFDPEACSFRELLLEDGYNVYQSEAHGLPLHLPGCKSPHRDPAPRGPARFLPLPGLPPAPPEPPGILAPQPPDVGSSDPLSMVGSQGRSPSYAS

SEQ ID NO: 3977 - protein, 472 aa, Artificial Sequence
  Fusion Protein
HGEGTFTSDKSKQLEKRLVRLFFEWLKKGGHSSIKPPPKGGGGGGGSGGGGSGGGGSADKTHTCPPCPAPELLGGPSVFLFPPKPKDTLMISRTPEVTCVVVDVSHEDPEVKFNWYVDGVEVHNAKTKPREEQYNNASRVVSVLTVLHQDWLNGKEYKCKVSNKALPAPIEKTISKAKGQPREPQVYTLPPSRDELTKNQVSLTCLVKGFYPSDIAVEWESNGQPENNYKTTPPVLDSDGSFFLYSKLTVDKSRWQQGNVFSCSVMHEALHNHYTQKSLSLSPGGGGSGSAHPIPDSSPLLQFGGQVRQRYLYTDDACQTEAHLEIREDGTVGGAADQSPESLLQLKALKPGVIQILGVKTSRFLCQRPDGALYGSLHFDPEACSFRELLLEDGYNVYQSEAHGLPLHLPGCKSPHRDPAPRGPARFLPLPGLPPAPPEPPGILAPQPPDVGSSDPLSMVYPSQGRSPSYAS

SEQ ID NO: 3978 - protein, 471 aa, Artificial Sequence
  Fusion Protein
HGEGTFTSDKSKQLEKRLVRLFFEWLKKGGHSSIKPPPKGGGGGGGSGGGGSGGGGSADKTHTCPPCPAPELLGGPSVFLFPPKPKDTLMISRTPEVTCVVVDVSHEDPEVKFNWYVDGVEVHNAKTKPREEQYNNASRVVSVLTVLHQDWLNGKEYKCKVSNKALPAPIEKTISKAKGQPREPQVYTLPPSRDELTKNQVSLTCLVKGFYPSDIAVEWESNGQPENNYKTTPPVLDSDGSFFLYSKLTVDKSRWQQGNVFSCSVMHEALHNHYTQKSLSLSPGGGGSGSAHPIPDSSPLLQFGGQVRQRYLYTDDACQTEAHLEIREDGTVGGAADQSPESLLQLKALKPGVIQILGVKTSRFLCQRPDGALYGSLHFDPEACSFRELLLEDGYNVYQSEAHGLPLHLCGNKSPHRDPAPRGPARFLPLPGLPPAPPEPPGILAPQPPDVGSSDPLSMVGSQGRSPSYAS

SEQ ID NO: 3979 - protein, 472 aa, Artificial Sequence
  Fusion Protein
HGEGTFTSDKSKQLEKRLVRLFFEWLKKGGHSSIKPPPKGGGGGGGSGGGGSGGGGSADKTHTCPPCPAPELLGGPSVFLFPPKPKDTLMISRTPEVTCVVVDVSHEDPEVKFNWYVDGVEVHNAKTKPREEQYNNASRVVSVLTVLHQDWLNGKEYKCKVSNKALPAPIEKTISKAKGQPREPQVYTLPPSRDELTKNQVSLTCLVKGFYPSDIAVEWESNGQPENNYKTTPPVLDSDGSFFLYSKLTVDKSRWQQGNVFSCSVMHEALHNHYTQKSLSLSPGGGGSGSAHPIPDSSPLLQFGGQVRQRYLYTDDACQTEAHLEIREDGTVGGAADQSPESLLQLKALKPGVIQILGVKTSRFLCQRPDGALYGSLHFDPEACSFRELLLEDGYNVYQSEAHGLPLHLCGNKSPHRDPAPRGPARFLPLPGLPPAPPEPPGILAPQPPDVGSSDPLSMVYPSQGRSPSYAS

SEQ ID NO: 3980 - protein, 473 aa, Artificial Sequence
  Fusion Protein
HGEGTFTSDKSKQLEKRLVRLFFEWLKKGGHSSIKPPPKGGGGGGGSGGGGSGGGGSAESKYGPPCPPCPAPEFEGGPSVFLFPPKPKDTLMISRTPEVTCVVVDVSQEDPEVQFNWYVDGVEVHNAKTKPREEQFNSTYRVVSVLTVLHQDWLNGKEYKCKVSNKGLPSSIEKTISKAKGQPREPQVYTLPPSQEEMTKNQVSLTCLVKGFYPSDIAVEWESNGQPENNYKTTPPVLDSDGSFFLYSRLTVDKSRWQEGNVFSCSVMHEALHNHYTQKSLSLSLGGGGSGSAHPIPDSSPLLQFGGQVRQRYLYTDDACQTEAHLEIREDGTVGGAADQSPESLLQLKALKPGVIQILGVKTSRFLCQRPDGALYGSLHFDPEACSFRELLLEDGYNVYQSEAHGLPLHLPGCKSPHRDPAPRGPARFLPLPGLPPAPPEPPGILAPQPPDVGSSDPLSMVGSQGRSPSYAS

SEQ ID NO: 3981 - protein, 474 aa, Artificial Sequence
  Fusion Protein
HGEGTFTSDKSKQLEKRLVRLFFEWLKKGGHSSIKPPPKGGGGGGGSGGGGSGGGGSAESKYGPPCPPCPAPEFEGGPSVFLFPPKPKDTLMISRTPEVTCVVVDVSQEDPEVQFNWYVDGVEVHNAKTKPREEQFNSTYRVVSVLTVLHQDWLNGKEYKCKVSNKGLPSSIEKTISKAKGQPREPQVYTLPPSQEEMTKNQVSLTCLVKGFYPSDIAVEWESNGQPENNYKTTPPVLDSDGSFFLYSRLTVDKSRWQEGNVFSCSVMHEALHNHYTQKSLSLSLGGGGSGSAHPIPDSSPLLQFGGQVRQRYLYTDDACQTEAHLEIREDGTVGGAADQSPESLLQLKALKPGVIQILGVKTSRFLCQRPDGALYGSLHFDPEACSFRELLLEDGYNVYQSEAHGLPLHLPGCKSPHRDPAPRGPARFLPLPGLPPAPPEPPGILAPQPPDVGSSDPLSMVYPSQGRSPSYAS

SEQ ID NO: 3982 - protein, 473 aa, Artificial Sequence
  Fusion Protein
HGEGTFTSDKSKQLEKRLVRLFFEWLKKGGHSSIKPPPKGGGGGGGSGGGGSGGGGSAESKYGPPCPPCPAPEFEGGPSVFLFPPKPKDTLMISRTPEVTCVVVDVSQEDPEVQFNWYVDGVEVHNAKTKPREEQFNSTYRVVSVLTVLHQDWLNGKEYKCKVSNKGLPSSIEKTISKAKGQPREPQVYTLPPSQEEMTKNQVSLTCLVKGFYPSDIAVEWESNGQPENNYKTTPPVLDSDGSFFLYSRLTVDKSRWQEGNVFSCSVMHEALHNHYTQKSLSLSLGGGGSGSAHPIPDSSPLLQFGGQVRQRYLYTDDACQTEAHLEIREDGTVGGAADQSPESLLQLKALKPGVIQILGVKTSRFLCQRPDGALYGSLHFDPEACSFRELLLEDGYNVYQSEAHGLPLHLCGNKSPHRDPAPRGPARFLPLPGLPPAPPEPPGILAPQPPDVGSSDPLSMVGSQGRSPSYAS

SEQ ID NO: 3983 - protein, 474 aa, Artificial Sequence
  Fusion Protein
HGEGTFTSDKSKQLEKRLVRLFFEWLKKGGHSSIKPPPKGGGGGGGSGGGGSGGGGSAESKYGPPCPPCPAPEFEGGPSVFLFPPKPKDTLMISRTPEVTCVVVDVSQEDPEVQFNWYVDGVEVHNAKTKPREEQFNSTYRVVSVLTVLHQDWLNGKEYKCKVSNKGLPSSIEKTISKAKGQPREPQVYTLPPSQEEMTKNQVSLTCLVKGFYPSDIAVEWESNGQPENNYKTTPPVLDSDGSFFLYSRLTVDKSRWQEGNVFSCSVMHEALHNHYTQKSLSLSLGGGGSGSAHPIPDSSPLLQFGGQVRQRYLYTDDACQTEAHLEIREDGTVGGAADQSPESLLQLKALKPGVIQILGVKTSRFLCQRPDGALYGSLHFDPEACSFRELLLEDGYNVYQSEAHGLPLHLCGNKSPHRDPAPRGPARFLPLPGLPPAPPEPPGILAPQPPDVGSSDPLSMVYPSQGRSPSYAS

SEQ ID NO: 3984 - protein, 471 aa, Artificial Sequence
  Fusion Protein
HGEGTFTSDKSKQLEKRLVRLFFEWLKKGGHSKGKPPPKGGGGGGGSGGGGSGGGGSADKTHTCPPCPAPEAAGGPSVFLFPPKPKDTLMISRTPEVTCVVVDVSHEDPEVKFNWYVDGVEVHNAKTKPREEQYNSTYRVVSVLTVLHQDWLNGKEYKCKVSNKALPAPIEKTISKAKGQPREPQVYTLPPSRDELTKNQVSLTCLVKGFYPSDIAVEWESNGQPENNYKTTPPVLDSDGSFFLYSKLTVDKSRWQQGNVFSCSVMHEALHNHYTQKSLSLSPGGGGSGSAHPIPDSSPLLQFGGQVRQRYLYTDDACQTEAHLEIREDGTVGGAADQSPESLLQLKALKPGVIQILGVKTSRFLCQRPDGALYGSLHFDPEACSFRELLLEDGYNVYQSEAHGLPLHLPGCKSPHRDPAPRGPARFLPLPGLPPAPPEPPGILAPQPPDVGSSDPLSMVGSQGRSPSYAS

SEQ ID NO: 3985 - protein, 472 aa, Artificial Sequence
  Fusion Protein
HGEGTFTSDKSKQLEKRLVRLFFEWLKKGGHSKGKPPPKGGGGGGGSGGGGSGGGGSADKTHTCPPCPAPEAAGGPSVFLFPPKPKDTLMISRTPEVTCVVVDVSHEDPEVKFNWYVDGVEVHNAKTKPREEQYNSTYRVVSVLTVLHQDWLNGKEYKCKVSNKALPAPIEKTISKAKGQPREPQVYTLPPSRDELTKNQVSLTCLVKGFYPSDIAVEWESNGQPENNYKTTPPVLDSDGSFFLYSKLTVDKSRWQQGNVFSCSVMHEALHNHYTQKSLSLSPGGGGSGSAHPIPDSSPLLQFGGQVRQRYLYTDDACQTEAHLEIREDGTVGGAADQSPESLLQLKALKPGVIQILGVKTSRFLCQRPDGALYGSLHFDPEACSFRELLLEDGYNVYQSEAHGLPLHLPGCKSPHRDPAPRGPARFLPLPGLPPAPPEPPGILAPQPPDVGSSDPLSMVYPSQGRSPSYAS

SEQ ID NO: 3986 - protein, 471 aa, Artificial Sequence
  Fusion Protein
HGEGTFTSDKSKQLEKRLVRLFFEWLKKGGHSKGKPPPKGGGGGGGSGGGGSGGGGSADKTHTCPPCPAPEAAGGPSVFLFPPKPKDTLMISRTPEVTCVVVDVSHEDPEVKFNWYVDGVEVHNAKTKPREEQYNSTYRVVSVLTVLHQDWLNGKEYKCKVSNKALPAPIEKTISKAKGQPREPQVYTLPPSRDELTKNQVSLTCLVKGFYPSDIAVEWESNGQPENNYKTTPPVLDSDGSFFLYSKLTVDKSRWQQGNVFSCSVMHEALHNHYTQKSLSLSPGGGGSGSAHPIPDSSPLLQFGGQVRQRYLYTDDACQTEAHLEIREDGTVGGAADQSPESLLQLKALKPGVIQILGVKTSRFLCQRPDGALYGSLHFDPEACSFRELLLEDGYNVYQSEAHGLPLHLCGNKSPHRDPAPRGPARFLPLPGLPPAPPEPPGILAPQPPDVGSSDPLSMVGSQGRSPSYAS

SEQ ID NO: 3987 - protein, 472 aa, Artificial Sequence
  Fusion Protein
HGEGTFTSDKSKQLEKRLVRLFFEWLKKGGHSKGKPPPKGGGGGGGSGGGGSGGGGSADKTHTCPPCPAPEAAGGPSVFLFPPKPKDTLMISRTPEVTCVVVDVSHEDPEVKFNWYVDGVEVHNAKTKPREEQYNSTYRVVSVLTVLHQDWLNGKEYKCKVSNKALPAPIEKTISKAKGQPREPQVYTLPPSRDELTKNQVSLTCLVKGFYPSDIAVEWESNGQPENNYKTTPPVLDSDGSFFLYSKLTVDKSRWQQGNVFSCSVMHEALHNHYTQKSLSLSPGGGGSGSAHPIPDSSPLLQFGGQVRQRYLYTDDACQTEAHLEIREDGTVGGAADQSPESLLQLKALKPGVIQILGVKTSRFLCQRPDGALYGSLHFDPEACSFRELLLEDGYNVYQSEAHGLPLHLCGNKSPHRDPAPRGPARFLPLPGLPPAPPEPPGILAPQPPDVGSSDPLSMVYPSQGRSPSYAS

SEQ ID NO: 3988 - protein, 471 aa, Artificial Sequence
  Fusion Protein
HGEGTFTSDKSKQLEKRLVRLFFEWLKKGGHSKGKPPPKGGGGGGGSGGGGSGGGGSADKTHTCPPCPAPELLGGPSVFLFPPKPKDTLMISRTPEVTCVVVDVSHEDPEVKFNWYVDGVEVHNAKTKPREEQYNNASRVVSVLTVLHQDWLNGKEYKCKVSNKALPAPIEKTISKAKGQPREPQVYTLPPSRDELTKNQVSLTCLVKGFYPSDIAVEWESNGQPENNYKTTPPVLDSDGSFFLYSKLTVDKSRWQQGNVFSCSVMHEALHNHYTQKSLSLSPGGGGSGSAHPIPDSSPLLQFGGQVRQRYLYTDDACQTEAHLEIREDGTVGGAADQSPESLLQLKALKPGVIQILGVKTSRFLCQRPDGALYGSLHFDPEACSFRELLLEDGYNVYQSEAHGLPLHLPGCKSPHRDPAPRGPARFLPLPGLPPAPPEPPGILAPQPPDVGSSDPLSMVGSQGRSPSYAS

SEQ ID NO: 3989 - protein, 472 aa, Artificial Sequence
  Fusion Protein
HGEGTFTSDKSKQLEKRLVRLFFEWLKKGGHSKGKPPPKGGGGGGGSGGGGSGGGGSADKTHTCPPCPAPELLGGPSVFLFPPKPKDTLMISRTPEVTCVVVDVSHEDPEVKFNWYVDGVEVHNAKTKPREEQYNNASRVVSVLTVLHQDWLNGKEYKCKVSNKALPAPIEKTISKAKGQPREPQVYTLPPSRDELTKNQVSLTCLVKGFYPSDIAVEWESNGQPENNYKTTPPVLDSDGSFFLYSKLTVDKSRWQQGNVFSCSVMHEALHNHYTQKSLSLSPGGGGSGSAHPIPDSSPLLQFGGQVRQRYLYTDDACQTEAHLEIREDGTVGGAADQSPESLLQLKALKPGVIQILGVKTSRFLCQRPDGALYGSLHFDPEACSFRELLLEDGYNVYQSEAHGLPLHLPGCKSPHRDPAPRGPARFLPLPGLPPAPPEPPGILAPQPPDVGSSDPLSMVYPSQGRSPSYAS

SEQ ID NO: 3990 - protein, 471 aa, Artificial Sequence
  Fusion Protein
HGEGTFTSDKSKQLEKRLVRLFFEWLKKGGHSKGKPPPKGGGGGGGSGGGGSGGGGSADKTHTCPPCPAPELLGGPSVFLFPPKPKDTLMISRTPEVTCVVVDVSHEDPEVKFNWYVDGVEVHNAKTKPREEQYNNASRVVSVLTVLHQDWLNGKEYKCKVSNKALPAPIEKTISKAKGQPREPQVYTLPPSRDELTKNQVSLTCLVKGFYPSDIAVEWESNGQPENNYKTTPPVLDSDGSFFLYSKLTVDKSRWQQGNVFSCSVMHEALHNHYTQKSLSLSPGGGGSGSAHPIPDSSPLLQFGGQVRQRYLYTDDACQTEAHLEIREDGTVGGAADQSPESLLQLKALKPGVIQILGVKTSRFLCQRPDGALYGSLHFDPEACSFRELLLEDGYNVYQSEAHGLPLHLCGNKSPHRDPAPRGPARFLPLPGLPPAPPEPPGILAPQPPDVGSSDPLSMVGSQGRSPSYAS

SEQ ID NO: 3991 - protein, 472 aa, Artificial Sequence
  Fusion Protein
HGEGTFTSDKSKQLEKRLVRLFFEWLKKGGHSKGKPPPKGGGGGGGSGGGGSGGGGSADKTHTCPPCPAPELLGGPSVFLFPPKPKDTLMISRTPEVTCVVVDVSHEDPEVKFNWYVDGVEVHNAKTKPREEQYNNASRVVSVLTVLHQDWLNGKEYKCKVSNKALPAPIEKTISKAKGQPREPQVYTLPPSRDELTKNQVSLTCLVKGFYPSDIAVEWESNGQPENNYKTTPPVLDSDGSFFLYSKLTVDKSRWQQGNVFSCSVMHEALHNHYTQKSLSLSPGGGGSGSAHPIPDSSPLLQFGGQVRQRYLYTDDACQTEAHLEIREDGTVGGAADQSPESLLQLKALKPGVIQILGVKTSRFLCQRPDGALYGSLHFDPEACSFRELLLEDGYNVYQSEAHGLPLHLCGNKSPHRDPAPRGPARFLPLPGLPPAPPEPPGILAPQPPDVGSSDPLSMVYPSQGRSPSYAS

SEQ ID NO: 3992 - protein, 473 aa, Artificial Sequence
  Fusion Protein
HGEGTFTSDKSKQLEKRLVRLFFEWLKKGGHSKGKPPPKGGGGGGGSGGGGSGGGGSAESKYGPPCPPCPAPEFEGGPSVFLFPPKPKDTLMISRTPEVTCVVVDVSQEDPEVQFNWYVDGVEVHNAKTKPREEQFNSTYRVVSVLTVLHQDWLNGKEYKCKVSNKGLPSSIEKTISKAKGQPREPQVYTLPPSQEEMTKNQVSLTCLVKGFYPSDIAVEWESNGQPENNYKTTPPVLDSDGSFFLYSRLTVDKSRWQEGNVFSCSVMHEALHNHYTQKSLSLSLGGGGSGSAHPIPDSSPLLQFGGQVRQRYLYTDDACQTEAHLEIREDGTVGGAADQSPESLLQLKALKPGVIQILGVKTSRFLCQRPDGALYGSLHFDPEACSFRELLLEDGYNVYQSEAHGLPLHLPGCKSPHRDPAPRGPARFLPLPGLPPAPPEPPGILAPQPPDVGSSDPLSMVGSQGRSPSYAS

SEQ ID NO: 3993 - protein, 474 aa, Artificial Sequence
  Fusion Protein
HGEGTFTSDKSKQLEKRLVRLFFEWLKKGGHSKGKPPPKGGGGGGGSGGGGSGGGGSAESKYGPPCPPCPAPEFEGGPSVFLFPPKPKDTLMISRTPEVTCVVVDVSQEDPEVQFNWYVDGVEVHNAKTKPREEQFNSTYRVVSVLTVLHQDWLNGKEYKCKVSNKGLPSSIEKTISKAKGQPREPQVYTLPPSQEEMTKNQVSLTCLVKGFYPSDIAVEWESNGQPENNYKTTPPVLDSDGSFFLYSRLTVDKSRWQEGNVFSCSVMHEALHNHYTQKSLSLSLGGGGSGSAHPIPDSSPLLQFGGQVRQRYLYTDDACQTEAHLEIREDGTVGGAADQSPESLLQLKALKPGVIQILGVKTSRFLCQRPDGALYGSLHFDPEACSFRELLLEDGYNVYQSEAHGLPLHLPGCKSPHRDPAPRGPARFLPLPGLPPAPPEPPGILAPQPPDVGSSDPLSMVYPSQGRSPSYAS

SEQ ID NO: 3994 - protein, 473 aa, Artificial Sequence
  Fusion Protein
HGEGTFTSDKSKQLEKRLVRLFFEWLKKGGHSKGKPPPKGGGGGGGSGGGGSGGGGSAESKYGPPCPPCPAPEFEGGPSVFLFPPKPKDTLMISRTPEVTCVVVDVSQEDPEVQFNWYVDGVEVHNAKTKPREEQFNSTYRVVSVLTVLHQDWLNGKEYKCKVSNKGLPSSIEKTISKAKGQPREPQVYTLPPSQEEMTKNQVSLTCLVKGFYPSDIAVEWESNGQPENNYKTTPPVLDSDGSFFLYSRLTVDKSRWQEGNVFSCSVMHEALHNHYTQKSLSLSLGGGGSGSAHPIPDSSPLLQFGGQVRQRYLYTDDACQTEAHLEIREDGTVGGAADQSPESLLQLKALKPGVIQILGVKTSRFLCQRPDGALYGSLHFDPEACSFRELLLEDGYNVYQSEAHGLPLHLCGNKSPHRDPAPRGPARFLPLPGLPPAPPEPPGILAPQPPDVGSSDPLSMVGSQGRSPSYAS

SEQ ID NO: 3995 - protein, 474 aa, Artificial Sequence
  Fusion Protein
HGEGTFTSDKSKQLEKRLVRLFFEWLKKGGHSKGKPPPKGGGGGGGSGGGGSGGGGSAESKYGPPCPPCPAPEFEGGPSVFLFPPKPKDTLMISRTPEVTCVVVDVSQEDPEVQFNWYVDGVEVHNAKTKPREEQFNSTYRVVSVLTVLHQDWLNGKEYKCKVSNKGLPSSIEKTISKAKGQPREPQVYTLPPSQEEMTKNQVSLTCLVKGFYPSDIAVEWESNGQPENNYKTTPPVLDSDGSFFLYSRLTVDKSRWQEGNVFSCSVMHEALHNHYTQKSLSLSLGGGGSGSAHPIPDSSPLLQFGGQVRQRYLYTDDACQTEAHLEIREDGTVGGAADQSPESLLQLKALKPGVIQILGVKTSRFLCQRPDGALYGSLHFDPEACSFRELLLEDGYNVYQSEAHGLPLHLCGNKSPHRDPAPRGPARFLPLPGLPPAPPEPPGILAPQPPDVGSSDPLSMVYPSQGRSPSYAS

SEQ ID NO: 3996 - protein, 471 aa, Artificial Sequence
  Fusion Protein
HGEGTFTSDKSKQLEKRLVRLFFEWLIKGGHSKIKPPPKGGGGGGGSGGGGSGGGGSADKTHTCPPCPAPEAAGGPSVFLFPPKPKDTLMISRTPEVTCVVVDVSHEDPEVKFNWYVDGVEVHNAKTKPREEQYNSTYRVVSVLTVLHQDWLNGKEYKCKVSNKALPAPIEKTISKAKGQPREPQVYTLPPSRDELTKNQVSLTCLVKGFYPSDIAVEWESNGQPENNYKTTPPVLDSDGSFFLYSKLTVDKSRWQQGNVFSCSVMHEALHNHYTQKSLSLSPGGGGSGSAHPIPDSSPLLQFGGQVRQRYLYTDDACQTEAHLEIREDGTVGGAADQSPESLLQLKALKPGVIQILGVKTSRFLCQRPDGALYGSLHFDPEACSFRELLLEDGYNVYQSEAHGLPLHLPGCKSPHRDPAPRGPARFLPLPGLPPAPPEPPGILAPQPPDVGSSDPLSMVGSQGRSPSYAS

SEQ ID NO: 3997 - protein, 472 aa, Artificial Sequence
  Fusion Protein
HGEGTFTSDKSKQLEKRLVRLFFEWLIKGGHSKIKPPPKGGGGGGGSGGGGSGGGGSADKTHTCPPCPAPEAAGGPSVFLFPPKPKDTLMISRTPEVTCVVVDVSHEDPEVKFNWYVDGVEVHNAKTKPREEQYNSTYRVVSVLTVLHQDWLNGKEYKCKVSNKALPAPIEKTISKAKGQPREPQVYTLPPSRDELTKNQVSLTCLVKGFYPSDIAVEWESNGQPENNYKTTPPVLDSDGSFFLYSKLTVDKSRWQQGNVFSCSVMHEALHNHYTQKSLSLSPGGGGSGSAHPIPDSSPLLQFGGQVRQRYLYTDDACQTEAHLEIREDGTVGGAADQSPESLLQLKALKPGVIQILGVKTSRFLCQRPDGALYGSLHFDPEACSFRELLLEDGYNVYQSEAHGLPLHLPGCKSPHRDPAPRGPARFLPLPGLPPAPPEPPGILAPQPPDVGSSDPLSMVYPSQGRSPSYAS

SEQ ID NO: 3998 - protein, 471 aa, Artificial Sequence
  Fusion Protein
HGEGTFTSDKSKQLEKRLVRLFFEWLIKGGHSKIKPPPKGGGGGGGSGGGGSGGGGSADKTHTCPPCPAPEAAGGPSVFLFPPKPKDTLMISRTPEVTCVVVDVSHEDPEVKFNWYVDGVEVHNAKTKPREEQYNSTYRVVSVLTVLHQDWLNGKEYKCKVSNKALPAPIEKTISKAKGQPREPQVYTLPPSRDELTKNQVSLTCLVKGFYPSDIAVEWESNGQPENNYKTTPPVLDSDGSFFLYSKLTVDKSRWQQGNVFSCSVMHEALHNHYTQKSLSLSPGGGGSGSAHPIPDSSPLLQFGGQVRQRYLYTDDACQTEAHLEIREDGTVGGAADQSPESLLQLKALKPGVIQILGVKTSRFLCQRPDGALYGSLHFDPEACSFRELLLEDGYNVYQSEAHGLPLHLCGNKSPHRDPAPRGPARFLPLPGLPPAPPEPPGILAPQPPDVGSSDPLSMVGSQGRSPSYAS

SEQ ID NO: 3999 - protein, 472 aa, Artificial Sequence
  Fusion Protein
HGEGTFTSDKSKQLEKRLVRLFFEWLIKGGHSKIKPPPKGGGGGGGSGGGGSGGGGSADKTHTCPPCPAPEAAGGPSVFLFPPKPKDTLMISRTPEVTCVVVDVSHEDPEVKFNWYVDGVEVHNAKTKPREEQYNSTYRVVSVLTVLHQDWLNGKEYKCKVSNKALPAPIEKTISKAKGQPREPQVYTLPPSRDELTKNQVSLTCLVKGFYPSDIAVEWESNGQPENNYKTTPPVLDSDGSFFLYSKLTVDKSRWQQGNVFSCSVMHEALHNHYTQKSLSLSPGGGGSGSAHPIPDSSPLLQFGGQVRQRYLYTDDACQTEAHLEIREDGTVGGAADQSPESLLQLKALKPGVIQILGVKTSRFLCQRPDGALYGSLHFDPEACSFRELLLEDGYNVYQSEAHGLPLHLCGNKSPHRDPAPRGPARFLPLPGLPPAPPEPPGILAPQPPDVGSSDPLSMVYPSQGRSPSYAS

SEQ ID NO: 4000 - protein, 471 aa, Artificial Sequence
  Fusion Protein
HGEGTFTSDKSKQLEKRLVRLFFEWLIKGGHSKIKPPPKGGGGGGGSGGGGSGGGGSADKTHTCPPCPAPELLGGPSVFLFPPKPKDTLMISRTPEVTCVVVDVSHEDPEVKFNWYVDGVEVHNAKTKPREEQYNNASRVVSVLTVLHQDWLNGKEYKCKVSNKALPAPIEKTISKAKGQPREPQVYTLPPSRDELTKNQVSLTCLVKGFYPSDIAVEWESNGQPENNYKTTPPVLDSDGSFFLYSKLTVDKSRWQQGNVFSCSVMHEALHNHYTQKSLSLSPGGGGSGSAHPIPDSSPLLQFGGQVRQRYLYTDDACQTEAHLEIREDGTVGGAADQSPESLLQLKALKPGVIQILGVKTSRFLCQRPDGALYGSLHFDPEACSFRELLLEDGYNVYQSEAHGLPLHLPGCKSPHRDPAPRGPARFLPLPGLPPAPPEPPGILAPQPPDVGSSDPLSMVGSQGRSPSYAS

SEQ ID NO: 4001 - protein, 472 aa, Artificial Sequence
  Fusion Protein
HGEGTFTSDKSKQLEKRLVRLFFEWLIKGGHSKIKPPPKGGGGGGGSGGGGSGGGGSADKTHTCPPCPAPELLGGPSVFLFPPKPKDTLMISRTPEVTCVVVDVSHEDPEVKFNWYVDGVEVHNAKTKPREEQYNNASRVVSVLTVLHQDWLNGKEYKCKVSNKALPAPIEKTISKAKGQPREPQVYTLPPSRDELTKNQVSLTCLVKGFYPSDIAVEWESNGQPENNYKTTPPVLDSDGSFFLYSKLTVDKSRWQQGNVFSCSVMHEALHNHYTQKSLSLSPGGGGSGSAHPIPDSSPLLQFGGQVRQRYLYTDDACQTEAHLEIREDGTVGGAADQSPESLLQLKALKPGVIQILGVKTSRFLCQRPDGALYGSLHFDPEACSFRELLLEDGYNVYQSEAHGLPLHLPGCKSPHRDPAPRGPARFLPLPGLPPAPPEPPGILAPQPPDVGSSDPLSMVYPSQGRSPSYAS

SEQ ID NO: 4002 - protein, 471 aa, Artificial Sequence
  Fusion Protein
HGEGTFTSDKSKQLEKRLVRLFFEWLIKGGHSKIKPPPKGGGGGGGSGGGGSGGGGSADKTHTCPPCPAPELLGGPSVFLFPPKPKDTLMISRTPEVTCVVVDVSHEDPEVKFNWYVDGVEVHNAKTKPREEQYNNASRVVSVLTVLHQDWLNGKEYKCKVSNKALPAPIEKTISKAKGQPREPQVYTLPPSRDELTKNQVSLTCLVKGFYPSDIAVEWESNGQPENNYKTTPPVLDSDGSFFLYSKLTVDKSRWQQGNVFSCSVMHEALHNHYTQKSLSLSPGGGGSGSAHPIPDSSPLLQFGGQVRQRYLYTDDACQTEAHLEIREDGTVGGAADQSPESLLQLKALKPGVIQILGVKTSRFLCQRPDGALYGSLHFDPEACSFRELLLEDGYNVYQSEAHGLPLHLCGNKSPHRDPAPRGPARFLPLPGLPPAPPEPPGILAPQPPDVGSSDPLSMVGSQGRSPSYAS

SEQ ID NO: 4003 - protein, 472 aa, Artificial Sequence
  Fusion Protein
HGEGTFTSDKSKQLEKRLVRLFFEWLIKGGHSKIKPPPKGGGGGGGSGGGGSGGGGSADKTHTCPPCPAPELLGGPSVFLFPPKPKDTLMISRTPEVTCVVVDVSHEDPEVKFNWYVDGVEVHNAKTKPREEQYNNASRVVSVLTVLHQDWLNGKEYKCKVSNKALPAPIEKTISKAKGQPREPQVYTLPPSRDELTKNQVSLTCLVKGFYPSDIAVEWESNGQPENNYKTTPPVLDSDGSFFLYSKLTVDKSRWQQGNVFSCSVMHEALHNHYTQKSLSLSPGGGGSGSAHPIPDSSPLLQFGGQVRQRYLYTDDACQTEAHLEIREDGTVGGAADQSPESLLQLKALKPGVIQILGVKTSRFLCQRPDGALYGSLHFDPEACSFRELLLEDGYNVYQSEAHGLPLHLCGNKSPHRDPAPRGPARFLPLPGLPPAPPEPPGILAPQPPDVGSSDPLSMVYPSQGRSPSYAS

SEQ ID NO: 4004 - protein, 473 aa, Artificial Sequence
  Fusion Protein
HGEGTFTSDKSKQLEKRLVRLFFEWLIKGGHSKIKPPPKGGGGGGGSGGGGSGGGGSAESKYGPPCPPCPAPEFEGGPSVFLFPPKPKDTLMISRTPEVTCVVVDVSQEDPEVQFNWYVDGVEVHNAKTKPREEQFNSTYRVVSVLTVLHQDWLNGKEYKCKVSNKGLPSSIEKTISKAKGQPREPQVYTLPPSQEEMTKNQVSLTCLVKGFYPSDIAVEWESNGQPENNYKTTPPVLDSDGSFFLYSRLTVDKSRWQEGNVFSCSVMHEALHNHYTQKSLSLSLGGGGSGSAHPIPDSSPLLQFGGQVRQRYLYTDDACQTEAHLEIREDGTVGGAADQSPESLLQLKALKPGVIQILGVKTSRFLCQRPDGALYGSLHFDPEACSFRELLLEDGYNVYQSEAHGLPLHLPGCKSPHRDPAPRGPARFLPLPGLPPAPPEPPGILAPQPPDVGSSDPLSMVGSQGRSPSYAS

SEQ ID NO: 4005 - protein, 474 aa, Artificial Sequence
  Fusion Protein
HGEGTFTSDKSKQLEKRLVRLFFEWLIKGGHSKIKPPPKGGGGGGGSGGGGSGGGGSAESKYGPPCPPCPAPEFEGGPSVFLFPPKPKDTLMISRTPEVTCVVVDVSQEDPEVQFNWYVDGVEVHNAKTKPREEQFNSTYRVVSVLTVLHQDWLNGKEYKCKVSNKGLPSSIEKTISKAKGQPREPQVYTLPPSQEEMTKNQVSLTCLVKGFYPSDIAVEWESNGQPENNYKTTPPVLDSDGSFFLYSRLTVDKSRWQEGNVFSCSVMHEALHNHYTQKSLSLSLGGGGSGSAHPIPDSSPLLQFGGQVRQRYLYTDDACQTEAHLEIREDGTVGGAADQSPESLLQLKALKPGVIQILGVKTSRFLCQRPDGALYGSLHFDPEACSFRELLLEDGYNVYQSEAHGLPLHLPGCKSPHRDPAPRGPARFLPLPGLPPAPPEPPGILAPQPPDVGSSDPLSMVYPSQGRSPSYAS

SEQ ID NO: 4006 - protein, 473 aa, Artificial Sequence
  Fusion Protein
HGEGTFTSDKSKQLEKRLVRLFFEWLIKGGHSKIKPPPKGGGGGGGSGGGGSGGGGSAESKYGPPCPPCPAPEFEGGPSVFLFPPKPKDTLMISRTPEVTCVVVDVSQEDPEVQFNWYVDGVEVHNAKTKPREEQFNSTYRVVSVLTVLHQDWLNGKEYKCKVSNKGLPSSIEKTISKAKGQPREPQVYTLPPSQEEMTKNQVSLTCLVKGFYPSDIAVEWESNGQPENNYKTTPPVLDSDGSFFLYSRLTVDKSRWQEGNVFSCSVMHEALHNHYTQKSLSLSLGGGGSGSAHPIPDSSPLLQFGGQVRQRYLYTDDACQTEAHLEIREDGTVGGAADQSPESLLQLKALKPGVIQILGVKTSRFLCQRPDGALYGSLHFDPEACSFRELLLEDGYNVYQSEAHGLPLHLCGNKSPHRDPAPRGPARFLPLPGLPPAPPEPPGILAPQPPDVGSSDPLSMVGSQGRSPSYAS

SEQ ID NO: 4007 - protein, 474 aa, Artificial Sequence
  Fusion Protein
HGEGTFTSDKSKQLEKRLVRLFFEWLIKGGHSKIKPPPKGGGGGGGSGGGGSGGGGSAESKYGPPCPPCPAPEFEGGPSVFLFPPKPKDTLMISRTPEVTCVVVDVSQEDPEVQFNWYVDGVEVHNAKTKPREEQFNSTYRVVSVLTVLHQDWLNGKEYKCKVSNKGLPSSIEKTISKAKGQPREPQVYTLPPSQEEMTKNQVSLTCLVKGFYPSDIAVEWESNGQPENNYKTTPPVLDSDGSFFLYSRLTVDKSRWQEGNVFSCSVMHEALHNHYTQKSLSLSLGGGGSGSAHPIPDSSPLLQFGGQVRQRYLYTDDACQTEAHLEIREDGTVGGAADQSPESLLQLKALKPGVIQILGVKTSRFLCQRPDGALYGSLHFDPEACSFRELLLEDGYNVYQSEAHGLPLHLCGNKSPHRDPAPRGPARFLPLPGLPPAPPEPPGILAPQPPDVGSSDPLSMVYPSQGRSPSYAS

SEQ ID NO: 4008 - protein, 9 aa, Artificial Sequence
  Peptide Extension
HKKGKPPPK

SEQ ID NO: 4009 - protein, 9 aa, Artificial Sequence
  Peptide Extension
HKKGKYPPK

SEQ ID NO: 4010 - protein, 9 aa, Artificial Sequence
  Peptide Extension
HKKIKPPPK

SEQ ID NO: 4011 - protein, 9 aa, Artificial Sequence
  Peptide Extension
HKSGKPPPK

SEQ ID NO: 4012 - protein, 9 aa, Artificial Sequence
  Peptide Extension
HKSGKYSPK

SEQ ID NO: 4013 - protein, 9 aa, Artificial Sequence
  Peptide Extension
HKSGRPSPK

SEQ ID NO: 4014 - protein, 9 aa, Artificial Sequence
  Peptide Extension
HKSQKPPPK

SEQ ID NO: 4015 - protein, 9 aa, Artificial Sequence
  Peptide Extension
HPSGKPPPK

SEQ ID NO: 4016 - protein, 8 aa, Artificial Sequence
  Peptide Extension
HSGKPPPK

SEQ ID NO: 4017 - protein, 9 aa, Artificial Sequence
  Peptide Extension
HSKGKPPPK

SEQ ID NO: 4018 - protein, 9 aa, Artificial Sequence
  Peptide Extension
HSKGKYPPK

SEQ ID NO: 4019 - protein, 9 aa, Artificial Sequence
  Peptide Extension
HSKGRLPPK

SEQ ID NO: 4020 - protein, 9 aa, Artificial Sequence
  Peptide Extension
HSKGRPPPK

SEQ ID NO: 4021 - protein, 9 aa, Artificial Sequence
  Peptide Extension
HSKIKPPPK

SEQ ID NO: 4022 - protein, 9 aa, Artificial Sequence
  Peptide Extension
HSKIKYPPK

SEQ ID NO: 4023 - protein, 9 aa, Artificial Sequence
  Peptide Extension
HSKIRPPPK

SEQ ID NO: 4024 - protein, 9 aa, Artificial Sequence
  Peptide Extension
HSKQKPPPK

SEQ ID NO: 4025 - protein, 9 aa, Artificial Sequence
  Peptide Extension
HSSGKLPPK

SEQ ID NO: 4026 - protein, 9 aa, Artificial Sequence
  Peptide Extension
HSSGKLSPK

SEQ ID NO: 4027 - protein, 9 aa, Artificial Sequence
  Peptide Extension
HSSGKPPPK

SEQ ID NO: 4028 - protein, 10 aa, Artificial Sequence
  Peptide Extension
HSSGKPPPKG

SEQ ID NO: 4029 - protein, 9 aa, Artificial Sequence
  Peptide Extension
HSSGKPPPS

SEQ ID NO: 4030 - protein, 9 aa, Artificial Sequence
  Peptide Extension
HSSGRLSPK

SEQ ID NO: 4031 - protein, 9 aa, Artificial Sequence
  Peptide Extension
HSSGRPPPK

SEQ ID NO: 4032 - protein, 9 aa, Artificial Sequence
  Peptide Extension
HSSGRYPPK

SEQ ID NO: 4033 - protein, 9 aa, Artificial Sequence
  Peptide Extension
HSSGRYSPK

SEQ ID NO: 4034 - protein, 9 aa, Artificial Sequence
  Peptide Extension
HSSIKPPPK

SEQ ID NO: 4035 - protein, 9 aa, Artificial Sequence
  Peptide Extension
HSSIRPPPK

SEQ ID NO: 4036 - protein, 9 aa, Artificial Sequence
  Peptide Extension
HSSQKPPPK

SEQ ID NO: 4037 - protein, 9 aa, Artificial Sequence
  Peptide Extension
HSSQRPPPK

SEQ ID NO: 4038 - protein, 9 aa, Artificial Sequence
  Peptide Extension
KSKGKPKPK

SEQ ID NO: 4039 - protein, 9 aa, Artificial Sequence
  Peptide Extension
PESGAPPPS

SEQ ID NO: 4040 - protein, 7 aa, Artificial Sequence
  Peptide Extension
PKKIRYS

SEQ ID NO: 4041 - protein, 7 aa, Artificial Sequence
  Peptide Extension
PKKQRLS

SEQ ID NO: 4042 - protein, 7 aa, Artificial Sequence
  Peptide Extension
PSKEIIS

SEQ ID NO: 4043 - protein, 9 aa, Artificial Sequence
  Peptide Extension
PSKGKPPPK

SEQ ID NO: 4044 - protein, 9 aa, Artificial Sequence
  Peptide Extension
PSKGRPPPK

SEQ ID NO: 4045 - protein, 9 aa, Artificial Sequence
  Peptide Extension
PSKIKPPPK

SEQ ID NO: 4046 - protein, 9 aa, Artificial Sequence
  Peptide Extension
PSSGAPPPE

SEQ ID NO: 4047 - protein, 9 aa, Artificial Sequence
  Peptide Extension
PSSGAPPPS

SEQ ID NO: 4048 - protein, 9 aa, Artificial Sequence
  Peptide Extension
PSSGEPPPE

SEQ ID NO: 4049 - protein, 9 aa, Artificial Sequence
  Peptide Extension
PSSGEPPPK

SEQ ID NO: 4050 - protein, 10 aa, Artificial Sequence
  Peptide Extension
PSSGEPPPKS

SEQ ID NO: 4051 - protein, 9 aa, Artificial Sequence
  Peptide Extension
PSSGKLPPK

SEQ ID NO: 4052 - protein, 9 aa, Artificial Sequence
  Peptide Extension
PSSGKPKPK

SEQ ID NO: 4053 - protein, 9 aa, Artificial Sequence
  Peptide Extension
PSSGKPPPE

SEQ ID NO: 4054 - protein, 10 aa, Artificial Sequence
  Peptide Extension
PSSGKPPPES

SEQ ID NO: 4055 - protein, 9 aa, Artificial Sequence
  Peptide Extension
PSSGKPPPK

SEQ ID NO: 4056 - protein, 14 aa, Artificial Sequence
  Peptide Extension
PSSGKPPPKPGCGS

SEQ ID NO: 4057 - protein, 10 aa, Artificial Sequence
  Peptide Extension
PSSGKPPPKS

SEQ ID NO: 4058 - protein, 9 aa, Artificial Sequence
  Peptide Extension
PSSGKYSPK

SEQ ID NO: 4059 - protein, 9 aa, Artificial Sequence
  Peptide Extension
PSSGRPPPK

SEQ ID NO: 4060 - protein, 9 aa, Artificial Sequence
  Peptide Extension
PSSGRYPPK

SEQ ID NO: 4061 - protein, 9 aa, Artificial Sequence
  Peptide Extension
PSSIKPPPK

SEQ ID NO: 4062 - protein, 9 aa, Artificial Sequence
  Peptide Extension
PVSGAPPPS

SEQ ID NO: 4063 - protein, 14 aa, Artificial Sequence
  Peptide Extension
PVSGAPPSKKKKKK

SEQ ID NO: 4064 - protein, 39 aa, Artificial Sequence; identical to SEQ ID NO: 553
  GLP Peptide

SEQ ID NO: 4065 - protein, 39 aa, Artificial Sequence; identical to SEQ ID NO: 528
  GLP Peptide

SEQ ID NO: 4066 - protein, 39 aa, Artificial Sequence; identical to SEQ ID NO: 519
  GLP Peptide

SEQ ID NO: 4067 - protein, 39 aa, Artificial Sequence; identical to SEQ ID NO: 518
  GLP Peptide

SEQ ID NO: 4068 - protein, 40 aa, Artificial Sequence; identical to SEQ ID NO: 340
  GLP Peptide

SEQ ID NO: 4069 - protein, 40 aa, Artificial Sequence; identical to SEQ ID NO: 344
  GLP Peptide

SEQ ID NO: 4070 - protein, 40 aa, Artificial Sequence
  GLP Peptide
HGEGTFTSDLSKQLEEEAVQLFIEWLLATGPSSGEPPPES

SEQ ID NO: 4071 - protein, 30 aa, Artificial Sequence
  GLP Peptide
HGEGTFTSDLSKQMEEEAVRLFIEWLKNGG

SEQ ID NO: 4072 - protein, 30 aa, Artificial Sequence
  GLP Peptide
HGEGTFTSDLSKQLEEEAVQLFIEWLLATG

SEQ ID NO: 4073 - protein, 39 aa, Artificial Sequence
  GLP Peptide
HGEGTFTSDLSKQLEEEAVQLFIEWLLATGPSSGEPPPE

SEQ ID NO: 4074 - protein, 40 aa, Artificial Sequence
  GLP Peptide
GHGEGTFTSDLSKQLEEERVQEFIEWLVKGRPSSGAPPPS

SEQ ID NO: 4075 - protein, 39 aa, Artificial Sequence
  GLP Peptide
HGEGTFTSDLSKQLEEEAVQLFIEWLEATGPSSGAPPPS

SEQ ID NO: 4076 - protein, 38 aa, Artificial Sequence
  GLP Peptide
GHGEGTFTSDLSIQLEEEAVRLFIEWLLAGGPKKQRLS

SEQ ID NO: 4077 - protein, 30 aa, Artificial Sequence
  General Sequence I
  misc_feature (1)..(1): Xaa is H, Y or F
  misc_feature (2)..(2): Xaa is G, S, T or A
  misc_feature (3)..(3): Xaa is E or Q
  misc_feature (10)..(10): Xaa is K or L
  misc_feature (12)..(12): Xaa is K, I or Q
  misc_feature (13)..(13): Xaa is Q or L
  misc_feature (14)..(14): Xaa is L, M or C
  misc_feature (15)..(15): Xaa is E, A or D
  misc_feature (16)..(16): Xaa is E, K or S
  misc_feature (17)..(17): Xaa is E, R or Q
  misc_feature (18)..(18): Xaa L, A or R
  misc_feature (19)..(19): Xaa is V, A or F
  misc_feature (20)..(20): Xaa is R, H, Q, K or I
  misc_feature (21)..(21): Xaa is L, E, H or R
  misc_feature (22)..(22): Xaa is F or L
  misc_feature (23)..(23): Xaa is I, Y or F
  misc_feature (24)..(24): Xaa is E, L or Y
  misc_feature (25)..(25): Xaa is W or L
  misc_feature (27)..(27): Xaa is I, L, K or E
  misc_feature (28)..(28): Xaa is A, K, N or E
  misc_feature (29)..(29): Xaa is G, T, K or V
  misc_feature (30)..(30): Xaa is G or deleted
XXXGTFTSDXSXXXXXXXXXXXXXXLXXXX

SEQ ID NO: 4078 - protein, 30 aa, Artificial Sequence
  General Sequence II
  misc_feature (1)..(1): Xaa is H, Y or F
  misc_feature (10)..(10): Xaa is K or L
  misc_feature (12)..(12): Xaa is K, I or Q
  misc_feature (13)..(13): Xaa is Q or L
  misc_feature (15)..(15): Xaa is E, A or D
  misc_feature (16)..(16): Xaa is E, K or S
  misc_feature (17)..(17): Xaa is E, R or Q
  misc_feature (18)..(18): Xaa L, A or R
  misc_feature (19)..(19): Xaa is V, A or F
  misc_feature (20)..(20): Xaa is R, H, Q, K or I
  misc_feature (21)..(21): Xaa is L, E, H or R
  misc_feature (23)..(23): Xaa is I, Y or F
  misc_feature (27)..(27): Xaa is I, L, K or E
  misc_feature (28)..(28): Xaa is A, K, N or E
  misc_feature (29)..(29): Xaa is G, T, K or V
XGEGTFTSDXSXXLXXXXXXXFXEWLXXXG

SEQ ID NO: 4079 - protein, 30 aa, Artificial Sequence
  General Sequence III
  misc_feature (10)..(10): Xaa is K or L
  misc_feature (18)..(18): Xaa is A or R
  misc_feature (20)..(20): Xaa is R or Q
  misc_feature (29)..(29): Xaa is G or T
HGEGTFTSDXSKQLEEEXVXLFIEWLKAXG

1. A fusion protein comprising a GLP-1R (glucagon-like peptide-1 receptor) agonistic peptide and a functionally active variant of human FGF21 (fibroblast growth factor 21),
wherein the GLP-1R agonistic peptide is a variant of native GLP-1(7-36) comprising up to about 15 substitutions of amino acid residues in the amino acid sequence of native GLP-1(7-36) (SEQ ID NO: 260);
wherein the functionally active variant of human FGF21 comprises an amino acid sequence being at least about 96% identical to the amino acid sequence of SEQ ID NO: 250 or SEQ ID NO: 251 and comprises
(i) substitutions Q55C and P147C or substitutions Q55C and N149C, and
(ii) a substitution or deletion of G198 and/or P199,
wherein numbering of the amino acid residues is in accordance with SEQ ID NO: 250; and
wherein the GLP-1R agonistic peptide and the functionally active variant of human FGF21 are linked via a linker molecule comprising a structure selected from the group consisting of L - Fc, Fc - L, L₁ - Fc - L₂ and Fc, wherein L, L₁ and L₂ are independently selected from the group consisting of single amino acids and peptides, and Fc is an Fc domain of an immunoglobulin or a variant thereof.

2. The fusion protein according to claim 1, having a GLP-1R agonistic activity which is about 9- to about 531-fold reduced as compared to the GLP-1R agonistic activity of native GLP-1(7-36).

3. The fusion protein according to claim 1, wherein the GLP-1R agonistic peptide comprises an amino acid sequence selected from the group consisting of SEQ ID NOs: 261 to 565.

4. The fusion protein according to claim 1, wherein the GLP-1R agonistic peptide comprises the amino acid sequence H-G-E-G-T-F-T-S-D-X₁₀-S-K-Q-L-E-E-E-X₁₈-V-X₂₀-L-F-I-E-W-L-K-A-X₂₉-G (SEQ ID NO: 4079), wherein
X₁₀ is K or L,
X₁₈ is A or R,
X₂₀ is R or Q, and
X₂₉ is G or T;
wherein, optionally, the amino acid sequence further comprises at least one additional amino acid residue at its N-terminus; and
wherein, optionally, the amino acid sequence further comprises a peptide extension consisting of up to about 12, about 11 or about 10 amino acid residues at its C-terminus.

5. The fusion protein according to claim 1, wherein the GLP-1R agonistic peptide comprises the amino acid sequence of SEQ ID NO: 261 or 262.

6. The fusion protein according to claim 1, wherein the functionally active variant of human FGF21 comprises a substitution or deletion selected from the group consisting of G198R, G198K, G198Y and P199 deleted.

7. The fusion protein according to claim 1, wherein the functionally active variant of human FGF21 comprises an amino acid sequence selected from the group consisting of SEQ ID NOs: 253, 254, 255 and 256.

8. The fusion protein according to claim 1, wherein the Fc domain of an immunoglobulin or a variant thereof comprises an amino acid sequence selected from the group consisting of SEQ ID NOs: 257, 258 and 259.

9. A fusion protein comprising an amino acid sequence selected from the group consisting of SEQ ID NOs: 1-8, 18-31, 39, 40, 42-72, 74, 76, 78-84, 88-90, 92-97, 100-102, 105-109, 112, 113, 115, 116, 118, 120-124, 126-130, 132-136, 139, 142-148, 150-153, 155-158, 161-172, 174-177, 180-188, 190, 192-209, 211, 212, 216, 217 and 219-229, or a functionally active variant thereof which comprises an amino acid sequence at least about 96% identical to the amino acid sequence selected from the group consisting of SEQ ID NOs: 1-8, 18-31, 39, 40, 42-72, 74, 76, 78-84, 88-90, 92-97, 100-102, 105-109, 112, 113, 115, 116, 118, 120-124, 126-130, 132-136, 139, 142-148, 150-153, 155-158, 161-172, 174-177, 180-188, 190, 192-209, 211, 212, 216, 217 and 219-229.

10. A fusion protein comprising an amino acid sequence selected from the group consisting of SEQ ID NOs: 2, 7 and 8, or a functionally active variant thereof which comprises an amino acid sequence at least about 96% identical to the amino acid sequence selected from the group consisting of SEQ ID NOs: 2, 7 and 8.

11. The fusion protein according to claim 1, wherein said fusion protein can activate human GLP-1R with an EC50 of about 15 pmol/L to about 400 pmol/L, or about 20 pmol/L to about 400 pmol/L, or about 50 pmol/L to about 400 pmol/L, or about 100 pmol/L to about 400 pmol/L, as determined by measuring the cAMP response of cells stably expressing human GLP-1R.

12. The fusion protein according to claim 1, wherein said fusion protein can induce (i) autophosphorylation of human FGF Receptor 1c (FGFR1c) with an EC50 of about 250 nmol/L or lower, or about 200 nmol/L or lower, or about 150 nmol/L or lower, or about 100 nmol/L or lower, or about 75 nmol/L or lower, or about 50 nmol/L or lower; and/or (ii) phosphorylation of Mitogen-Activated Protein Kinase (MAPK) ERK½ with an EC50 of about 100 nmol/L or lower, or about 75 nmol/L or lower, or about 50 nmol/L or lower, or about 25 nmol/L or lower, or about 20 nmol/L or lower, or about 15 nmol/L or lower, or about 10 nmol/L or lower.

13. A nucleic acid molecule encoding a fusion protein according to claim 1.

14. A host cell containing a nucleic acid molecule according to claim 13.

15. A pharmaceutical composition comprising a fusion protein according to claim 1.

16. A kit comprising a fusion protein according to claim 1.

17. A fusion protein according to claim 1 for use as a medicament.

18. A fusion protein according to claim 1 for use in the treatment of a disease or disorder selected from the group consisting of obesity, being overweight, metabolic syndrome, diabetes mellitus, diabetic retinopathy, hyperglycemia, dyslipidemia, Non-Alcoholic SteatoHepatitis (NASH) and atherosclerosis.

19. The fusion protein, the nucleic acid molecule, the host cell or the pharmaceutical composition for use according to claim 18, wherein the diabetes mellitus is type 1 diabetes mellitus or type 2 diabetes mellitus.
